United States Patent Application Publication US 2018/0126003 A1 - sequence listing, part 163

SEQ ID NO: 286049 - DNA, 11784 bp, Artificial Sequence
  derived and/or modified sequence
aggagtggaaggttgaggggggcgctaggcgcccttcgctccctccctctggaggagctgccgccgccaccgccgccactctgctgctgccgccgccgccgccgccgctcccgccgccattttgggttcgctttgcggaggggagacgatcccagtctcggttgcgggacccgcctcccctcagtttgccccctttagccttccacctttcccttctcctctctcgcatttccgccagtcagcttacccgctggccgcctcctgacaagcgggagggatccgccgtggacccagggaagcggaggagcctggcggccaccccctcttccccacttccctgcactctcatcgctctcggcctcggcctcggcctccgacacgagaaagatgctggtttcgagttttggagatccttgttttttatggaacacagttctgtaaaattttcataagattccttggcaataacatacgcttgtgatggaccctagaaatactgctatgttaggattgggttctgattccgaaggtttttcaagaaagagtccttctgccatcagtactggcacattggtcagtaagagagaagtagagctagaaaaaaacacaaaggaggaagaggaccttcgcaaacggaatcgagaaagaaacatcgaagctgggaaagatgatggtttgactgatgcacagcaacagttttcagtgaaagaaacaaacttttcagagggaaatttaaaattgaaaattggcctccaggctaagagaactaaaaaacctccaaagaacttggagaactatgtatgtcgacctgccataaaaacaactattaagcacccaaggaaagcacttaaaagtggaaagatgacggatgaaaagaatgaacactgtccttcaaaacgagacccttcaaagttgtacaagaaagcagatgatgttgcagccattgaatgccagtctgaagaagtcatccgtcttcattcacagggagaaaacaatcctttgtctaagaagctgtctccagtacactcagaaatggcagattatattaatgcaacgccatctactcttcttggtagccgggatcctgatttaaaggacagagcattacttaatggaggaactagtgtaacagaaaagttggcacagctgattgctacctgtcctccttccaagtcttccaagacaaaaccgaagaagttaggaactggcactacagcaggattggttagcaaggatttgatcaggaaagcaggtgttggctctgtagctggaataatacataaggacttaataaaaaagccaaccatcagcacagcagttggattggtaactaaagatcctgggaaaaagccagtgtttaatgcagcagtaggattggtcaataaggactctgtgaaaaaactgggaactggcactacagcggtattcattaataaaaacttaggcaaaaagccaggaactatcactacagtaggactgctaagcaaagattcaggaaagaagctaggaattggtattgttccaggtttagtgcataaagagtctggcaagaagttaggacttggcactgtggttggactggttaataaagatttgggaaagaaattgggttctactgttggcctagtggccaaggactgtgcaaagaagattgtagcaagttcagcaatgggattggttaataaggacattggaaagaaactaatgagttgtcctttggcaggtctgatcagtaaagatgccataaaccttaaagccgaagcactgctccccactcaggaaccgcttaaggcttcttgtagtacaaacatcaataatcaggaaagtcaggaactttctgaatccctgaaagatagtgccaccagcaaaacttttgaaaagaatgttgtacggcagaataaagaaagcatattggaaaagttctcagtacgaaaagaaatcattaatttggagaaagaaatgtttaatgaaggaacatgcattcagcaagacagtttctcatccagtgaaaagggatcttatgaaacctcaaagcatgaaaagcagcctcctgtatattgcacttctccggactttaaaatgggaggtgcttctgatgtatctaccgctaaatccccattcagtgcagtaggagaaagcaatctcccttccccatcacctactgtatctgttaatcctttaaccagaagtccccctgaaacttcttcacagttggctcctaatccattacttttaagttctactacagaactaatcgaagaaatttctgaatctgttggaaagaaccagtttacttctgaaagtacccacttgaacgttggtcataggtcagttggtcatagtataagtattgaatgtaaagggattgataaagaggtaaatgattcaaaaactacccatatagatattccaagaataagctcttcccttggaaaaaagccaagtttgacttctgaatccagcattcatactattactccttcagttgttaacttcactagtttatttagtaataagccttttttaaaactgggtgcagtatctgcatcagacaaacactgccaagttgctgaaagcctaagtactagtttgcagtccaaaccattaaaaaaaagaaaaggaagaaaacctcggtggactaaagtggtggcaagaagcacatgccggtctccaaaagggctagaattagaaagatcagagctttttaaaaacgtttcatgtagctcactatcaaatagtaattctgagccagccaagtttatgaaaaacattggacccccttcatttgtagatcatgacttccttaaacgccgattgccaaagttgagcaaatccacagctccatctcttgctctcttagctgatagtgaaaaaccatctcataagtcttttgctactcacaaactatcctccagtatgtgtgtctctagtgaccttttgtctgatatttataagcccaaaagaggaaggcctaaatctaaggagatgcctcaactggaagggccacctaaaaggactttaaaaatccctgcttctaaagtgttttctttacagtctaaggaagaacaagaacccccaattttacagccagaaattgaaatcccttccttcaaacaaggtctgtctgtgtctccttttccaaaaaagagaggcaggcctaagaggcaaatgaggtcaccagtcaagatgaagccacctgtactgtcagtggctccatttgttgccactgaaagtccaagcaagctagaatctgaaagtgacaaccatagaagtagcagtgatttctttgagagcgaggatcaacttcaggatccagatgacctagatgacagtcataggccaagtgtctgtagtatgagtgaccttgagatggaaccagataaaaaaattaccaagagaaacaatggacaattaatgaaaacaattatccgcaaaataaataaaatgaagactttaaagagaaagaaactgttgaatcagattctttcaagttctgtagaatcaagtaataaagggaaagtgcaatccaaactccataatacggtatcaagtcttgctgccacatttggctctaaattgggccaacagataaatgtcagcaagaaaggaaccatttatataggaaagagaagaggtcgcaaaccaaaaactgtcttaaatggtattctttctggtagtcctactagccttgctgttcttgagcaaacagctcaacaggcagctgggtcagcattaggacagattcttcccccattactgccttcatctgctagtagttctgagattcttccatcacctatttgctctcagtcttctgggactagtggaggtcagagccctgtaagtagtgatgcaggttttgttgaacccagttcagtgccatatttgcatttacactccagacagggcagtatgattcagactcttgcaatgaagaaggcctcaaaggggaggaggcggttatctcctcctactttgttgccaaattctccttcgcacttgagtgaactcacatctctaaaagaagctactccttccccaatcagtgagtctcatagtgatgagaccattcccagtgatagtggaattggaacagataataacagcacatcagacagggcagagaaattttgtgggcaaaaaaagaggaggcattcttttgagcatgtttctctgattccccctgaaacctctacagtgctaagcagtcttaaagaaaaacataaacacaaatgtaagcgcaggaatcatgattacctcagctatgacaagatgaaaaggcagaaacgaaaacggaaaaagaaatatccccagcttcgaaatagacaggatccagactttattgcagagctggaggaactaataagtcgcctaagtgaaattcggatcactcatcgaagtcatcattttatcccccgagatcttctgccaactatctttcgaatcaactttaatagtttctatacacatccttctttccccttagaccctttgcactacattcgaaaacctgacttaaaaaagaaaagagggagaccccctaagatgagggaggcaatggctgaaatgccttttatgcacagccttagttttcctctttctagtactggattctatccatcttatggtatgccttactctccttcaccccttacagctgctcccataggattaggttactatggaaggtatcctcccactctttatccacctcctccatctccttctttcaccacgccacttccacctccttcctatatgcatgctggtcatttacttctcaatcctgccaaataccataagaaaaagcataagctacttcgacaggaggcctttcttacaaccagcaggactcccctcctttccatgagtacctaccccagtgttcctcctgagatggcctatggttggatggttgagcacaaacacaggcaccgtcacaaacacagagaacaccgttcttctgaacaaccccaggtttctatggacactggctcttcccgatctgtcctggaatctttgaagcgctatagatttggaaaggatgctgttggagagcgatataagcataaggaaaagcaccgttgtcacatgtcctgccctcatctctctccttcaaaaagcttaataaacagagaggaacagtgggtccaccgagagccttcagaatctagtccattggccttgggattgcagacacctttacagattgactgttcagaaagttctccaagcttatcccttggaggattcactcccaactctgagccagccagcagtgatgaacatacaaaccttttcacaagtgcaataggcagctgcagagtttcaaaccctaactccagtggccggaagaaattaactgacagccctggactcttttctgcacaggacacttcactaaatcggcttcacagaaaggagtcactgccttctaacgaaagggcagtacagactttggcaggctcccagccaacctctgataaaccctcccagcggccatcagagagcacaaattgtagccctacccggaaaaggtcttcatctgagagtacttcttcaacagtaaacggagttccctctcgaagtccaagattagttgcttctggggatgactctgtggatagtctgctgcagcggatggtacaaaatgaggaccaagagcccatggagaaaagtattgatgctgtgattgcaactgcctctgcaccaccttcttccagtccaggccgtagccacagcaaggaccgaaccctgggaaaaccagacagccttttagtgcctgcagtcacaagtgactcttgcaataatagcatctcactcctatctgaaaagttgacaagcagctgttccccccatcatatcaagagaagtgtagtggaagctatgcaacgccaagctcggaaaatgtgcaattacgacaaaatcttggccacaaagaaaaacctagaccatgtcaataaaatcttaaaagccaaaaaacttcaaaggcaggccaggacagggaataactttgtgaaacgtaggccaggtcgacctcggaaatgtccccttcaggctgtcgtatcaatgcaagcattccaggctgctcagtttgtcaacccagaattgaacagagacgaggaaggagcagcactgcacctcagtcctgacacagttacagatgtaattgaggctgttgttcagagtgtaaatctgaacccagaacataaaaaggggttgaagagaaaaggttggctattggaagaacagaccagaaaaaagcagaagccattaccagaggaagaagagcaagagaataataaaagctttaatgaagcaccagttgagattcccagtccttctgaaaccccagctaaaccttctgaacctgaaagtaccttgcagcctgtgctttctctcatcccaagggaaaagaagcccccacgtcccccaaagaagaagtatcagaaagcagggctgtattctgacgtttacaaaactacagacccaaagagtcgattgatccaattaaagaaagagaagctggagtatactccaggagagcatgaatatggattatttccagcgcccattcatgttggaaagtatctaagacaaaagagaattgacttccagcttccttatgatatcctttggcagtggaaacacaatcagctatacaaaaagccagatgtcccactatataagaaaattcgttcaaatgtctacgttgatgtcaaacccctttctggttacgaagctaccacctgtaactgtaagaagccagatgatgacaccaggaagggctgtgttgatgactgcctcaatagaatgatctttgctgagtgttcccccaacacttgcccatgtggcgagcaatgctgtaaccagaggatacagaggcatgaatgggtgcaatgtctagaacgatttcgagctgaggaaaaaggttggggaatcagaaccaaagagcccctaaaagctgggcagttcatcattgaatacctaggggaggtcgtcagtgaacaggagttcaggaacaggatgattgagcagtatcataatcacagtgaccactactgcctgaacctggatagtgggatggtgattgacagttaccgcatgggaaatgaggcccgattcatcaaccatagctgtgacccaaattgtgaaatgcagaaatggtctgttaatggagtataccggattggactctatgctcttaaagacatgccagctgggactgaactcacttatgattataactttcattccttcaatgtggaaaaacagcaactttgtaagtgtggctttgagaaatgtcgaggaatcatcggaggcaagagtcagcgtgtgaatggactcaccagcagcaaaaacagccagcccatggccacacacaaaaaatctggacggtcaaaagagaagagaaagtctaagcacaagctgaagaaaaggagaggccatctctctgaggaacccagtgaaaatatcaacaccccaactagattgaccccccaattacagatgaagccaatgtccaatcgtgaaaggaactttgtgttaaagcatcatgtattcttggtccgaaactgggagaagattcgtcaaaaacaggaggaagtaaagcacaccagtgataatattcactcagcatcattatatacccgttggaatgggatctgccgagatgatgggaatatcaagtctgatgtcttcatgacccagttctctgccctgcagacagctcgatctgttcgaacaagacggttggcagctgcagaggaaaatattgaagtggctcgggcagcccgcctagcccagatcttcaaagaaatttgtgatggtatcatctcttataaagattcttcccggcaagcactggcagctccacttttgaaccttcccccaaagaaaaagaatgctgattattatgagaagatctctgatcccctagatcttatcaccatagagaagcagatcctcactggttactataagacagtggaagcttttgatgctgacatgctcaaagtctttcggaatgctgagaagtactatgggcgtaaatccccagttgggagagatgtttgtcgtctacgaaaggcctattacaatgcccggcatgaggcatcagcccagattgatgagattgtgggagagacagcaagtgaggcagacagcagtgagacctcagtctctgaaaaggagaatgggcatgagaaggacgacgatgttattcgctgtatctgtggcctctacaaggatgaaggtctcatgatccagtgtgacaagtgcatggtatggcagcactgtgattgtatgggagtgaactcagatgtggagcactacctttgtgagcagtgtgacccaaggcctgtggacagggaggttcccatgatccctcggccccactatgcccaacctggctgtgtctacttcatctgtttgctccgagatgacttgctgcttcgtcagggtgactgtgtgtatctgatgagggatagtcggcgcacccctgatggccacccggtccgtcagtcctatcgactgttatctcacattaaccgagataaacttgacatctttcgcattgagaagctttggaagaatgaaaaagaggaacggtttgcctttggtcaccattatttccgtccccacgaaacacaccactctccatcccgtcggttctatcataatgaactatttcgggtgccactctatgagatcattcccttggaggctgtagtggggacctgctgtgtgttggacctttatacgtattgtaaagggagacccaaaggagtaaaggagcaagatgtgtacatctgtgattatcggcttgacaagtcagcacacctgttttacaagatccaccggaaccgctatcctgtctgcaccaaaccctatgcttttgatcacttccccaagaagctcactcccaaaaaagatttctcgcctcattacgtcccagacaactacaagaggaatggaggacgatcatcctggaagtctgagcgctcaaagccacccctaaaagacttgggccaggaggatgatgctctacccttgattgaagaggttctagccagtcaagagcaagcagccaatgagatacccagcctggaggagccagaacgggaaggggccactgctaacgtcagtgagggtgaaaaaaaaacagaggaaagtagtcaagaaccccagtcaacctgtacccctgaggaacgacggcataaccaacgggaacgactcaaccagatcttgctcaatctccttgaaaaaatccctggaaaaaatgccattgatgtgacctacttgctggaggaaggatcaggcaggaaactgcgaaggcgtactttgtttatcccagaaaacagctttcgaaagtgaccctcaaagaatgagaacctcaagcatctgggatccagtggagctaatcagtcctgcctcctgctctctgggtatagacaggggtgggaagggtccatctgggcaaggggaatggggccatgttgttgacattaggtacttaataagccttggagctagtggagagggagaggaaagggttctgtccaagacagttcaggttaattaattttcttctccattgcttcaccttaagggttaataatgtagagaggagggaggaccacattgatgaccagaacctactggtactttatagcatttgccccaccccacagcttaggtttttctgtcatcctcagatcccacaggcattgcgaagaagctgcttcctatacccaggtataactcaaaatccaaagggatagggccaggatccctattcctaccccatctattctctgttggctccaagagctaccccagagaccttaaacagaaacagtagctgaggcttcttcctagatacctgactagggaagtttgtctctcctttcttgcccaaccaggtcaaagtaaaatgtgagttgacagctcaaagcacttgtaactgctgccccctccctacctctactccccaaaatggaatcatgggatagggaaggcccccatggggtcagaagggcacggtagttcttgcaattatttttgttttacccttcataacctgtcaaacatatttttttctaatgagaaagccaggcccccgccagcacacatgctgtttttaatgcgctgtagttcttgtgtgtctgctgtgctgtgcaaatggagattcagttcaaaataaaatcatttaaaaacctacataaaaagaactctaaacccacccctgcaacaaaagtcactacataaactgttcagcagtattcacctatcagagtatttgttgtgagtatagattatcaattgaaaacactactcttgttttcttaattgtacagttttcaatgtccctttcttaaagagacagtatatttctcttcacccctagcccatcttccctcaccctcctgaatgacatcaggaggtatatccagggtgtctccttccttcctactctcttgaccagaagttaacagactatactgtctctttaaaaataaaatttaaaaagctttgttgtcttttcagacatacatatgcatatatgttttagatgttcttataagagaaaagatggtttttaaatgtgccaagttgtgtgtgtgtgtgtatatatatgtgtgtatgtgtgtgtatatatatatgtgtgtgtgtatatatatacacacacacacacacacctgctgtgtgattggtaagcaatacaatagtaaacatgtccccattacttttttctaatattggaccaatgctgtcctaattgtacatttccccttatggtgacgatgctctgactcgtttaggtagacacattgaccaccttccattccattaaatattttttcctttttcccctttctgtgtcattcttgaggaaaaaacaaaagagagaggggatgccaatgatccccttgagcagagaaaaagcaaaataaatattttattaaagaaaaaagagaattaagaaaatagtttggagtattttcttactgtagagaagcactgtacattactaagagacctgggtataagatactcacatgtggagctggaaaaatcgcatgtccaagcccgtttgagtggtttcttttgtttttcattgcagggagtgggtgggagggaggtgggactaggggcactttgggggtctccttttagtcaaaagcgagaaaatgacaagaaagagattaaaattcaatgtttcctttatagtgttaaacactaaaattttaaaaaagatgaaaaagaaaaaaaaactttgtaaaatgcgagaacagaagcaaaagacactacgctctgtcattttatctttcttttgttgaaagactaaaaaaaaactgaaatgttttttagacaatcaaatgttaggtaagtgcaaaaacttgttttttcttactggtgtagaaattaatgcctttttttatttttcagttattttataataacgaaataaaaagaaccccccagctgccaggcgggttttggtgtttgaaatgcggggcaaagcactacatcactgcaaatagatacagagttagtctgcatgtctgtaggctgtgtgattgcggaaaatataaatgctgctaatatatttcctttttacaaaagcatatctaaatagatgattgttttgatgttaatctttgtaaattatgtattaccaattttaacattggatgtaattgcatacaaagcttgcatctcaatccttgaaagtctagtattaaatggaaaaaacttttcctaactgtggaaaaaaaaaaa

SEQ ID NO: 286050 - DNA, 8910 bp, Artificial Sequence
  derived and/or modified sequence
atggaccccagaaacaccgccatgctgggcctgggcagcgacagcgagggcttcagcagaaagagccccagcgccatcagcaccggcaccctggtgagcaagagagaggtggagctggagaagaacaccaaggaggaggaggacctgagaaagagaaacagagagagaaacatcgaggccggcaaggacgacggcctgaccgacgcccagcagcagttcagcgtgaaggagaccaacttcagcgagggcaacctgaagctgaagatcggcctgcaggccaagagaaccaagaagccccccaagaacctggagaactacgtgtgcagacccgccatcaagaccaccatcaagcaccccagaaaggccctgaagagcggcaagatgaccgacgagaagaacgagcactgccccagcaagagagaccccagcaagctgtacaagaaggccgacgacgtggccgccatcgagtgccagagcgaggaggtgatcagactgcacagccagggcgagaacaaccccctgagcaagaagctgagccccgtgcacagcgagatggccgactacatcaacgccacccccagcaccctgctgggcagcagagaccccgacctgaaggacagagccctgctgaacggcggcaccagcgtgaccgagaagctggcccagctgatcgccacctgcccccccagcaagagcagcaagaccaagcccaagaagctgggcaccggcaccaccgccggcctggtgagcaaggacctgatcagaaaggccggcgtgggcagcgtggccggcatcatccacaaggacctgatcaagaagcccaccatcagcaccgccgtgggcctggtgaccaaggaccccggcaagaagcccgtgttcaacgccgccgtgggcctggtgaacaaggacagcgtgaagaagctgggcaccggcaccaccgccgtgttcatcaacaagaacctgggcaagaagcccggcaccatcaccaccgtgggcctgctgagcaaggacagcggcaagaagctgggcatcggcatcgtgcccggcctggtgcacaaggagagcggcaagaagctgggcctgggcaccgtggtgggcctggtgaacaaggacctgggcaagaagctgggcagcaccgtgggcctggtggccaaggactgcgccaagaagatcgtggccagcagcgccatgggcctggtgaacaaggacatcggcaagaagctgatgagctgccccctggccggcctgatcagcaaggacgccatcaacctgaaggccgaggccctgctgcccacccaggagcccctgaaggccagctgcagcaccaacatcaacaaccaggagagccaggagctgagcgagagcctgaaggacagcgccaccagcaagaccttcgagaagaacgtggtgagacagaacaaggagagcatcctggagaagttcagcgtgagaaaggagatcatcaacctggagaaggagatgttcaacgagggcacctgcatccagcaggacagcttcagcagcagcgagaagggcagctacgagaccagcaagcacgagaagcagccccccgtgtactgcaccagccccgacttcaagatgggcggcgccagcgacgtgagcaccgccaagagccccttcagcgccgtgggcgagagcaacctgcccagccccagccccaccgtgagcgtgaaccccctgaccagaagcccccccgagaccagcagccagctggcccccaaccccctgctgctgagcagcaccaccgagctgatcgaggagatcagcgagagcgtgggcaagaaccagttcaccagcgagagcacccacctgaacgtgggccacagaagcgtgggccacagcatcagcatcgagtgcaagggcatcgacaaggaggtgaacgacagcaagaccacccacatcgacatccccagaatcagcagcagcctgggcaagaagcccagcctgaccagcgagagcagcatccacaccatcacccccagcgtggtgaacttcaccagcctgttcagcaacaagcccttcctgaagctgggcgccgtgagcgccagcgacaagcactgccaggtggccgagagcctgagcaccagcctgcagagcaagcccctgaagaagagaaagggcagaaagcccagatggaccaaggtggtggccagaagcacctgcagaagccccaagggcctggagctggagagaagcgagctgttcaagaacgtgagctgcagcagcctgagcaacagcaacagcgagcccgccaagttcatgaagaacatcggcccccccagcttcgtggaccacgacttcctgaagagaagactgcccaagctgagcaagagcaccgcccccagcctggccctgctggccgacagcgagaagcccagccacaagagcttcgccacccacaagctgagcagcagcatgtgcgtgagcagcgacctgctgagcgacatctacaagcccaagagaggcagacccaagagcaaggagatgccccagctggagggcccccccaagagaaccctgaagatccccgccagcaaggtgttcagcctgcagagcaaggaggagcaggagccccccatcctgcagcccgagatcgagatccccagcttcaagcagggcctgagcgtgagccccttccccaagaagagaggcagacccaagagacagatgagaagccccgtgaagatgaagccccccgtgctgagcgtggcccccttcgtggccaccgagagccccagcaagctggagagcgagagcgacaaccacagaagcagcagcgacttcttcgagagcgaggaccagctgcaggaccccgacgacctggacgacagccacagacccagcgtgtgcagcatgagcgacctggagatggagcccgacaagaagatcaccaagagaaacaacggccagctgatgaagaccatcatcagaaagatcaacaagatgaagaccctgaagagaaagaagctgctgaaccagatcctgagcagcagcgtggagagcagcaacaagggcaaggtgcagagcaagctgcacaacaccgtgagcagcctggccgccaccttcggcagcaagctgggccagcagatcaacgtgagcaagaagggcaccatctacatcggcaagagaagaggcagaaagcccaagaccgtgctgaacggcatcctgagcggcagccccaccagcctggccgtgctggagcagaccgcccagcaggccgccggcagcgccctgggccagatcctgccccccctgctgcccagcagcgccagcagcagcgagatcctgcccagccccatctgcagccagagcagcggcaccagcggcggccagagccccgtgagcagcgacgccggcttcgtggagcccagcagcgtgccctacctgcacctgcacagcagacagggcagcatgatccagaccctggccatgaagaaggccagcaagggcagaagaagactgagcccccccaccctgctgcccaacagccccagccacctgagcgagctgaccagcctgaaggaggccacccccagccccatcagcgagagccacagcgacgagaccatccccagcgacagcggcatcggcaccgacaacaacagcaccagcgacagagccgagaagttctgcggccagaagaagagaagacacagcttcgagcacgtgagcctgatcccccccgagaccagcaccgtgctgagcagcctgaaggagaagcacaagcacaagtgcaagagaagaaaccacgactacctgagctacgacaagatgaagagacagaagagaaagagaaagaagaagtacccccagctgagaaacagacaggaccccgacttcatcgccgagctggaggagctgatcagcagactgagcgagatcagaatcacccacagaagccaccacttcatccccagagacctgctgcccaccatcttcagaatcaacttcaacagcttctacacccaccccagcttccccctggaccccctgcactacatcagaaagcccgacctgaagaagaagagaggcagaccccccaagatgagagaggccatggccgagatgcccttcatgcacagcctgagcttccccctgagcagcaccggcttctaccccagctacggcatgccctacagccccagccccctgaccgccgcccccatcggcctgggctactacggcagatacccccccaccctgtacccccccccccccagccccagcttcaccacccccctgcccccccccagctacatgcacgccggccacctgctgctgaaccccgccaagtaccacaagaagaagcacaagctgctgagacaggaggccttcctgaccaccagcagaacccccctgctgagcatgagcacctaccccagcgtgccccccgagatggcctacggctggatggtggagcacaagcacagacacagacacaagcacagagagcacagaagcagcgagcagccccaggtgagcatggacaccggcagcagcagaagcgtgctggagagcctgaagagatacagattcggcaaggacgccgtgggcgagagatacaagcacaaggagaagcacagatgccacatgagctgcccccacctgagccccagcaagagcctgatcaacagagaggagcagtgggtgcacagagagcccagcgagagcagccccctggccctgggcctgcagacccccctgcagatcgactgcagcgagagcagccccagcctgagcctgggcggcttcacccccaacagcgagcccgccagcagcgacgagcacaccaacctgttcaccagcgccatcggcagctgcagagtgagcaaccccaacagcagcggcagaaagaagctgaccgacagccccggcctgttcagcgcccaggacaccagcctgaacagactgcacagaaaggagagcctgcccagcaacgagagagccgtgcagaccctggccggcagccagcccaccagcgacaagcccagccagagacccagcgagagcaccaactgcagccccaccagaaagagaagcagcagcgagagcaccagcagcaccgtgaacggcgtgcccagcagaagccccagactggtggccagcggcgacgacagcgtggacagcctgctgcagagaatggtgcagaacgaggaccaggagcccatggagaagagcatcgacgccgtgatcgccaccgccagcgccccccccagcagcagccccggcagaagccacagcaaggacagaaccctgggcaagcccgacagcctgctggtgcccgccgtgaccagcgacagctgcaacaacagcatcagcctgctgagcgagaagctgaccagcagctgcagcccccaccacatcaagagaagcgtggtggaggccatgcagagacaggccagaaagatgtgcaactacgacaagatcctggccaccaagaagaacctggaccacgtgaacaagatcctgaaggccaagaagctgcagagacaggccagaaccggcaacaacttcgtgaagagaagacccggcagacccagaaagtgccccctgcaggccgtggtgagcatgcaggccttccaggccgcccagttcgtgaaccccgagctgaacagagacgaggagggcgccgccctgcacctgagccccgacaccgtgaccgacgtgatcgaggccgtggtgcagagcgtgaacctgaaccccgagcacaagaagggcctgaagagaaagggctggctgctggaggagcagaccagaaagaagcagaagcccctgcccgaggaggaggagcaggagaacaacaagagcttcaacgaggcccccgtggagatccccagccccagcgagacccccgccaagcccagcgagcccgagagcaccctgcagcccgtgctgagcctgatccccagagagaagaagccccccagaccccccaagaagaagtaccagaaggccggcctgtacagcgacgtgtacaagaccaccgaccccaagagcagactgatccagctgaagaaggagaagctggagtacacccccggcgagcacgagtacggcctgttccccgcccccatccacgtggtgttcttcgtgagcggcaagtacctgagacagaagagaatcgacttccagctgccctacgacatcctgtggcagtggaagcacaaccagctgtacaagaagcccgacgtgcccctgtacaagaagatcagaagcaacgtgtacgtggacgtgaagcccctgagcggctacgaggccaccacctgcaactgcaagaagcccgacgacgacaccagaaagggctgcgtggacgactgcctgaacagaatgatcttcgccgagtgcagccccaacacctgcccctgcggcgagcagtgctgcaaccagagaatccagagacacgagtgggtgcagtgcctggagagattcagagccgaggagaagggctggggcatcagaaccaaggagcccctgaaggccggccagttcatcatcgagtacctgggcgaggtggtgagcgagcaggagttcagaaacagaatgatcgagcagtaccacaaccacagcgaccactactgcctgaacctggacagcggcatggtgatcgacagctacagaatgggcaacgaggccagattcatcaaccacagctgcgaccccaactgcgagatgcagaagtggagcgtgaacggcgtgtacagaatcggcctgtacgccctgaaggacatgcccgccggcaccgagctgacctacgactacaacttccacagcttcaacgtggagaagcagcagctgtgcaagtgcggcttcgagaagtgcagaggcatcatcggcggcaagagccagagagtgaacggcctgaccagcagcaagaacagccagcccatggccacccacaagaagagcggcagaagcaaggagaagagaaagagcaagcacaagctgaagaagagaagaggccacctgagcgaggagcccagcgagaacatcaacacccccaccagactgaccccccagctgcagatgaagcccatgagcaacagagagagaaacttcgtgctgaagcaccacgtgttcctggtgagaaactgggagaagatcagacagaagcaggaggaggtgaagcacaccagcgacaacatccacagcgccagcctgtacaccagatggaacggcatctgcagagacgacggcaacatcaagagcgacgtgttcatgacccagttcagcgccctgcagaccgccagaagcgtgagaaccagaagactggccgccgccgaggagaacatcgaggtggccagagccgccagactggcccagatcttcaaggagatctgcgacggcatcatcagctacaaggacagcagcagacaggccctggccgcccccctgctgaacctgccccccaagaagaagaacgccgactactacgagaagatcagcgaccccctggacctgatcaccatcgagaagcagatcctgaccggctactacaagaccgtggaggccttcgacgccgacatgctgaaggtgttcagaaacgccgagaagtactacggcagaaagagccccgtgggcagagacgtgtgcagactgagaaaggcctactacaacgccagacacgaggccagcgcccagatcgacgagatcgtgggcgagaccgccagcgaggccgacagcagcgagaccagcgtgagcgagaaggagaacggccacgagaaggacgacgacgtgatcagatgcatctgcggcctgtacaaggacgagggcctgatgatccagtgcgacaagtgcatggtgtggcagcactgcgactgcatgggcgtgaacagcgacgtggagcactacctgtgcgagcagtgcgaccccagacccgtggacagagaggtgcccatgatccccagaccccactacgcccagcccggctgcgtgtacttcatctgcctgctgagagacgacctgctgctgagacagggcgactgcgtgtacctgatgagagacagcagaagaacccccgacggccaccccgtgagacagagctacagactgctgagccacatcaacagagacaagctggacatcttcagaatcgagaagctgtggaagaacgagaaggaggagagattcgccttcggccaccactacttcagaccccacgagacccaccacagccccagcagaagattctaccacaacgagctgttcagagtgcccctgtacgagatcatccccctggaggccgtggtgggcacctgctgcgtgctggacctgtacacctactgcaagggcagacccaagggcgtgaaggagcaggacgtgtacatctgcgactacagactggacaagagcgcccacctgttctacaagatccacagaaacagataccccgtgtgcaccaagccctacgccttcgaccacttccccaagaagctgacccccaagaaggacttcagcccccactacgtgcccgacaactacaagagaaacggcggcagaagcagctggaagagcgagagaagcaagccccccctgaaggacctgggccaggaggacgacgccctgcccctgatcgaggaggtgctggccagccaggagcaggccgccaacgagatccccagcctggaggagcccgagagagagggcgccaccgccaacgtgagcgagggcgagaagaagaccgaggagagcagccaggagccccagagcacctgcacccccgaggagagaagacacaaccagagagagagactgaaccagatcctgctgaacctgctggagaagatccccggcaagaacgccatcgacgtgacctacctgctggaggagggcagcggcagaaagctgagaagaagaaccctgttcatccccgagaacagcttcagaaagtag

SEQ ID NO: 286051 - DNA, 8895 bp, Artificial Sequence
  derived and/or modified sequence
atggaccccagaaacaccgccatgctgggcctgggcagcgacagcgagggcttcagcagaaagagccccagcgccatcagcaccggcaccctggtgagcaagagagaggtggagctggagaagaacaccaaggaggaggaggacctgagaaagagaaacagagagagaaacatcgaggccggcaaggacgacggcctgaccgacgcccagcagcagttcagcgtgaaggagaccaacttcagcgagggcaacctgaagctgaagatcggcctgcaggccaagagaaccaagaagccccccaagaacctggagaactacgtgtgcagacccgccatcaagaccaccatcaagcaccccagaaaggccctgaagagcggcaagatgaccgacgagaagaacgagcactgccccagcaagagagaccccagcaagctgtacaagaaggccgacgacgtggccgccatcgagtgccagagcgaggaggtgatcagactgcacagccagggcgagaacaaccccctgagcaagaagctgagccccgtgcacagcgagatggccgactacatcaacgccacccccagcaccctgctgggcagcagagaccccgacctgaaggacagagccctgctgaacggcggcaccagcgtgaccgagaagctggcccagctgatcgccacctgcccccccagcaagagcagcaagaccaagcccaagaagctgggcaccggcaccaccgccggcctggtgagcaaggacctgatcagaaaggccggcgtgggcagcgtggccggcatcatccacaaggacctgatcaagaagcccaccatcagcaccgccgtgggcctggtgaccaaggaccccggcaagaagcccgtgttcaacgccgccgtgggcctggtgaacaaggacagcgtgaagaagctgggcaccggcaccaccgccgtgttcatcaacaagaacctgggcaagaagcccggcaccatcaccaccgtgggcctgctgagcaaggacagcggcaagaagctgggcatcggcatcgtgcccggcctggtgcacaaggagagcggcaagaagctgggcctgggcaccgtggtgggcctggtgaacaaggacctgggcaagaagctgggcagcaccgtgggcctggtggccaaggactgcgccaagaagatcgtggccagcagcgccatgggcctggtgaacaaggacatcggcaagaagctgatgagctgccccctggccggcctgatcagcaaggacgccatcaacctgaaggccgaggccctgctgcccacccaggagcccctgaaggccagctgcagcaccaacatcaacaaccaggagagccaggagctgagcgagagcctgaaggacagcgccaccagcaagaccttcgagaagaacgtggtgagacagaacaaggagagcatcctggagaagttcagcgtgagaaaggagatcatcaacctggagaaggagatgttcaacgagggcacctgcatccagcaggacagcttcagcagcagcgagaagggcagctacgagaccagcaagcacgagaagcagccccccgtgtactgcaccagccccgacttcaagatgggcggcgccagcgacgtgagcaccgccaagagccccttcagcgccgtgggcgagagcaacctgcccagccccagccccaccgtgagcgtgaaccccctgaccagaagcccccccgagaccagcagccagctggcccccaaccccctgctgctgagcagcaccaccgagctgatcgaggagatcagcgagagcgtgggcaagaaccagttcaccagcgagagcacccacctgaacgtgggccacagaagcgtgggccacagcatcagcatcgagtgcaagggcatcgacaaggaggtgaacgacagcaagaccacccacatcgacatccccagaatcagcagcagcctgggcaagaagcccagcctgaccagcgagagcagcatccacaccatcacccccagcgtggtgaacttcaccagcctgttcagcaacaagcccttcctgaagctgggcgccgtgagcgccagcgacaagcactgccaggtggccgagagcctgagcaccagcctgcagagcaagcccctgaagaagagaaagggcagaaagcccagatggaccaaggtggtggccagaagcacctgcagaagccccaagggcctggagctggagagaagcgagctgttcaagaacgtgagctgcagcagcctgagcaacagcaacagcgagcccgccaagttcatgaagaacatcggcccccccagcttcgtggaccacgacttcctgaagagaagactgcccaagctgagcaagagcaccgcccccagcctggccctgctggccgacagcgagaagcccagccacaagagcttcgccacccacaagctgagcagcagcatgtgcgtgagcagcgacctgctgagcgacatctacaagcccaagagaggcagacccaagagcaaggagatgccccagctggagggcccccccaagagaaccctgaagatccccgccagcaaggtgttcagcctgcagagcaaggaggagcaggagccccccatcctgcagcccgagatcgagatccccagcttcaagcagggcctgagcgtgagccccttccccaagaagagaggcagacccaagagacagatgagaagccccgtgaagatgaagccccccgtgctgagcgtggcccccttcgtggccaccgagagccccagcaagctggagagcgagagcgacaaccacagaagcagcagcgacttcttcgagagcgaggaccagctgcaggaccccgacgacctggacgacagccacagacccagcgtgtgcagcatgagcgacctggagatggagcccgacaagaagatcaccaagagaaacaacggccagctgatgaagaccatcatcagaaagatcaacaagatgaagaccctgaagagaaagaagctgctgaaccagatcctgagcagcagcgtggagagcagcaacaagggcaaggtgcagagcaagctgcacaacaccgtgagcagcctggccgccaccttcggcagcaagctgggccagcagatcaacgtgagcaagaagggcaccatctacatcggcaagagaagaggcagaaagcccaagaccgtgctgaacggcatcctgagcggcagccccaccagcctggccgtgctggagcagaccgcccagcaggccgccggcagcgccctgggccagatcctgccccccctgctgcccagcagcgccagcagcagcgagatcctgcccagccccatctgcagccagagcagcggcaccagcggcggccagagccccgtgagcagcgacgccggcttcgtggagcccagcagcgtgccctacctgcacctgcacagcagacagggcagcatgatccagaccctggccatgaagaaggccagcaagggcagaagaagactgagcccccccaccctgctgcccaacagccccagccacctgagcgagctgaccagcctgaaggaggccacccccagccccatcagcgagagccacagcgacgagaccatccccagcgacagcggcatcggcaccgacaacaacagcaccagcgacagagccgagaagttctgcggccagaagaagagaagacacagcttcgagcacgtgagcctgatcccccccgagaccagcaccgtgctgagcagcctgaaggagaagcacaagcacaagtgcaagagaagaaaccacgactacctgagctacgacaagatgaagagacagaagagaaagagaaagaagaagtacccccagctgagaaacagacaggaccccgacttcatcgccgagctggaggagctgatcagcagactgagcgagatcagaatcacccacagaagccaccacttcatccccagagacctgctgcccaccatcttcagaatcaacttcaacagcttctacacccaccccagcttccccctggaccccctgcactacatcagaaagcccgacctgaagaagaagagaggcagaccccccaagatgagagaggccatggccgagatgcccttcatgcacagcctgagcttccccctgagcagcaccggcttctaccccagctacggcatgccctacagccccagccccctgaccgccgcccccatcggcctgggctactacggcagatacccccccaccctgtacccccccccccccagccccagcttcaccacccccctgcccccccccagctacatgcacgccggccacctgctgctgaaccccgccaagtaccacaagaagaagcacaagctgctgagacaggaggccttcctgaccaccagcagaacccccctgctgagcatgagcacctaccccagcgtgccccccgagatggcctacggctggatggtggagcacaagcacagacacagacacaagcacagagagcacagaagcagcgagcagccccaggtgagcatggacaccggcagcagcagaagcgtgctggagagcctgaagagatacagattcggcaaggacgccgtgggcgagagatacaagcacaaggagaagcacagatgccacatgagctgcccccacctgagccccagcaagagcctgatcaacagagaggagcagtgggtgcacagagagcccagcgagagcagccccctggccctgggcctgcagacccccctgcagatcgactgcagcgagagcagccccagcctgagcctgggcggcttcacccccaacagcgagcccgccagcagcgacgagcacaccaacctgttcaccagcgccatcggcagctgcagagtgagcaaccccaacagcagcggcagaaagaagctgaccgacagccccggcctgttcagcgcccaggacaccagcctgaacagactgcacagaaaggagagcctgcccagcaacgagagagccgtgcagaccctggccggcagccagcccaccagcgacaagcccagccagagacccagcgagagcaccaactgcagccccaccagaaagagaagcagcagcgagagcaccagcagcaccgtgaacggcgtgcccagcagaagccccagactggtggccagcggcgacgacagcgtggacagcctgctgcagagaatggtgcagaacgaggaccaggagcccatggagaagagcatcgacgccgtgatcgccaccgccagcgccccccccagcagcagccccggcagaagccacagcaaggacagaaccctgggcaagcccgacagcctgctggtgcccgccgtgaccagcgacagctgcaacaacagcatcagcctgctgagcgagaagctgaccagcagctgcagcccccaccacatcaagagaagcgtggtggaggccatgcagagacaggccagaaagatgtgcaactacgacaagatcctggccaccaagaagaacctggaccacgtgaacaagatcctgaaggccaagaagctgcagagacaggccagaaccggcaacaacttcgtgaagagaagacccggcagacccagaaagtgccccctgcaggccgtggtgagcatgcaggccttccaggccgcccagttcgtgaaccccgagctgaacagagacgaggagggcgccgccctgcacctgagccccgacaccgtgaccgacgtgatcgaggccgtggtgcagagcgtgaacctgaaccccgagcacaagaagggcctgaagagaaagggctggctgctggaggagcagaccagaaagaagcagaagcccctgcccgaggaggaggagcaggagaacaacaagagcttcaacgaggcccccgtggagatccccagccccagcgagacccccgccaagcccagcgagcccgagagcaccctgcagcccgtgctgagcctgatccccagagagaagaagccccccagaccccccaagaagaagtaccagaaggccggcctgtacagcgacgtgtacaagaccaccgaccccaagagcagactgatccagctgaagaaggagaagctggagtacacccccggcgagcacgagtacggcctgttccccgcccccatccacgtgggcaagtacctgagacagaagagaatcgacttccagctgccctacgacatcctgtggcagtggaagcacaaccagctgtacaagaagcccgacgtgcccctgtacaagaagatcagaagcaacgtgtacgtggacgtgaagcccctgagcggctacgaggccaccacctgcaactgcaagaagcccgacgacgacaccagaaagggctgcgtggacgactgcctgaacagaatgatcttcgccgagtgcagccccaacacctgcccctgcggcgagcagtgctgcaaccagagaatccagagacacgagtgggtgcagtgcctggagagattcagagccgaggagaagggctggggcatcagaaccaaggagcccctgaaggccggccagttcatcatcgagtacctgggcgaggtggtgagcgagcaggagttcagaaacagaatgatcgagcagtaccacaaccacagcgaccactactgcctgaacctggacagcggcatggtgatcgacagctacagaatgggcaacgaggccagattcatcaaccacagctgcgaccccaactgcgagatgcagaagtggagcgtgaacggcgtgtacagaatcggcctgtacgccctgaaggacatgcccgccggcaccgagctgacctacgactacaacttccacagcttcaacgtggagaagcagcagctgtgcaagtgcggcttcgagaagtgcagaggcatcatcggcggcaagagccagagagtgaacggcctgaccagcagcaagaacagccagcccatggccacccacaagaagagcggcagaagcaaggagaagagaaagagcaagcacaagctgaagaagagaagaggccacctgagcgaggagcccagcgagaacatcaacacccccaccagactgaccccccagctgcagatgaagcccatgagcaacagagagagaaacttcgtgctgaagcaccacgtgttcctggtgagaaactgggagaagatcagacagaagcaggaggaggtgaagcacaccagcgacaacatccacagcgccagcctgtacaccagatggaacggcatctgcagagacgacggcaacatcaagagcgacgtgttcatgacccagttcagcgccctgcagaccgccagaagcgtgagaaccagaagactggccgccgccgaggagaacatcgaggtggccagagccgccagactggcccagatcttcaaggagatctgcgacggcatcatcagctacaaggacagcagcagacaggccctggccgcccccctgctgaacctgccccccaagaagaagaacgccgactactacgagaagatcagcgaccccctggacctgatcaccatcgagaagcagatcctgaccggctactacaagaccgtggaggccttcgacgccgacatgctgaaggtgttcagaaacgccgagaagtactacggcagaaagagccccgtgggcagagacgtgtgcagactgagaaaggcctactacaacgccagacacgaggccagcgcccagatcgacgagatcgtgggcgagaccgccagcgaggccgacagcagcgagaccagcgtgagcgagaaggagaacggccacgagaaggacgacgacgtgatcagatgcatctgcggcctgtacaaggacgagggcctgatgatccagtgcgacaagtgcatggtgtggcagcactgcgactgcatgggcgtgaacagcgacgtggagcactacctgtgcgagcagtgcgaccccagacccgtggacagagaggtgcccatgatccccagaccccactacgcccagcccggctgcgtgtacttcatctgcctgctgagagacgacctgctgctgagacagggcgactgcgtgtacctgatgagagacagcagaagaacccccgacggccaccccgtgagacagagctacagactgctgagccacatcaacagagacaagctggacatcttcagaatcgagaagctgtggaagaacgagaaggaggagagattcgccttcggccaccactacttcagaccccacgagacccaccacagccccagcagaagattctaccacaacgagctgttcagagtgcccctgtacgagatcatccccctggaggccgtggtgggcacctgctgcgtgctggacctgtacacctactgcaagggcagacccaagggcgtgaaggagcaggacgtgtacatctgcgactacagactggacaagagcgcccacctgttctacaagatccacagaaacagataccccgtgtgcaccaagccctacgccttcgaccacttccccaagaagctgacccccaagaaggacttcagcccccactacgtgcccgacaactacaagagaaacggcggcagaagcagctggaagagcgagagaagcaagccccccctgaaggacctgggccaggaggacgacgccctgcccctgatcgaggaggtgctggccagccaggagcaggccgccaacgagatccccagcctggaggagcccgagagagagggcgccaccgccaacgtgagcgagggcgagaagaagaccgaggagagcagccaggagccccagagcacctgcacccccgaggagagaagacacaaccagagagagagactgaaccagatcctgctgaacctgctggagaagatccccggcaagaacgccatcgacgtgacctacctgctggaggagggcagcggcagaaagctgagaagaagaaccctgttcatccccgagaacagcttcagaaagtag

SEQ ID NO: 286052 - DNA, 8910 bp, Artificial Sequence
  derived and/or modified sequence
atggacccaagaaatactgcgatgctaggcctgggaagtgattccgaaggttttagtcggaagtcgccatcagctatctccaccggtactctggtctcaaagcgggaggtggaactggagaagaataccaaagaagaggaagacttgagaaaacgtaaccgtgagaggaacatcgaggctggaaaagacgatggtctgacagacgcgcagcagcagtttagtgtcaaggagactaacttcagcgaggggaatctcaaactaaagattgggttacaggccaaacgaaccaagaagccgcctaaaaacctggagaactacgtgtgccggcctgcaatcaagacgaccattaagcatcctaggaaagcccttaaaagtggcaaaatgacagatgaaaagaatgagcattgtccttctaagagggatccatcaaagctctacaaaaaggcagacgatgtagccgccattgagtgccagtccgaagaagtaatcaggctgcacagccagggggaaaataatccccttagtaagaagctgagtccagtgcattccgagatggcggattacattaacgccacaccatccacccttctaggtagccgggatccggaccttaaagatcgggctctcctgaacggcggcacaagcgtgactgagaaattggcccaactgatcgcgacctgtccaccaagcaagtcatccaagaccaaaccaaagaaactcggcaccggcaccaccgccgggctggtaagtaaagacctgatcagaaaagccggcgtaggctcagtcgccggaatcattcataaggacctcataaagaagcctactatctccactgctgtgggactggtcactaaagaccctggcaaaaagccagtgttcaatgccgcggtgggcttggtgaacaaggacagcgttaaaaaactcggaaccggaactactgcagtgtttatcaacaaaaacctcggcaagaagccggggactatcactactgttggattgctttcaaaggacagcggaaagaagttggggattgggattgtacctggcctcgttcacaaagaatccggaaagaagctgggattgggcacagtcgttggcctcgtcaacaaggacctgggcaagaagttaggatccactgtgggcctggtggcgaaggattgcgccaaaaagatcgtggcttccagtgctatggggctggttaacaaagatatcgggaaaaagctgatgagttgccctttagccggattaatttcaaaagatgctattaatctaaaagcagaagccctcctcccgacccaggagccgctgaaggcaagttgctccacgaacattaacaaccaagagtcccaagagcttagcgagtctctgaaagacagcgcgacaagcaaaaccttcgagaagaatgtggtgagacaaaacaaggaatctatcctagagaagttcagtgtgcgaaaggaaataatcaatctggagaaagagatgtttaacgaaggcacttgcatccaacaggattctttctcttctagcgagaaaggatcttacgaaacaagcaaacatgaaaagcagcctccagtgtactgcacatccccagacttcaagatggggggcgccagtgatgtgtctacagctaaatcgccctttagcgcggtcggggagtccaaccttccctccccgagcccgaccgtttctgtgaaccctctgacccgaagcccaccggagactagctctcaactggcaccaaacccactgttgctctcgtcaacaacagagctgatcgaggaaatttcagaatccgtgggcaagaaccaatttaccagtgaatctacacacctcaatgtcggtcacagatccgttggccatagcatcagtatcgagtgcaagggcatcgacaaggaagtgaatgactctaaaaccactcatatcgatatccccagaatttctagtagcctcggcaagaaacccagcctgacctctgaatcctcgatacatactatcaccccctctgtggtgaacttcacctccctgttcagcaacaagccattcttaaagctgggagctgtgagcgcgtcagacaaacattgtcaggtggctgagagcctgtccacctctcttcagtccaaacccctgaaaaaaagaaagggtcgaaagccccgctggacaaaagtggtagccaggtccacctgccgtagccctaaggggctcgagcttgagagatcagagctgtttaagaatgtttcatgcagtagcctcagtaatagtaactctgagcctgcgaagtttatgaagaacatagggcccccatccttcgttgaccacgatttcttaaaaaggagactccctaagctctcaaaaagcaccgccccaagtttagctcttctggcggatagcgagaaaccgagccataagtctttcgcaacacataaactttcgtcttcaatgtgtgtgtcttctgatctgctgtctgatatatacaaacccaagagagggcgccctaaatccaaagagatgccacaacttgaaggcccccccaagcgcacactgaagattccggcttcaaaggtgttcagcctgcagtctaaggaagaacaagagccaccaatactgcaacccgagattgagatacccagtttcaaacagggcctcagcgtatctccattcccgaaaaaacgcggccgacctaaacgccagatgagaagcccggtcaaaatgaaaccccccgtgttgagcgtcgcaccatttgtagccaccgagtcccccagcaaacttgaatccgaatctgacaaccaccgcagttctagtgattttttcgaatcagaagatcaactgcaggaccctgacgacctggatgactctcatagacctagcgtttgctccatgtcggatctggagatggagcccgacaagaagataactaagagaaacaacggtcaactgatgaagactattattagaaagattaataagatgaagacattaaagcgaaagaagctgctcaatcagattttgtcctcctcggtggagtccagtaacaaaggcaaagttcagtccaaactgcataatactgtcagctctctggcagctacctttggctctaagctggggcagcagatcaatgtaagcaaaaaaggcaccatttacattggcaagcggaggggccgcaaacccaaaaccgtgctgaacggaatactgtcaggcagtcctacaagtttggcagtgctcgagcagacagcgcagcaggcggccggctccgcactgggccagatcctccccccacttctccctagttcggcgagtagctccgagattttgccgagtccaatttgcagccagagctcagggactagtggtggacaatcaccggtctcttccgacgccggcttcgtagagccttcatccgtgccatacctgcacctccactcccggcaggggtccatgatccagactttggccatgaagaaggcttcaaaagggcggcgcagactaagcccacctaccttattgccgaattctcccagtcatctgtctgaacttacttccttgaaagaagccacaccctccccgatttcagagtcccacagtgatgagacaatcccttccgacagtggaattgggaccgacaataacagtacttccgatcgcgcagagaaattctgcggtcagaagaaaagacgtcactcgttcgagcacgtctccctgattccacctgagactagcaccgtattgagttctctgaaggagaagcataagcataagtgtaagaggcgcaaccacgattatctttcatatgacaagatgaagcgccagaagagaaagagaaaaaagaaataccctcagctcagaaatcgacaagatccagactttattgctgagctggaggaactcattagccggctctccgaaatccgcattacacatcgcagtcatcacttcattccccgtgatcttctgccaactatattccgaatcaatttcaatagcttttacacgcatccctcttttcctctggacccgctgcactacatacgcaagcctgatctgaagaaaaagcgaggccgcccaccaaaaatgagggaagccatggctgaaatgccctttatgcactctctatccttcccactgtcctcaaccggattctatcctagttacgggatgccatactctccgtcacctttgactgccgcacctatcggtcttggctactacgggaggtacccccccactttatatcccccacctccgagtccaagctttaccacccctctccctccaccctcctacatgcatgccgggcatctgctgctcaacccggcaaaatatcacaaaaaaaagcataaattgctcaggcaggaagctttcctcaccaccagccgcacacccttgctcagtatgagtacgtacccctccgtcccccctgagatggcttacggttggatggttgaacataaacatagacacagacataaacaccgggagcacagaagctccgagcaacctcaggttagcatggacaccgggtctagtcggtcagtcctcgagtccctcaagcgataccgatttggaaaggacgccgtcggcgaacgatacaagcacaaagagaagcaccgttgccacatgtcatgtccgcatctgtcgccgagcaaatcgctgataaatcgcgaggagcagtgggtgcatagagagccgtccgaatcctcaccactggcccttggccttcagactcctttgcagattgattgttcggaatcaagcccctctctctctttagggggattcactccgaacagcgagcctgcgagcagcgatgagcacaccaatctctttactagcgcaatcggatcctgcagagtgagcaatcctaacagctctgggcgcaagaagctcaccgactcccctgggctgttcagtgctcaagatacgtcactgaatcgtctgcacaggaaggagtcccttccctctaatgagcgggccgtccagaccctggccggcagtcagcctacctcggacaagccttctcagaggcccagcgagagtaccaattgctcacccacgcgaaagcgatcatccagtgaatccacgagttctaccgttaacggggtccccagtagatccccccgcttagttgcaagtggcgatgacagtgtggacagcctgctgcagcggatggtccagaacgaagaccaggaacccatggaaaaatcaatcgatgcagtgattgctaccgcctcagctccaccctcttcaagtccagggagatcccattcaaaggatcggacgctcggcaagcctgattcccttctggtgccagcagtcacctctgattcttgtaacaattccatctctctcctgtctgagaagctcacctcctcctgttctccccaccatatcaaacggtcggtggtcgaggccatgcagcggcaagctcgcaagatgtgtaactacgacaagattttggcaaccaagaagaacttggaccacgttaacaaaatcctgaaggccaagaaactgcaacggcaagcaaggactggcaataactttgtcaaacgtcgacccggaagaccacggaagtgccctctgcaggccgtggttagtatgcaggcatttcaggccgctcagttcgtaaatcccgagctcaacagagacgaggagggagccgctctgcaccttagtccagacacagtcacagacgtgatcgaggcggtcgtacaatccgtcaatctcaacccagaacacaagaagggtctgaagcgaaagggctggttgctggaagaacaaactcggaagaagcaaaagccgcttccagaggaagaggaacaggaaaataacaagagcttcaatgaggctccagtggagatcccttctcccagcgaaactcccgcgaaacccagcgaacctgagtccacacttcagccagtcttgagtctgattccccgcgaaaaaaaaccaccaaggccacccaagaaaaagtatcaaaaagccgggctgtactcagatgtatataagacgacagacccaaaaagcaggctgattcagctgaagaaagaaaaactggagtacactccaggggagcatgaatacggcctctttcctgctcctattcacgtggtcttcttcgtttccgggaagtacttgaggcagaagaggatcgactttcaacttccttatgatattctttggcagtggaagcataaccaactatataaaaaacctgatgttccattgtataagaaaattcggagtaatgtgtacgtggatgtaaagccgctgtcaggatacgaggcgacgacatgcaactgtaagaagccagatgacgatacaaggaaaggatgcgtagatgattgtctgaatcgaatgatattcgcggagtgttctcccaacacctgcccttgtggagaacagtgctgtaaccagcgaatccagcgacacgagtgggttcaatgtttggagcggtttcgcgctgaggagaagggctgggggatcagaacgaaagagcctcttaaagccgggcagttcatcattgagtatctgggcgaagtcgtgagcgagcaggagttccgtaatcggatgatagaacagtaccataaccactctgaccattactgcctgaatctcgacagtgggatggtgatagatagctatcgcatggggaacgaggctcggttcattaatcatagctgtgatcccaattgcgagatgcagaagtggagcgtaaacggtgtgtacagaattggcctttatgccctgaaagacatgcctgccggcaccgagctgacctacgattataacttccatagcttcaatgttgaaaagcagcagttatgtaaatgcggctttgagaagtgtaggggaatcatcggggggaaatctcaaagagttaatggactcacctcctccaaaaatagtcagccaatggcaacccataagaagtccggtcggtccaaggagaagcggaagagcaagcacaaacttaagaaaagaagaggtcatttgtctgaggagccctctgaaaacatcaatacgccaacgcgcctgactccgcagctccagatgaaacctatgagcaaccgcgaaagaaattttgttctgaaacatcacgtatttttggtccggaattgggagaaaattaggcagaaacaggaagaagttaagcacacatccgataacattcactcagcaagcctgtatacacgatggaatgggatttgtagagatgatggcaatatcaagtcagacgtttttatgactcaatttagcgctctgcagaccgcccgatcagtgcggaccagaaggctcgcagccgcggaggagaacatcgaagttgcgcgggcagcccgcttggcgcaaattttcaaggaaatttgtgatgggatcataagctataaggactccagtcgacaggccctcgccgctccactgctcaatctcccacccaagaagaagaatgcagattattacgaaaagatctctgatcccctggacctgatcactatcgaaaagcagatcttgacaggctattacaagacagtggaggcatttgatgcagacatgctaaaggtatttagaaatgcggaaaaatattacgggcgcaagtcgcccgtgggccgcgacgtgtgccgccttaggaaagcatactacaatgctcggcatgaggcctccgcccagatcgatgagatcgtgggcgagacagcttccgaagctgatagtagcgaaaccagtgtctcagaaaaagagaatggccacgaaaaggatgatgatgtcataaggtgtatctgcggcctctataaggacgagggcctcatgatacaatgtgataagtgtatggtgtggcagcactgtgactgtatgggtgtcaattccgatgtcgagcattacctctgcgaacagtgcgatccgaggcccgtggacagggaggtgcccatgattcctaggcctcactacgcgcaacccggctgtgtgtattttatttgcctcctgcgggacgacctgctcttgaggcaaggagactgtgtttacttgatgcgcgactccagacggacccctgatggtcatcctgttagacagtcctaccgcctgctcagccacattaaccgcgataaactggatatcttcagaattgagaaattatggaaaaacgaaaaggaggagcggttcgcatttggccatcattattttcggccgcacgagactcaccacagcccttcaaggcggttctaccacaacgagctgtttagggtgccactatatgagattattccattagaagcggtcgtcggaacatgttgcgtgcttgacttgtacacctactgtaaggggagaccaaaaggcgtgaaggagcaggacgtgtatatctgtgattacagactggataagtctgcacacctcttctacaagatccaccggaacagataccccgtgtgtaccaaaccatatgcatttgatcactttcccaaaaagctgactcctaagaaagacttctcccctcattacgtcccagacaattacaagaggaatggtggcaggagcagctggaagagcgagcggagtaaaccacctctgaaagacctcggccaagaagacgacgccctaccattgattgaggaggtcctggccagccaagaacaggctgcaaatgaaatcccgtcgcttgaggagccggaaagagagggggccacagcgaacgtgtcagagggtgagaagaaaaccgaggaatcaagccaggagcctcagtctacatgtactccagaggagcgccggcataatcagcgagaacggctgaaccagatcctgctgaacctgctggaaaagatcccaggtaagaacgccatcgatgtgacctacctcttagaagagggtagtggtcggaagctgagacgccgaactctgtttataccggaaaatagctttcgaaaatag

SEQ ID NO: 286053 - DNA, 8895 bp, Artificial Sequence
  derived and/or modified sequence
atggatccccgcaacacagcgatgctgggccttggctccgacagcgagggattctccaggaagtcacctagtgcaattagtacaggcacgcttgtctctaagagagaagtagagctggagaagaatacaaaagaagaggaggaccttcgcaagagaaaccgagaaagaaacattgaggccgggaaagacgacgggctgaccgatgcgcagcagcagttcagcgtcaaagaaactaactttagtgaggggaacctaaagctcaaaatcggccttcaggccaaacgcacgaaaaaacccccaaagaatctggaaaactacgtttgccgaccagccattaaaaccaccatcaaacatccccgcaaggcacttaagtcgggcaaaatgacagacgagaagaacgagcattgcccgagcaagcgggatcccagcaagctgtataaaaaagccgacgacgttgccgctattgagtgtcagtctgaggaggtgattagactacactctcaaggcgagaacaatcccctgagcaagaagttgtccccggttcattctgagatggctgactacattaacgccacaccgtctaccttgctgggctctagggaccctgaccttaaagacagagccctcctaaatggtgggactagcgttaccgagaaactggcccagttgatcgccacttgtcctccttcgaagtcatcaaagaccaagcctaaaaaactgggaactggaaccacagccggcttggtatctaaagatctcattcggaaggctggtgtcggtagcgtggcaggtattattcataaagacctgattaagaagcctacaatcagtaccgcggtgggtctcgtaaccaaggatcccggaaaaaagcctgttttcaacgctgccgtgggtctggtaaacaaagattccgtgaaaaagctcggcaccggtactaccgctgtgttcattaataagaatctcggaaagaagcccggcacgattacaactgttgggctgctttctaaggactcaggaaaaaagttaggtatcggaatcgtgccaggcctagtgcataaggagtccggcaagaaattgggactgggaaccgttgttggattggtgaataaagacctcggcaaaaagctaggcagcacggtgggactcgtggccaaagactgtgcaaaaaaaatcgtggcctcctctgccatgggcttggtgaataaggatatcggaaagaaattgatgtcatgtcccctcgcagggctcatcagtaaagatgctatcaacctcaaggcagaggcgctgctgcccacccaggagcccctgaaagcgagctgtagtacgaatatcaacaatcaggaatctcaggagctcagtgaaagcctcaaggactctgccacgagtaaaaccttcgagaagaatgtcgttagacagaataaggaatctatactcgagaaattctccgttaggaaagagatcataaatttagaaaaggagatgttcaacgaaggcacctgtatccagcaggatagttttagctcttccgagaagggcagttacgaaaccagtaagcatgaaaagcagcctcccgtatactgcacaagcccggacttcaaaatgggcggagccagtgatgtaagcaccgccaagagcccattcagcgcggtgggcgagagcaacctgccaagtcctagccccactgtgtccgtcaacccgctaacacgcagccccccagagacttcaagtcaacttgcgccgaaccccctgttactttcaagtaccacagagctgatcgaggagattagtgagtctgtgggcaagaatcagttcactagcgagtctacacaccttaacgtaggccatcgatctgtggggcattctatctcaatcgagtgcaagggcattgacaaagaagttaatgatagcaagacaacacacatcgacatacctaggatctcctcatctctggggaagaaacctagcctgacatccgaaagctcgatccacaccattaccccctctgtggtcaatttcacctcactgttcagcaataaaccatttttgaagctgggtgcagtgtccgcctcggataagcactgtcaagtggctgaaagcctgagcactagcctgcagtccaagcccttgaagaaaaggaagggaaggaaaccccgctggacgaaggtggtggccagatcgacttgtcgctctcctaaggggttggagttggagaggagtgaactgtttaagaatgtgagctgtagtagcttgtccaactcaaactccgagcccgccaagtttatgaagaacatcgggccccccagttttgttgaccacgacttcctgaagcggagactgcctaagttatccaagagcactgcaccttctttagctttgctggccgattcggaaaaaccatcccacaagtcctttgctacccacaagcttagctccagtatgtgtgtatcaagcgatttgctctctgacatttacaaacccaagcgcggccggccaaagtccaaggagatgccccaacttgaaggaccgccaaaaagaaccttgaagatacccgcaagcaaggtgttttcactgcaatctaaagaggagcaggagcctcctattttgcaacctgagattgagattccgtccttcaaacaaggattgtcggtaagccctttccctaaaaaacggggaaggccgaagaggcagatgaggtcccccgttaagatgaagcctccagttctcagtgtcgcccccttcgttgctaccgagtcgcctagcaaactcgaatccgagtccgacaatcatcgttctagttcagatttctttgagtcagaggatcagttgcaggatcctgacgatctggatgactcacatcgccctagcgtatgctccatgtccgatctggagatggaaccagataaaaagattacgaaacgaaacaacgggcaactgatgaaaaccataattcggaagattaataagatgaagacacttaagaggaaaaagctgctcaatcaaattttgagctcatcggttgaatcatctaataaagggaaggttcaaagtaaactgcacaatactgtgagctcactggcggcaactttcgggtcaaagctgggccagcagatcaacgtatctaagaagggcaccatctacataggcaagagacgtggtcgcaagccaaagaccgtgcttaacgggatcctgtctgggtccccgacctccttggctgtcctggagcagacagcccagcaggccgccggaagcgccctcggtcaaatcctccctcccttgctgcccagctcagcatccagtagtgaaattctgccgtccccaatttgcagccagagttccggcacctctgggggccaatcacctgtgagctcagacgctgggtttgtggaacccagctcagttccatacctgcacctccactctcgacaggggtcaatgattcagactcttgccatgaagaaagccagcaagggccgacgccggttatcacctccgacattattgccaaatagtccctcccacctaagtgagttgacaagtcttaaggaagcaactccatccccaatttcagagtcccactctgacgagactattccatccgactctggcattggcacagacaacaatagcacctcagacagagcagagaagttctgcggacagaaaaagaggcggcattcttttgagcacgtgagtcttataccgcctgaaactagcactgtgttgtcatctttaaaggagaagcacaagcataaatgtaaacgaaggaaccatgattacctgtcgtatgataagatgaagagacagaaacgcaaacgcaagaagaagtatccccagctcaggaatcggcaggaccccgattttatagctgagctggaggagctcatttccagactgtccgagattcgaattactcataggtcccaccactttattccccgcgatctcttacctaccattttccgtattaactttaatagcttttatactcatccgtcattccccctggacccactgcactacatcaggaagccagatctgaaaaaaaaaagggggcggcccccgaagatgcgggaagctatggcagaaatgccttttatgcactccctgtctttccctttgagttccacaggattctacccatcgtacgggatgccgtattccccatcacctctaaccgcagcacccatcggccttggctattacgggagatacccaccgaccctgtatccacctccgccttccccgtctttcaccacacccctgccacccccgtcttacatgcacgctggacatctgcttttgaaccctgcgaagtaccataaaaagaagcacaagctgctacggcaggaagctttcctgacaacctctcggactccactgctgagcatgagcacgtacccctcggtcccacccgaaatggcctatgggtggatggtcgagcataaacataggcacagacacaagcatagggaacaccgctcgtctgagcagcctcaggtgagcatggatacaggaagctcacgcagcgtcctggagagcctgaagcgttatagatttggaaaggacgccgtcggagagcggtataaacacaaagagaaacacaggtgtcacatgtcctgccctcatctgtcccccagtaagagcctgattaatagagaggaacagtgggttcacagggaaccatcagagtcttcaccattagctctggggctgcagacgccactgcagattgactgctcagaaagttcaccctccctttcactgggcggattcaccccaaattccgagcccgcttccagcgatgagcatacgaatctgttcacttcagccattgggtcctgccgggtctccaaccctaattcttccggacgcaagaaactaactgacagtcctggtctttttagtgctcaagacacctcactaaatcggctccaccggaaggagtccctcccctcaaacgagcgcgctgtgcagaccctcgctggaagccagccaacaagtgacaagccatcacagcgacccagcgagagtaccaactgctctccgacacgcaaaagatccagctctgaatctacctctagcactgtcaatggcgtcccgtctagaagcccacgcctggtggcttcgggcgacgattctgtggactccctcctgcagcggatggtacagaacgaggaccaggagcccatggagaaaagcatagacgccgtcatagcaactgcttctgcgccaccttcatccagccccggccgtagccatagcaaggacagaactctaggcaagcctgatagtctgctggtcccagctgtcaccagcgacagctgtaataacagtatcagtctactctccgagaaactcacctccagctgcagtccccaccacatcaagaggtctgtggtggaggctatgcagcgccaggccaggaagatgtgcaattacgacaagatactggccacgaaaaaaaatctcgatcacgtgaacaagatcctcaaggcgaaaaagctccaacgacaagctcgtaccggaaacaattttgttaagaggcggcctgggcgccctcgcaagtgtcccctacaggccgtggtttcaatgcaagcctttcaggccgcgcaatttgtaaatcccgagttaaacagagatgaggagggagcggcattgcacctgtccccggacacagtaacagacgtgatagaggcagtcgtgcagtcggtcaatctcaacccagagcataagaaggggttgaagaggaaaggttggctcttagaggaacagactaggaagaaacaaaaacccctaccagaggaagaagaacaggagaacaacaaaagcttcaacgaagctccagtggaaatcccaagcccctccgagactccggcaaaaccgagtgagccggagagtaccctccagcctgtactgtcactgattccacgtgaaaagaagcctcctcgtccgcccaaaaaaaaataccagaaggccggcctctacagcgacgtctataaaactacagacccgaaatcgaggttaatccaactgaagaaagaaaagttggaatatactcctggcgagcatgagtacggtctgttccccgcccccatacacgtgggtaaatacctccgtcaaaaaagaattgactttcaactcccctacgatattctgtggcagtggaagcataatcagctgtacaagaaacctgacgttcccctatataaaaagattaggtccaatgtgtatgtcgacgtgaaaccccttagcggatacgaagcgaccacttgtaactgtaaaaaaccggatgatgatacccgcaagggttgtgtcgatgattgtctgaaccggatgatctttgccgaatgctcccccaatacatgcccatgcggcgagcaatgctgtaaccagcggattcagcgccatgagtgggtgcagtgtttggagcgctttagggccgaggagaagggctggggcatcaggactaaagagccactcaaggccgggcagttcattattgagtatcttggagaagtggtgagcgagcaggagttccgtaatcgcatgatagaacagtatcataatcactccgaccactattgcctaaacctggactcggggatggtgattgactcctatcgtatgggaaatgaggccaggttcattaaccatagttgtgacccaaactgcgagatgcaaaagtggagtgtgaatggtgtgtacagaattggcttatatgctctgaaggatatgccagccggcacagaactgacctacgactataactttcacagctttaacgtcgagaagcaacagctgtgcaagtgtgggttcgaaaagtgtcgcggcatcataggcggaaagagccaacgcgtgaacggcctcacttccagtaaaaatagccagccaatggctacacacaagaaaagtggaaggagtaaagaaaagagaaaaagtaagcataagctaaagaaacgccgcgggcacctctccgaagagcctagcgagaatattaatacacccacccgactcacacctcagttgcagatgaagccaatgtccaatagggagagaaactttgttttgaaacatcacgttttcctggttaggaattgggaaaaaatccgccaaaagcaggaagaggttaaacataccagcgacaacatacacagcgctagcctctacactcgttggaatgggatttgccgtgatgatggcaacatcaagagcgacgttttcatgacacagttttctgccctgcaaacagcacggagtgttcggaccaggcgtcttgcagctgctgaagagaatattgaagtggcccgcgccgcaaggctagcacagatcttcaaggaaatttgcgacggaatcatttcttacaaagacagttcaagacaggcccttgctgcacctttgctgaacctgccgccaaagaagaagaatgctgactactacgaaaagatctctgatcccctggatctaattaccatagaaaagcaaatactgacaggctattataagaccgtggaggcgtttgatgccgacatgctgaaggtgttccgcaacgcagaaaaatactatgggagaaagagcccagtagggagagacgtttgtcgtctgcggaaggcttattataatgcccgacatgaggccagcgcgcagatcgacgagatagtaggagagaccgcatctgaagcggattcaagtgagactagtgtttctgaaaaagaaaacggacacgagaaagacgatgacgttatccgatgtatttgtggtctctacaaggacgagggtttgatgatccagtgtgacaagtgcatggtgtggcaacattgcgactgcatgggagtgaactctgacgtcgaacattacctgtgcgaacagtgtgatccccgaccagtagaccgcgaggtgcccatgatcccgaggcctcattatgcccagccaggttgtgtctattttatctgcctgcttagggacgatctgttgctacggcagggcgactgtgtctacctgatgagggactctaggcgcacccccgacgggcatcctgtcagacaaagttaccgattgctctctcacattaatagggataaactggacatcttccgcattgaaaagctgtggaagaatgagaaggaggagagatttgcgttcgggcatcattatttcaggccccacgagacacaccatagtccttctaggcggttctatcacaacgagcttttccgtgtacccttatacgaaattatccccctggaggctgtcgtcggcacctgttgtgttctcgacttatacacttactgcaaaggccggccaaaaggggttaaggaacaggatgtatacatctgtgactacagactggacaaatccgctcacctgttctataaaatacaccgtaaccgctaccccgtgtgtacaaaaccctatgccttcgaccacttcccaaagaaactgacacccaaaaaagatttttcaccccattatgtgccagataattacaaaaggaacggtggccgttcttcgtggaagtctgaaaggtctaaacctccactcaaggacctgggacaggaagatgatgctctccctctaatcgaagaggttctggcatcccaggagcaggctgccaatgagattcctagcctagaagaacccgagcgtgaaggcgcgaccgctaatgtttcagaaggggagaaaaaaacagaagaatcaagccaggaaccccagagtacatgcactccggaagaacgccgccataatcagagggaaaggctgaatcaaatacttctcaatctgttggaaaaaattcctggcaaaaacgccatagacgtgacatatctcctggaggaaggttcagggagaaagttgcgcaggcggaccctctttatcccggagaattcgttccgaaaatag

SEQ ID NO: 286054 - DNA, 8910 bp, Artificial Sequence
  derived and/or modified sequence
atggaccccaggaacacagccatgctgggcctgggcagtgacagcgagggcttcagcaggaagagccccagcgccatcagcacaggcaccctggtgtccaagcgggaggtggagctggagaagaacaccaaggaggaggaggacctgaggaagaggaaccgggagaggaacatcgaggccggcaaggatgatggcctgacagatgcccagcagcagttctctgtgaaggagaccaacttcagcgagggcaacctgaagctgaagattggcctgcaggccaagaggaccaagaagccacccaagaacctggagaactacgtgtgcaggcctgccatcaagaccaccatcaagcaccccaggaaggccctgaagagcggcaagatgacagatgagaagaatgagcactgccccagcaagagggaccccagcaagctgtacaagaaggcagatgatgtggccgccatcgagtgccagagcgaggaggtgatccggctgcacagccagggcgagaacaaccccctgagcaagaagctgagccctgtgcacagcgagatggctgactacatcaatgccacccccagcaccctgctgggcagccgggaccctgacctgaaggaccgggccctgctgaatggaggcacctctgtgacagagaagctggcccagctgattgccacctgcccccccagcaagagcagcaagaccaagcccaagaagctgggcaccggcaccacagctggcctggtgtccaaggacctgatcaggaaggccggcgtgggctctgtggccggcatcatccacaaggacctgatcaagaagcccaccatcagcacagctgtgggcctggtgaccaaggaccccgggaagaagcctgtgttcaatgctgctgtgggcctggtgaacaaggacagcgtgaagaagctgggcaccggcaccacagctgtgttcatcaacaagaacctgggcaagaagccaggcaccatcaccaccgtgggcctgctgagcaaggacagcggcaagaagctgggcatcggcatcgtgcccggcctggtgcacaaggagagcggcaagaagctgggcctgggcaccgtggtgggcctggtgaacaaggacctgggcaagaagctgggcagcacagtgggcctggtggccaaggactgtgccaagaagatcgtggccagcagcgccatgggcctggtgaacaaggacatcggcaagaagctgatgagctgccccctggccggcctcatcagcaaggatgccatcaacctgaaggccgaggccctgctgcccacccaggagcccctgaaggccagctgcagcaccaacatcaacaaccaggagagccaggagctgtctgagagcctgaaggacagcgccaccagcaagacctttgagaagaatgtggtgcggcagaacaaggagagcatcctggagaagttctctgtgaggaaggagatcatcaacctggagaaggagatgtttaatgaaggcacctgcatccagcaggacagcttcagcagcagcgagaagggcagctatgagaccagcaagcatgagaagcagccccctgtgtactgcaccagcccagacttcaagatgggcggggccagtgatgtgtccacagccaagagccccttctctgctgtgggggagagcaacctgcccagccccagccccaccgtgtctgtgaaccccctgaccaggagccccccagagaccagcagccagctggcccccaaccccctgctgctgagcagcaccacagagctgattgaggagatcagcgagagcgtgggcaagaaccagttcaccagcgagagcacccacctgaatgtgggccacaggtctgtgggccacagcatcagcattgaatgtaaaggaattgacaaggaggtgaatgacagcaagaccacccacatcgacatcccccgcatcagcagcagcctgggcaagaagcccagcctgaccagcgagagcagcatccacaccatcacccccagcgtggtgaacttcaccagcctcttcagcaacaagcccttcctgaagctgggcgctgtgtctgccagtgacaagcactgccaggtggccgagagcctgagcaccagcctgcagagcaagcccctgaagaagaggaaaggaaggaagccccgctggaccaaggtggtggcccggagcacctgccgcagccccaagggcctggagctggagaggtctgagctgttcaagaatgtgtcctgcagcagcctgagcaacagcaacagcgagcccgccaagttcatgaagaacatcggcccccccagctttgtggaccatgacttcctgaagaggcggctgcccaagctgagcaagagcacagcccccagcctggccctgctggccgacagcgagaagcccagccacaagagctttgccacccacaagctgagcagctccatgtgtgtgtccagtgacctgctgagtgacatctacaagcccaagaggggccggcccaagagcaaggagatgccccagctggagggcccccccaagaggaccctgaagatcccagccagcaaggtgttcagcctgcagagcaaggaggagcaggagccccccatcctgcagcctgagattgagatccccagcttcaagcagggcctgtctgtgagccccttccccaagaagaggggccggcccaagaggcagatgaggagccctgtgaagatgaagccccctgtgctgtctgtggccccctttgtggccacagagagccccagcaagctggagagcgagagtgacaaccacaggagcagcagtgacttctttgaaagtgaggaccagctgcaggaccctgatgacctggatgacagccaccggcccagcgtgtgcagcatgtctgacctggagatggagccagacaagaagatcaccaagagaaataatggccagctgatgaagaccatcatcaggaagatcaacaagatgaagaccctgaagaggaagaagctgctgaaccagatcctgagcagctctgtggagagcagcaacaagggcaaggtgcagagcaagctgcacaacacagtgagcagcctggccgccaccttcggcagcaagctgggccagcagatcaacgtgtccaagaagggcaccatctacatcggcaagaggcggggcaggaagcccaagacagtgctgaatggcatcctgagcggcagccccaccagcctggccgtgctggagcagacagcccagcaggccgccggcagcgccctgggccagatcctgccccccctgctgcccagcagcgccagcagcagcgagatcctgcccagccccatctgcagccagagcagcggcaccagcggcggccagagccctgtgtccagtgatgctggctttgtggagcccagctctgtgccctacctgcacctgcacagccggcagggctccatgatccagaccctggccatgaagaaggccagcaagggcagaagaaggctgagcccccccaccctgctgcccaacagccccagccacctgtctgagctgaccagcctgaaggaggccacccccagccccatcagcgagagccacagtgatgagaccatccccagcgacagcggcattggaacagacaacaacagcaccagtgacagagctgagaagttctgtggccagaagaagagaagacacagctttgaacatgtgtccctcatccccccagagaccagcacagtgctgagcagcctgaaggagaagcacaagcacaagtgcaagagaagaaatcatgactacctgtcctatgacaagatgaagaggcagaagaggaagaggaagaagaagtacccccagctgaggaaccggcaggaccctgacttcatcgccgagctggaggagctgatcagccggctgtctgagatccgcatcacccacaggagccaccacttcatcccccgggacctgctgcccaccatcttccgcatcaacttcaacagcttctacacccaccccagcttccccctggaccccctgcactacatcaggaagccagacctgaagaagaagaggggccggccccccaagatgagggaggccatggccgagatgcccttcatgcacagcctgtccttccccctgagcagcacaggcttctaccccagctatggcatgccctacagccccagccccctgacagctgcccccatcggcctgggctactacggccgctacccacccaccctgtacccacctccacccagccccagcttcaccacccccctgcccccacccagctacatgcatgctggccacctgctgctgaacccagccaagtaccacaagaagaagcacaagctgctgcggcaggaggccttcctgaccaccagcaggacccccctgctgtccatgagcacctaccccagcgtgcccccagagatggcctacggctggatggtggagcacaagcaccgccaccgccacaagcaccgggagcacaggagcagcgagcagccccaggtgtccatggacaccggcagcagccgctctgtgctggagagcctgaagcgctacagatttgggaaggatgctgtgggggagcgctacaagcacaaggagaagcaccgctgccacatgagctgcccccacctgagccccagcaagagcctcatcaaccgggaggagcagtgggtgcaccgggagcccagcgagagcagccccctggccctgggcctgcagacccccctgcagattgactgcagcgagagcagccccagcctgagcctgggcggcttcacccccaacagcgagcccgccagcagtgatgagcacaccaacctcttcaccagcgccatcggcagctgccgggtgagcaaccccaacagcagcggcaggaagaagctgacagacagccctggcctcttcagcgcccaggacaccagcctgaaccggctgcacaggaaggagagcctgcccagcaatgaaagagctgtgcagaccctggccggcagccagcccaccagtgacaagcccagccagaggccttctgagagcaccaactgcagccccaccaggaagaggagcagcagcgagagcaccagcagcacagtgaatggagtgcccagccgcagcccccggctggtggccagcggagatgattctgtggacagcctgctgcagaggatggtgcagaatgaagaccaggagcccatggagaagagcattgatgctgtgattgccacagccagcgccccacccagcagcagccctggccgcagccacagcaaggacaggaccctgggcaagccagacagcctgctggtgcctgctgtgaccagtgacagctgcaacaacagcatcagcctgctgtctgagaagctgaccagcagctgcagcccccaccacatcaagaggtctgtggtggaggccatgcagaggcaggccaggaagatgtgcaactatgacaagatcctggccaccaagaagaacctggaccacgtgaacaagatcctgaaggccaagaagctgcagaggcaggccaggactggaaacaactttgtgaagaggcggcccggccggcccaggaaatgtcccctgcaggccgtggtgtccatgcaggccttccaggccgcccagtttgtgaaccctgagctgaacagagatgaggagggcgccgccctgcacctgagcccagacacagtgacagatgtgattgaagctgtggtgcagagcgtgaacctgaaccctgagcacaagaagggcctgaagaggaagggctggctgctggaggagcagaccaggaagaagcagaagcccctgcctgaggaggaggagcaggagaacaacaagagcttcaatgaggcccctgtggagatccccagccccagcgagaccccagccaagcccagcgagcctgagagcaccctgcagcctgtgctgagcctcatcccccgggagaagaagccaccccggccccccaagaagaagtaccagaaggccggcctgtacagtgatgtgtacaagaccacagaccccaagagccgcctcatccagctgaagaaggagaagctggagtacaccccaggagaacatgaatatggcctcttccctgcccccatccacgtggtgttctttgtgtctgggaagtacctgcggcagaagagaattgacttccagctgccctatgacatcctgtggcagtggaagcacaaccagctgtacaagaagccagatgtgcccctgtacaagaagatccgcagcaatgtgtatgtggatgtgaagcccctgagcggctatgaggccaccacctgcaactgcaagaagccagatgatgacaccaggaagggctgtgtggatgactgcctgaacaggatgatctttgctgaatgtagccccaacacctgcccctgtggggagcagtgctgcaaccagaggatccagagacatgagtgggtgcagtgcctggagcgcttccgggcagaggagaagggctggggcatccgcaccaaggagcccctgaaggccggccagttcatcatcgagtacctgggggaggtggtgtctgagcaggagttcaggaacaggatgattgagcagtaccacaaccacagcgaccactactgcctgaacctggacagcggcatggtgattgacagctacaggatgggaaatgaggcccgcttcatcaaccacagctgtgaccccaactgtgagatgcagaagtggagcgtgaatggagtgtaccgcatcggcctgtatgccctgaaggacatgcctgctggaacagagctgacctatgactacaacttccacagcttcaacgtggagaagcagcagctgtgcaagtgtggctttgagaagtgccggggcatcatcggcggcaagagccagagggtgaatggcctgaccagcagcaagaacagccagcccatggccacccacaagaagagcggccgcagcaaggagaagaggaagagcaagcacaagctgaagaagagaagaggccacctgtctgaggagcccagcgagaacatcaacacccccacccggctgaccccccagctgcagatgaagcccatgagcaaccgggagaggaactttgtgctgaagcaccacgtgttcctggtgaggaactgggagaagatccggcagaagcaggaggaggtgaagcacaccagtgacaacatccacagcgccagcctgtacacccgctggaatggcatctgcagagatgatggcaacatcaagagtgatgtgttcatgacccagttcagcgccctgcagacagcccggtctgtgaggacccggcggctggccgctgctgaagaaaatattgaggtggcccgggccgcccggctggcccagatcttcaaggagatctgtgatggcatcatctcctacaaggacagcagccggcaggccctggccgcccccctgctgaacctgccccccaagaagaagaatgctgactactatgagaagatcagtgaccccctggacctgatcaccatcgagaagcagatcctgaccggctactacaagacagtggaggcctttgatgctgacatgctgaaggtgttcagaaatgctgagaagtactacggcaggaagagccctgtgggcagagatgtgtgccgcctgaggaaggcctactacaatgcccggcatgaggccagcgcccagattgatgaaattgtgggggagacagccagcgaggccgacagcagcgagacctctgtgtctgagaaggaaaatggacatgagaaggatgatgatgtgatccgctgcatctgtggcctgtacaaggatgagggcctgatgatccagtgtgacaagtgcatggtgtggcagcactgtgactgcatgggcgtgaacagtgatgtggagcactacctgtgtgagcagtgtgaccccaggcctgtggaccgggaggtgcccatgatcccccggccccactacgcccagcccggctgtgtgtacttcatctgcctgctgagagatgacctgctgctgcggcagggcgactgtgtgtacctgatgagggacagcaggaggaccccagatggccaccctgtgcggcagagctaccgcctgctgagccacatcaacagagacaagctggacatcttccgcatcgagaagctgtggaagaatgagaaggaggagagatttgccttcggccaccactacttccggccccatgagacccaccacagccccagccgccgcttctaccacaatgaactcttccgggtgcccctgtatgagatcatccccctggaggccgtggtgggcacctgctgcgtgctggacctgtacacctactgcaagggccggcccaagggcgtgaaggagcaggatgtgtacatctgtgactaccgcctggacaagagcgcccacctgttctacaagatccacaggaaccgctaccctgtgtgcaccaagccctatgcctttgaccacttccccaagaagctgacccccaagaaggacttcagcccccactacgtgcctgacaactacaagagaaatggaggccgcagctcctggaagtctgagaggagcaagccacccctgaaggacctgggccaggaggatgatgccctgcccctcatcgaggaggtgctggccagccaggagcaggccgccaatgagatccccagcctggaggagcctgagcgggagggcgccacagccaacgtgtctgagggggagaagaagacagaggagagcagccaggagccccagagcacctgcaccccagaggagcggcggcacaaccagcgggagcggctgaaccagatcctgctgaacctgctggagaagatccctgggaagaatgccattgatgtgacctacctgctggaggagggcagcggcaggaagctgcggcggaggaccctcttcatccctgagaacagcttcaggaagtag

SEQ ID NO: 286055 - DNA, 8895 bp, Artificial Sequence
  derived and/or modified sequence
atggaccccaggaacacagccatgctgggcctgggcagtgacagcgagggcttcagcaggaagagccccagcgccatcagcacaggcaccctggtgtccaagcgggaggtggagctggagaagaacaccaaggaggaggaggacctgaggaagaggaaccgggagaggaacatcgaggccggcaaggatgatggcctgacagatgcccagcagcagttctctgtgaaggagaccaacttcagcgagggcaacctgaagctgaagattggcctgcaggccaagaggaccaagaagccacccaagaacctggagaactacgtgtgcaggcctgccatcaagaccaccatcaagcaccccaggaaggccctgaagagcggcaagatgacagatgagaagaatgagcactgccccagcaagagggaccccagcaagctgtacaagaaggcagatgatgtggccgccatcgagtgccagagcgaggaggtgatccggctgcacagccagggcgagaacaaccccctgagcaagaagctgagccctgtgcacagcgagatggctgactacatcaatgccacccccagcaccctgctgggcagccgggaccctgacctgaaggaccgggccctgctgaatggaggcacctctgtgacagagaagctggcccagctgattgccacctgcccccccagcaagagcagcaagaccaagcccaagaagctgggcaccggcaccacagctggcctggtgtccaaggacctgatcaggaaggccggcgtgggctctgtggccggcatcatccacaaggacctgatcaagaagcccaccatcagcacagctgtgggcctggtgaccaaggaccccgggaagaagcctgtgttcaatgctgctgtgggcctggtgaacaaggacagcgtgaagaagctgggcaccggcaccacagctgtgttcatcaacaagaacctgggcaagaagccaggcaccatcaccaccgtgggcctgctgagcaaggacagcggcaagaagctgggcatcggcatcgtgcccggcctggtgcacaaggagagcggcaagaagctgggcctgggcaccgtggtgggcctggtgaacaaggacctgggcaagaagctgggcagcacagtgggcctggtggccaaggactgtgccaagaagatcgtggccagcagcgccatgggcctggtgaacaaggacatcggcaagaagctgatgagctgccccctggccggcctcatcagcaaggatgccatcaacctgaaggccgaggccctgctgcccacccaggagcccctgaaggccagctgcagcaccaacatcaacaaccaggagagccaggagctgtctgagagcctgaaggacagcgccaccagcaagacctttgagaagaatgtggtgcggcagaacaaggagagcatcctggagaagttctctgtgaggaaggagatcatcaacctggagaaggagatgtttaatgaaggcacctgcatccagcaggacagcttcagcagcagcgagaagggcagctatgagaccagcaagcatgagaagcagccccctgtgtactgcaccagcccagacttcaagatgggcggggccagtgatgtgtccacagccaagagccccttctctgctgtgggggagagcaacctgcccagccccagccccaccgtgtctgtgaaccccctgaccaggagccccccagagaccagcagccagctggcccccaaccccctgctgctgagcagcaccacagagctgattgaggagatcagcgagagcgtgggcaagaaccagttcaccagcgagagcacccacctgaatgtgggccacaggtctgtgggccacagcatcagcattgaatgtaaaggaattgacaaggaggtgaatgacagcaagaccacccacatcgacatcccccgcatcagcagcagcctgggcaagaagcccagcctgaccagcgagagcagcatccacaccatcacccccagcgtggtgaacttcaccagcctcttcagcaacaagcccttcctgaagctgggcgctgtgtctgccagtgacaagcactgccaggtggccgagagcctgagcaccagcctgcagagcaagcccctgaagaagaggaaaggaaggaagccccgctggaccaaggtggtggcccggagcacctgccgcagccccaagggcctggagctggagaggtctgagctgttcaagaatgtgtcctgcagcagcctgagcaacagcaacagcgagcccgccaagttcatgaagaacatcggcccccccagctttgtggaccatgacttcctgaagaggcggctgcccaagctgagcaagagcacagcccccagcctggccctgctggccgacagcgagaagcccagccacaagagctttgccacccacaagctgagcagctccatgtgtgtgtccagtgacctgctgagtgacatctacaagcccaagaggggccggcccaagagcaaggagatgccccagctggagggcccccccaagaggaccctgaagatcccagccagcaaggtgttcagcctgcagagcaaggaggagcaggagccccccatcctgcagcctgagattgagatccccagcttcaagcagggcctgtctgtgagccccttccccaagaagaggggccggcccaagaggcagatgaggagccctgtgaagatgaagccccctgtgctgtctgtggccccctttgtggccacagagagccccagcaagctggagagcgagagtgacaaccacaggagcagcagtgacttctttgaaagtgaggaccagctgcaggaccctgatgacctggatgacagccaccggcccagcgtgtgcagcatgtctgacctggagatggagccagacaagaagatcaccaagagaaataatggccagctgatgaagaccatcatcaggaagatcaacaagatgaagaccctgaagaggaagaagctgctgaaccagatcctgagcagctctgtggagagcagcaacaagggcaaggtgcagagcaagctgcacaacacagtgagcagcctggccgccaccttcggcagcaagctgggccagcagatcaacgtgtccaagaagggcaccatctacatcggcaagaggcggggcaggaagcccaagacagtgctgaatggcatcctgagcggcagccccaccagcctggccgtgctggagcagacagcccagcaggccgccggcagcgccctgggccagatcctgccccccctgctgcccagcagcgccagcagcagcgagatcctgcccagccccatctgcagccagagcagcggcaccagcggcggccagagccctgtgtccagtgatgctggctttgtggagcccagctctgtgccctacctgcacctgcacagccggcagggctccatgatccagaccctggccatgaagaaggccagcaagggcagaagaaggctgagcccccccaccctgctgcccaacagccccagccacctgtctgagctgaccagcctgaaggaggccacccccagccccatcagcgagagccacagtgatgagaccatccccagcgacagcggcattggaacagacaacaacagcaccagtgacagagctgagaagttctgtggccagaagaagagaagacacagctttgaacatgtgtccctcatccccccagagaccagcacagtgctgagcagcctgaaggagaagcacaagcacaagtgcaagagaagaaatcatgactacctgtcctatgacaagatgaagaggcagaagaggaagaggaagaagaagtacccccagctgaggaaccggcaggaccctgacttcatcgccgagctggaggagctgatcagccggctgtctgagatccgcatcacccacaggagccaccacttcatcccccgggacctgctgcccaccatcttccgcatcaacttcaacagcttctacacccaccccagcttccccctggaccccctgcactacatcaggaagccagacctgaagaagaagaggggccggccccccaagatgagggaggccatggccgagatgcccttcatgcacagcctgtccttccccctgagcagcacaggcttctaccccagctatggcatgccctacagccccagccccctgacagctgcccccatcggcctgggctactacggccgctacccacccaccctgtacccacctccacccagccccagcttcaccacccccctgcccccacccagctacatgcatgctggccacctgctgctgaacccagccaagtaccacaagaagaagcacaagctgctgcggcaggaggccttcctgaccaccagcaggacccccctgctgtccatgagcacctaccccagcgtgcccccagagatggcctacggctggatggtggagcacaagcaccgccaccgccacaagcaccgggagcacaggagcagcgagcagccccaggtgtccatggacaccggcagcagccgctctgtgctggagagcctgaagcgctacagatttgggaaggatgctgtgggggagcgctacaagcacaaggagaagcaccgctgccacatgagctgcccccacctgagccccagcaagagcctcatcaaccgggaggagcagtgggtgcaccgggagcccagcgagagcagccccctggccctgggcctgcagacccccctgcagattgactgcagcgagagcagccccagcctgagcctgggcggcttcacccccaacagcgagcccgccagcagtgatgagcacaccaacctcttcaccagcgccatcggcagctgccgggtgagcaaccccaacagcagcggcaggaagaagctgacagacagccctggcctcttcagcgcccaggacaccagcctgaaccggctgcacaggaaggagagcctgcccagcaatgaaagagctgtgcagaccctggccggcagccagcccaccagtgacaagcccagccagaggccttctgagagcaccaactgcagccccaccaggaagaggagcagcagcgagagcaccagcagcacagtgaatggagtgcccagccgcagcccccggctggtggccagcggagatgattctgtggacagcctgctgcagaggatggtgcagaatgaagaccaggagcccatggagaagagcattgatgctgtgattgccacagccagcgccccacccagcagcagccctggccgcagccacagcaaggacaggaccctgggcaagccagacagcctgctggtgcctgctgtgaccagtgacagctgcaacaacagcatcagcctgctgtctgagaagctgaccagcagctgcagcccccaccacatcaagaggtctgtggtggaggccatgcagaggcaggccaggaagatgtgcaactatgacaagatcctggccaccaagaagaacctggaccacgtgaacaagatcctgaaggccaagaagctgcagaggcaggccaggactggaaacaactttgtgaagaggcggcccggccggcccaggaaatgtcccctgcaggccgtggtgtccatgcaggccttccaggccgcccagtttgtgaaccctgagctgaacagagatgaggagggcgccgccctgcacctgagcccagacacagtgacagatgtgattgaagctgtggtgcagagcgtgaacctgaaccctgagcacaagaagggcctgaagaggaagggctggctgctggaggagcagaccaggaagaagcagaagcccctgcctgaggaggaggagcaggagaacaacaagagcttcaatgaggcccctgtggagatccccagccccagcgagaccccagccaagcccagcgagcctgagagcaccctgcagcctgtgctgagcctcatcccccgggagaagaagccaccccggccccccaagaagaagtaccagaaggccggcctgtacagtgatgtgtacaagaccacagaccccaagagccgcctcatccagctgaagaaggagaagctggagtacaccccaggagaacatgaatatggcctcttccctgcccccatccacgtgggcaagtacctgcggcagaagagaattgacttccagctgccctatgacatcctgtggcagtggaagcacaaccagctgtacaagaagccagatgtgcccctgtacaagaagatccgcagcaatgtgtatgtggatgtgaagcccctgagcggctatgaggccaccacctgcaactgcaagaagccagatgatgacaccaggaagggctgtgtggatgactgcctgaacaggatgatctttgctgagtgcagccccaacacctgcccctgtggggagcagtgctgcaaccagaggatccagagacatgagtgggtgcagtgcctggagcgcttccgggcagaggagaagggctggggcatccgcaccaaggagcccctgaaggccggccagttcatcatcgagtacctgggggaggtggtgtctgagcaggagttcaggaacaggatgattgagcagtaccacaaccacagcgaccactactgcctgaacctggacagcggcatggtgattgacagctacaggatgggaaatgaggcccgcttcatcaaccacagctgtgaccccaactgtgagatgcagaagtggagcgtgaatggagtgtacagaattggcctgtatgccctgaaggacatgcctgctggaacagagctgacctatgactacaacttccacagcttcaacgtggagaagcagcagctgtgcaagtgtggctttgagaagtgccggggcatcattggaggcaagagccagagggtgaatggcctgaccagcagcaagaacagccagcccatggccacccacaagaagagcggccgcagcaaggagaagaggaagagcaagcacaagctgaagaagaggcggggccacctgtctgaggagcccagcgagaacatcaacacccccacccggctgaccccccagctgcagatgaagcccatgagcaaccgggagaggaactttgtgctgaagcaccacgtgttcctggtgaggaactgggagaagatccggcagaagcaggaggaggtgaagcacaccagtgacaacatccacagcgccagcctgtacacccgctggaatggcatctgcagagatgatggcaacatcaagagtgatgtgttcatgacccagttcagcgccctgcagacagcccggtctgtgaggacccggcggctggccgctgctgaggagaacatcgaggtggcccgggccgcccggctggcccagatcttcaaggagatctgtgatggcatcatctcctacaaggacagcagccggcaggccctggccgcccccctgctgaacctgccccccaagaagaagaatgctgactactatgagaagatcagtgaccccctggacctgatcaccatcgagaagcagatcctgaccggctactacaagacagtggaggcctttgatgctgacatgctgaaggtgttcagaaatgctgagaagtactacggcaggaagagccctgtgggcagagatgtgtgccgcctgaggaaggcctactacaatgcccggcatgaggccagcgcccagattgatgagatcgtgggggagacagccagcgaggccgacagcagcgagacctctgtgtctgagaaggaaaatggccacgagaaggatgatgatgtgatccgctgcatctgtggcctgtacaaggatgagggcctgatgatccagtgtgacaagtgcatggtgtggcagcactgtgactgcatgggcgtgaacagtgatgtggagcactacctgtgtgagcagtgtgaccccaggcctgtggaccgggaggtgcccatgatcccccggccccactacgcccagcccggctgtgtgtacttcatctgcctgctgagagatgacctgctgctgcggcagggcgactgtgtgtacctgatgagggacagcaggaggaccccagatggccaccctgtgcggcagagctaccgcctgctgagccacatcaacagagacaagctggacatcttcagaattgagaagctgtggaagaatgagaaggaggagagatttgccttcggccaccactacttccggccccatgagacccaccacagccccagccgccgcttctaccacaatgagctgttccgggtgcccctgtatgagatcatccccctggaggccgtggtgggcacctgctgcgtgctggacctgtacacctactgcaagggccggcccaagggcgtgaaggagcaggatgtgtacatctgtgactaccgcctggacaagagcgcccacctgttctacaagatccacaggaaccgctaccctgtgtgcaccaagccctatgcctttgaccacttccccaagaagctgacccccaagaaggacttcagcccccactacgtgcctgacaactacaagagaaatggaggccgcagctcctggaagtctgagaggagcaagccacccctgaaggacctgggccaggaggatgatgccctgcccctgattgaggaggtgctggccagccaggagcaggccgccaatgagatccccagcctggaggagcctgagcgggagggcgccacagccaacgtgtctgagggggagaagaagacagaggagagcagccaggagccccagagcacctgcaccccagaggagaggaggcacaaccagcgggagcggctgaaccagatcctgctgaacctgctggagaagatccctgggaagaatgccattgatgtgacctacctgctggaggagggcagcggcaggaagctgcggcggaggaccctcttcatcccagaaaattccttcaggaagtag

SEQ ID NO: 286056 - DNA, 8910 bp, Artificial Sequence
  derived and/or modified sequence
atggacccccggaacaccgccatgctgggcctgggcagcgacagcgagggtttcagccgcaaatccccctctgcgatttcaacgggaaccttggtcagcaagcgcgaggtagaactggagaagaatacaaaagaggaagaggacctcagaaaaagaaatagggagagaaatattgaggccgggaaggatgacggccttacggatgcgcagcagcaatttagtgttaaagaaactaattttagtgagggcaatctcaagcttaaaattgggctccaggctaaacgcactaaaaagcccccaaagaacctggaaaactacgtctgcagaccagccatcaagaccactataaaacatcctagaaaggcattgaagtctgggaaaatgacagatgagaaaaacgaacattgcccttctaagagagacccatctaaactatacaaaaaggctgacgacgtggctgcaatcgagtgccagagtgaagaagttatacgcctccacagccagggagagaataacccactctccaagaagctgtcacccgttcactccgaaatggccgactacataaacgctacgccaagtacactgctgggatcaagggaccccgacctcaaggaccgcgccttgctgaacggcgggacctccgttactgaaaagttggctcaattgattgccacatgcccccctagtaagtcctcgaaaacaaagcccaagaaactcgggacagggaccacagccggtctcgttagtaaggacctgataaggaaggccggagttggtagtgtggccggtataatacacaaagatttaattaagaaacccacaatttctaccgccgttgggctggtgacgaaagatccgggaaagaagcctgtgtttaacgctgccgtcggactcgtcaacaaagactccgtcaaaaagttgggtactggcacaaccgctgtatttattaacaaaaatctaggcaagaagccaggtacaattacaactgtcgggctcttatctaaggactccggcaaaaagctgggtattggcattgtgccaggcctcgtgcacaaggagtctggaaagaaactgggccttggaaccgtggtgggattggtcaataaagatctgggaaagaaactaggatccactgtggggcttgtcgcaaaagactgcgcaaaaaagatcgtcgcatcctccgctatgggactcgtaaataaggatatcggcaaaaagctcatgagctgcccactggccggccttatttccaaggacgctattaacctgaaggctgaagccctgttacccacccaggaacccttgaaagctagttgctctacaaacatcaacaaccaagaatcacaggagttaagtgagagcttgaaagatagcgcaacatcaaaaacctttgaaaagaatgtggtgaggcagaacaaggaaagtattctggaaaaattctctgtccggaaggaaataattaatcttgaaaaagaaatgtttaatgagggcacctgtatccaacaggacagtttcagttcaagcgagaaggggtcctatgagacctccaagcacgagaagcagccacccgtgtactgcactagccctgactttaagatggggggcgcatcggacgtaagtactgctaagtccccttttagcgcagtgggggaatctaacctcccttccccctcccccacagtctcagtgaatccgctgacgcgctctcccccagagacttcctcccagctcgcccccaatcctctcctcctgtcttctaccaccgagctgatcgaagagatctctgagtccgtgggaaagaatcagtttactagtgagagtactcacttgaacgtgggacataggagtgtggggcattcaatctcaatcgaatgcaagggcattgacaaagaggtaaatgatagtaaaaccactcacatcgatattcctagaatctccagctctctcggaaagaaacctagtctcacatcggaatctagcatccataccatcaccccatccgtagtcaactttacgagtctcttttccaacaagccgttccttaaactgggggccgtttcggcatcagataaacactgtcaggtggcagagagtctctccacctctttgcaatcgaagcccttaaaaaagcggaagggcagaaaaccccgttggaccaaagttgtcgccaggtctacctgccggtccccaaaggggctggaactagagcgctcggagctgtttaaaaacgtatcgtgtagtagtctgagcaactctaactccgaacccgccaaattcatgaagaatatcggaccaccaagctttgtcgaccacgacttcttgaaacgccggctacccaaactctcaaaatctacagcaccttccttggccttactggctgactctgaaaaaccatcccacaagtcctttgctactcataaattgtcaagcagtatgtgcgtgtccagtgaccttctgtcagacatctacaagcctaaacgggggcgcccgaagagtaaggagatgccacagctggaaggacccccaaaacggacacttaagattcccgccagcaaggtgttctcactgcagtccaaggaggagcaggagccgccaattttacagccggagatagaaataccatcgttcaaacaggggctgtcagtgtccccatttccaaagaaacgagggcggcctaaacgccagatgaggagccctgtgaaaatgaagcccccagtactgagcgtggctccattcgtagccactgaatctccatccaagttagagtccgagagtgacaaccacagatcttcctccgacttcttcgagagcgaagatcagttgcaggatcccgacgatctggatgattcccacagacccagtgtttgtagtatgagcgatctcgagatggagccggacaagaagattactaaaagaaacaacgggcagctcatgaaaactattatccgtaaaattaacaaaatgaagactttaaagaggaagaagttactcaaccaaatccttagttccagcgttgagtcctccaataagggcaaggtgcagagcaaactccacaatacggtgtcatcattagctgctacttttgggtccaagctgggacagcagattaatgtcagtaagaagggaactatttatattggcaagcgccgcggtcggaagcctaaaacagttctaaatggcattctgagtggctcccccacttctctggctgttcttgagcagactgcccagcaggctgctggatctgctctgggtcaaatactgccccctctgctcccctcttcagcaagctcatccgagatcttgccttccccaatctgttcacagtcatcaggtactagtggtggtcagtcaccggtgtcttccgatgcgggcttcgttgagccatccagcgtgccatatctccatctacattctagacagggaagcatgattcagactctcgctatgaagaaagcttctaaaggcaggcggcggctgagtcctccaactctgttgcccaattcaccctcccatctcagcgaattaacctctctcaaagaggctaccccaagtcccatatctgagagccatagcgacgagactataccaagtgactccgggatcggaaccgataataactccacttctgatagagcagagaaattctgcgggcagaagaagcgccggcactctttcgagcacgtttcactgatcccccccgagacctcaacggtgctaagttccctgaaagaaaagcacaaacacaagtgcaagcgacggaatcacgactacctgagctatgacaagatgaagcgacagaagcgcaagcgcaagaaaaaatacccccagctccggaatcggcaagaccccgacttcatcgctgagcttgaagaactgatctcaagactcagcgagatcagaattacacacagatcccaccatttcattccgcgggatcttcttcctaccatcttcagaatcaatttcaatagtttttatacccatccatctttccctctggatcctctgcattacatcagaaaacctgatttaaaaaagaagagagggaggcctccgaagatgagagaagccatggctgagatgccattcatgcattctctaagtttccctctctcctctaccggcttttacccttcttatggcatgccctatagcccgtcacctctgactgccgctcccattgggctgggatactatggtcgctatccgccaaccctttatcccccccctccttcaccttcattcacaacacctctccctcccccctcatatatgcacgctggtcacttattgttaaaccccgccaaatatcataagaagaaacacaagctgttgcgacaggaggcttttctcactacgtcccggaccccgcttcttagtatgtccacctacccttccgtgccccctgagatggcatatggctggatggtggagcacaaacatcgacaccgccacaagcatagggaacatagaagttcagagcagccacaagtctcaatggacaccggatccagccgctccgtgttggaatccctgaagcgttaccgctttggaaaggatgcagtgggcgaacggtacaagcacaaagagaaacataggtgccatatgagttgtccgcatttgagcccttcaaaaagcttgatcaaccgcgaggagcagtgggttcatcgcgaacctagtgagtccagtcccctggctcttggcctccaaacaccactgcagattgattgtagcgagtcatccccaagtttaagtttaggcggatttaccccgaattctgagcctgcaagctcagatgaacacactaacctctttaccagtgccatcggtagttgtagggtgtctaacccgaacagtagcgggagaaagaagctgaccgatagccccggtcttttctctgcacaggacacgtccctgaacagactccaccgtaaagaatctcttccctccaacgaacgtgcagtccaaaccctggcaggctctcagcccacttcagataaaccctctcaaagaccctctgaatccactaattgcagtcccactcggaaacgttctagtagcgagtctacctcttctacagttaatggtgtacctagcaggagtcctcgccttgtggcctccggagacgactctgtggactcactcctccaaagaatggtacaaaacgaggaccaagagcccatggagaaatccatcgacgcagtcatcgctactgccagcgctcctccaagctcttcccctgggaggagccattctaaggaccgaacattggggaagcccgattctctcctggttccggcagtcacctcagactcttgcaacaacagtattagcctgttgtccgagaagctgacttcttcctgtagcccacaccatattaagagatcagtcgttgaagccatgcaaaggcaggccagaaagatgtgcaactatgataagattctggctaccaaaaaaaacctcgaccacgtgaataaaatattgaaggcaaagaaactgcagcggcaggccaggaccgggaacaatttcgtgaagcggcgacctggtcgacctcggaagtgccctctacaggccgtcgtgagtatgcaagcctttcaggccgcccagtttgttaaccccgagctcaaccgcgatgaggaaggcgccgctctccacctgagccctgacaccgtcactgatgtgatagaggccgtggtccagtccgtgaatctgaaccctgagcataaaaaaggtctaaagcggaaggggtggttgctcgaggagcagactcgtaagaagcaaaaaccgttgccagaagaagaagagcaggagaacaataaatcattcaacgaggctcccgtcgagatcccgagtccatcagagacacctgccaaacctagcgaacccgaaagcaccttacaaccggtgctctcattaatccccagggaaaaaaagccaccaaggcctcctaaaaagaagtaccagaaggcaggtctgtacagcgatgtctacaaaacaaccgatccaaaatcgcgactgatccaacttaagaaggagaaactcgagtatacgcccggcgaacacgaatatggactctttcccgctcccatacatgtagtgtttttcgtgtcgggaaagtacttgagacaaaagcgcatcgacttccagcttccttacgacattctgtggcaatggaagcataatcagctctacaaaaaacctgatgtcccactgtacaagaaaatacgctccaatgtgtacgtggatgttaagcccctgtcaggctacgaggcgacaacctgtaactgcaaaaagcccgacgacgatacacgaaaaggatgtgtcgatgattgtctgaacaggatgatcttcgccgagtgtagccctaacacatgcccatgtggcgagcaatgctgcaaccaaaggatccaacgtcacgaatgggtgcaatgtctggagagattcagagctgaagaaaaagggtggggaatcagaaccaaagaacctcttaaggcggggcagtttatcatcgaatacctgggcgaggtggtgtcagaacaggagttcaggaacagaatgattgagcagtatcataatcatagcgatcactactgtttgaacctcgactccggaatggtgattgatagctaccgcatgggaaatgaagccagatttattaaccactcttgtgatcctaattgcgagatgcaaaagtggagtgttaacggggtttaccgcattggactctatgccttaaaagacatgcccgcaggtactgaactgacctatgattataacttccacagctttaacgttgagaaacagcagctgtgtaagtgtgggttcgagaagtgccggggcataataggtgggaagtcacaacgtgtaaatggtcttacctcatcaaaaaactctcagcccatggcaacccacaaaaagtcggggaggtccaaagaaaagcggaaatccaaacataaacttaagaagcggcgaggccacctgtccgaagaaccatctgaaaacatcaatacccccaccagactcactccccaactgcagatgaagccaatgagcaatcgagaacgcaattttgtcttgaagcatcacgtcttcctggtgagaaactgggaaaaaattagacagaagcaagaggaggtgaagcatactagcgacaatatacattctgccagcctgtatacccgatggaacggcatttgcagagacgatggcaacattaaaagtgatgtgttcatgacccagttttccgcattgcaaaccgcgcgaagcgtgaggactcggaggttggcggctgctgaggagaacatcgaagtggcgagggcagcccgcttggcccaaatatttaaggagatatgtgacggaatcataagctataaagacagcagtaggcaggccctggcggctcctctgctgaacctgcccccgaagaagaaaaatgccgactactacgaaaaaatctccgaccccctggatctgatcacgatagaaaaacaaatcctgacaggatattataaaaccgtggaagcctttgatgccgacatgttgaaagtgttccgcaacgccgaaaaatactacggccgcaagtctcctgtagggcgggatgtgtgtcgtttacggaaagcgtattataatgctagacacgaagcttctgctcagatcgatgaaatagtgggcgaaaccgcctctgaggccgacagtagcgagacatcagtttccgagaaggaaaacggccatgagaaagacgacgacgttataagatgcatctgcggtctgtacaaagacgagggcctgatgatccaatgtgataaatgcatggtttggcagcactgcgattgcatgggcgttaacagcgacgttgagcactacttatgtgagcagtgcgacccaaggcccgttgacagggaagtgcctatgatacctcgcccacattatgcacagccaggatgcgtctatttcatttgccttctgagggacgatctgctccttcgccaaggtgattgcgtgtatttaatgcgcgatagtcgtcgcactccagacgggcaccctgttaggcagtcctataggctgctgtcccatataaatcgggacaaactcgacatctttcgtattgaaaagttgtggaaaaacgagaaggaggaaaggttcgccttcgggcatcattacttccggccacatgagacccaccattctccaagcagaaggttttatcacaacgagctgttccgcgtcccactttacgaaatcatcccccttgaggccgtcgtcggcacatgctgtgtgctggacttatatacctattgcaagggtcgacctaagggcgtaaaggagcaggatgtgtacatatgtgattaccgcctggacaagagcgcacatttgttctacaagattcaccgcaatcgttatcccgtttgcaccaagccctacgcgttcgatcactttccaaagaagctgacccctaagaaggactttagcccccactatgtgcccgacaactacaaaagaaacggggggagatcatcttggaagtccgagcggtcgaaaccaccactgaaggaccttgggcaggaggacgacgcactccctctgatagaagaagtattggcctcacaggaacaggcagccaacgaaatcccaagtttagaagaacccgagcgggaaggtgccactgcaaatgttagcgaaggcgagaagaagaccgaggaatcctcacaggagcctcagtccacttgtacgccggaagaaagacgccacaaccaacgcgaaaggctgaaccagattcttctgaatctgctggagaagatcccaggaaaaaatgccatcgacgttacctacctactcgaagagggatccggtagaaagctgcggagacgcaccctgttcataccagaaaactcatttagaaaatag

SEQ ID NO: 286057 - DNA, 8895 bp, Artificial Sequence
  derived and/or modified sequence
atggacccccggaacaccgccatgctgggcctgggcagcgacagcgaggggttcagccgcaagagtccctctgccatatctacaggaaccctggtcagcaaacgggaggtcgagcttgagaagaatactaaggaggaagaggatcttcgaaaacggaacagggaaaggaatattgaggccgggaaggacgatggcttgaccgatgctcagcaacagtttagcgtgaaggagactaacttctctgagggcaacctcaagttgaaaattggtttgcaagccaagcgcaccaagaagcctccaaagaatctcgaaaattatgtgtgtagaccggctatcaagacaacaattaagcatccaagaaaggcattaaagtctggaaaaatgacagacgagaagaatgaacactgtccaagcaaacgggacccctccaagctctacaagaaggcagacgacgtcgctgccatcgagtgtcaatcggaagaagtgattaggcttcactctcaaggtgaaaacaacccactgtctaagaagcttagccccgttcacagcgaaatggccgactacatcaatgccaccccttctaccctcctcggctcgcgggaccccgacctcaaggaccgcgctctactcaatggcgggacctccgtcaccgagaagctggctcagttgattgcaacgtgcccccccagtaagtcctccaagacaaagcctaagaagctgggaaccgggaccacagctgggctcgtatcgaaggacttgatccggaaggcaggagtagggtctgtcgctggcatcatccataaagaccttattaagaaacctacaattagtactgccgtaggactggtgacaaaagacccagggaagaagccagtctttaatgccgcagtcgggctggtgaacaaagactctgtcaagaaattgggcactggaacaactgcggtgtttatcaacaaaaacctgggtaaaaaacctggcaccatcaccaccgtgggtctcctttcgaaggattctggcaaaaaacttggtattggcatcgtgccaggattggtacacaaagagtcaggaaagaaactggggctgggcaccgtcgtcggcctggtcaacaaggacctcggaaagaagctcggctcaacggtgggactcgtcgccaaagattgcgcaaaaaaaattgtcgcatcttcagctatgggcctggtgaacaaggatatagggaaaaagctcatgtcctgtccactggccggcctaatttctaaggacgctatcaaccttaaagctgaggccctccttcccactcaggaacccttgaaagcgagctgctctaccaacattaacaatcaagaaagccaggaattatcagaatctcttaaagactcggctactagcaaaacattcgagaagaatgtggtgaggcagaataaagagtctattttagaaaagttttccgtccgcaaggaaattattaacctcgaaaaggaaatgttcaacgaaggaacgtgtatccagcaggattcctttagtagctccgagaaaggctcctacgagacatctaaacatgaaaagcaacccccagtctattgtacaagcccagatttcaaaatgggtggagccagcgacgtttccacagctaagtcgcccttctccgccgtgggcgagagcaatctaccaagcccaagtcccaccgtgagtgtgaaccctttaactcgctctcctccagaaacatctagtcaattggccccaaatccccttctccttagctctaccaccgaattaatcgaagaaatctccgaaagcgtgggcaagaatcagttcacatcagaatcaactcatctgaacgttggccatcgaagcgttggtcattcgatcagcattgagtgtaaggggattgacaaagaggtcaacgactcaaagactacccatattgacattccccgcatcagttcctccctgggtaaaaagccttcgcttaccagcgagagctccatccataccattacaccatctgtcgtgaattttacctccttgttctcaaataagcctttccttaagctgggtgctgtgtccgcttcggacaaacactgtcaggtggccgaaagcttgtctacttccctccagtcaaaaccccttaaaaaacggaaggggaggaaaccgaggtggacaaaggtcgtcgcccgctccacttgcaggagtccaaaaggcctagaactggaacggtcagaactctttaagaacgtttcgtgttccagcctttcaaattccaattccgaaccagcaaagttcatgaaaaacataggacctccaagctttgttgatcatgattttctaaagcgaagactacccaagctctcaaagtcaacagccccctctctagcgttgctagctgatagtgaaaaacctagtcacaaatcgtttgcaacacataagctgtcttccagtatgtgcgtgtcctctgacttgctcagtgacatctacaaacccaaacgcggccggccgaaaagcaaggagatgcctcagctagagggcccaccaaaacggacactgaagattccagcaagtaaagtgtttagcctacaatcaaaagaagagcaggagcctcccatcctgcagcctgagatcgagatcccgtcgtttaagcagggattaagtgttagcccatttccaaagaaacgagggcggcccaagcgccagatgaggagccctgtcaagatgaagccccctgttcttagtgtagcccctttcgtggctaccgaatcccccagtaaactggagagcgaaagcgacaatcatagaagctcttctgattttttcgagtcagaggaccagctgcaagaccctgatgacctggatgacagccatagaccgagcgtttgttcaatgtccgatttagagatggaacccgataaaaaaatcacaaagaggaacaatgggcagctgatgaaaactataatcagaaagattaataagatgaaaactctgaaaaggaaaaagttgctcaatcagattctctctagtagtgtagagagttcaaacaaaggcaaagtgcaatccaaattacacaacaccgtgagttcactggctgccacgttcggctctaagcttggacagcagataaatgtgtccaagaaaggaacgatatacattggcaagcgccgaggtagaaagccgaaaactgttctcaacgggatcctctcaggtagcccgactagcctagccgtgctggagcagaccgcccaacaggccgccggctccgcactcgggcagatcttgcctccgctgctgccaagctctgcctccagctcggagatactcccatctcctatctgtagccagtcaagcgggactagtggtggacaatcccccgttagctctgacgcaggatttgtggagccttccagtgtgccttacctgcatctgcactcacgacagggcagtatgatccagaccttggctatgaagaaagcttccaagggccgccgacggctctccccccctaccttactgcccaactccccaagtcacttgtctgagctgacatctctgaaagaagcaaccccttcgccaatctccgaaagccattccgatgaaaccattccatcagactcaggaattggaaccgacaacaatagcacctccgatagggccgagaaattctgcggccaaaaaaagaggaggcacagctttgagcacgtttcactcattccaccagaaaccagtacggtgcttagctccctgaaagagaaacataagcataaatgcaagcgccgcaatcacgattacctatcctacgataagatgaaacggcagaagaggaagcggaagaagaaataccctcagttacggaacaggcaggatccagacttcatcgcggagcttgaagaactgatctctcggttgagtgagatacgaataacgcatcgatcccaccactttatacctagggatcttttaccaacaatttttcgtatcaatttcaattccttttacacacaccccagcttcccgttagatccccttcattacattcgaaagcccgacttgaaaaagaaacggggtaggccacccaagatgagagaagcgatggcggaaatgcccttcatgcactctctgagcttccctctatcctcaacaggcttctacccgtcatacggcatgccgtatagtccttctcccctcaccgccgctccaattggcttgggttactatgggcgctatccaccgactctatatcctccaccgcccagccccagcttcacgacccccctacctcctcctagctacatgcatgcaggacacctactattaaaccctgccaagtatcataaaaagaagcacaagttacttcggcaggaagcatttctcacaacctcccggacccctctgctaagtatgtcaacctaccctagcgtgccccctgaaatggcatatggctggatggtggagcataagcacaggcatagacacaagcaccgtgagcatcgctcctccgagcaaccccaggtgtctatggacacagggtcttcgagatccgttcttgaatccctaaaacggtatcgctttggcaaggacgcagtcggagagagatacaaacataaggagaagcatagatgccacatgtcctgtccccatctgtccccctctaaatctcttataaatagagaagagcagtgggtacatagagagccctccgagtctagccccctcgccctcggtctgcagaccccactacagatcgactgctctgaatcgtccccctctctcagcctcggcggtttcacgccgaactctgaaccagcctcttcagacgaacatactaacttatttacttccgccattggttcgtgtcgagtgtctaacccaaacagttctggcaggaaaaaactgaccgacagtccaggcctcttttcagcgcaagatacgtctctcaaccggctgcacaggaaagagagcctcccctccaacgaaagggccgttcagactcttgccggcagtcaacccactagtgataaaccatcccagaggcccagcgaaagtacaaactgctccccaacgcgcaagcggtcatcaagtgagagcacctcctctactgttaatggcgtgcctagccgctcccctcggctggtcgcctccggcgatgacagcgtcgattccctgcttcagagaatggtgcagaatgaggatcaagaacccatggagaagagcatcgacgccgtaatcgccacagcatctgctcctccctcaagtagccctggcaggtctcactcaaaagaccggacccttggaaaaccagacagcttactggtacccgccgtcacctctgatagctgcaacaattctattagcttactatctgaaaagctgaccagttcctgtagtccacaccatatcaaaaggtccgttgtggaggcaatgcagagacaggcccgaaaaatgtgtaactacgataagattctggccaccaaaaaaaacttagaccatgtgaataagatcctgaaagctaagaaactgcagcggcaggccaggacgggtaataacttcgtgaaaaggagaccaggtcggccgaggaagtgccctctgcaagccgtggtgtccatgcaggcattccaagcagcgcaattcgttaatcccgagttgaaccgagatgaagagggggctgcccttcacttgtccccagatactgtgaccgacgttattgaagcagtagtccaaagtgtgaatctgaatccagagcataagaagggtcttaagcggaaaggctggcttctcgaggagcagacccgaaaaaaacagaaacccctgcccgaggaggaggaacaggaaaacaacaagtcctttaatgaagcgcctgtggagatcccttctccatctgagacaccagctaagccctctgagccagagagcacacttcaacccgtgctgtctctgattccccgcgaaaaaaagcctccaagacctcctaagaagaaataccagaaagcggggctctactccgacgtatacaagacaacggatccaaagtctaggctcatccagctgaaaaaggaaaagctcgaatatacgccgggagaacacgaatacggcctgttcccggcacctatccatgtgggcaagtatcttcgccagaaaaggatcgatttccagctgccgtatgatatcctgtggcaatggaagcacaatcagctctacaagaaacctgatgtccccctctataaaaaaatccgctcaaatgtttatgtggatgtgaagcccctttcaggctacgaggctactacctgtaactgtaaaaagccggatgacgacacacgtaaaggctgtgtggacgattgcttaaatcggatgatttttgccgaatgctcacccaacacctgtccatgcggagagcagtgctgtaaccagcggatacagagacacgagtgggtgcagtgtctggagcgttttagggccgaagagaagggctggggaataaggacaaaggagccactgaaggcagggcaatttatcatagaatacttaggtgaggtggtgagtgagcaggaattcagaaaccgaatgatcgagcagtatcacaaccattctgaccattactgcttgaacctggattccgggatggtgattgatagttatcgaatgggcaatgaagccagattcatcaatcacagttgcgaccccaactgtgagatgcaaaagtggagcgtcaatggggtgtacaggataggtctgtacgcacttaaggatatgcccgcgggaacagaactcacctacgactacaatttccactcttttaatgtggaaaagcaacaactgtgtaaatgtggattcgagaaatgccgtgggatcatcggaggaaaaagccagagagtgaacggactgacatcgagtaaaaactcacagcccatggcgacccacaaaaagtctggtcgttccaaggaaaagcgtaagagcaaacataagttgaagaaaaggcgcgggcatctaagtgaagagccgagcgagaacattaataccccgacgcgacttacacctcagctgcaaatgaagccaatgtccaaccgggagagaaatttcgtgctcaagcaccatgtgtttctcgtcaggaactgggaaaaaatacgtcagaaacaggaggaggtcaagcatacctctgacaatatccactcagcgtccctgtatactcggtggaatggaatttgtagggacgatggtaacattaaatcagatgtctttatgacccagttttcagctctccaaaccgcccgtagtgtccggacaaggagactcgcagctgccgaagagaatattgaagtggcaagagccgctcgactggctcaaatatttaaagagatatgtgacggcattatcagttacaaggattcaagtcgccaggctctcgccgcccccctcttaaacctcccacctaagaaaaaaaatgcagattactatgagaagatatccgatcccttagatctgataaccattgagaagcagatcctgaccggttactacaagacggttgaagctttcgatgccgatatgctaaaggtgtttcggaacgcagagaagtactacgggagaaaatctcccgtgggacgtgacgtgtgccggctgaggaaagcctattacaatgctcgccatgaggcctcagcacagatcgatgagatcgtcggtgagacagcttcggaggctgactcatctgaaacctccgtgtctgagaaggaaaacggacatgagaaggacgacgatgtgatcaggtgcatatgtggcttgtacaaagacgagggtcttatgattcagtgtgacaagtgcatggtctggcagcactgcgactgtatgggcgtgaattctgacgtggaacactatttgtgcgaacagtgcgaccccagacccgtcgatagggaggtgcctatgatccctcgccctcactatgcccaaccaggttgtgtctacttcatatgtctactgcgggacgacctgctgctgcgacagggagactgcgtgtaccttatgagagatagccgccgcacacctgatggccaccctgtgagacagtcctacaggctgctgtcccacatcaacagggacaaacttgacatctttcggatcgaaaaactttggaaaaatgaaaaagaggaaaggtttgccttcggccaccattatttccgcccccacgagacccatcactccccatctagacgcttctaccacaatgagctcttcagagtgcctctgtatgaaattatccccttggaggctgttgtgggtacatgttgcgtcctcgacctctatacatactgtaaagggcggcccaaaggcgttaaagagcaggatgtctacatttgcgactaccgtcttgacaaaagcgcccacttgttttataagattcatagaaatcggtatccagtatgtacaaagccttatgccttcgaccactttccaaaaaaactgacacctaagaaagacttttcccctcactacgtccctgacaattacaagcgtaacgggggaagatcatcatggaagagcgagcgaagcaagccccccttaaaagacctggggcaggaggacgatgccctgcccttgatcgaggaggttctggctagccaagagcaggcggcgaacgaaattccgtcattagaggagcccgagagagagggcgcgactgccaatgtgtcggagggggaaaaaaaaactgaggagtcttcacaggaacctcagtctacttgtaccccggaggagagacggcacaatcagagggagcggctcaatcagatcctgctgaacttattagagaaaatccctgggaagaacgcaattgatgtgacttatctgctggaagaggggtcgggcagaaagcttagaaggcgtaccctgttcattccggagaatagttttaggaaatag

SEQ ID NO: 286058 - DNA, 11942 bp, Artificial Sequence
  derived and/or modified sequence
cgcgtacgggctggctggcgcgcggggcggccgaaggtggtggttggtgggagcagccagcgacgagcccgtagacactcgtacgcgtgcgggcgggcgtgcgcgctacgcggacggagtcgggcggagcgggggacggtgggaaagaacgcaaggaggaaggagtggaaggttgaggggggcgctaggcgcccttcgctccctccctctggaggagctgccgccgccaccgccgccactctgctgctgccgccgccgccgccgccgctcccgccgccattttgggttcgctttgcggaggggagacgatcccagtctcggttgcgggacccgcctcccctcagtttgccccctttagccttccacctttcccttctcctctctcgcatttccgccagtcagcttacccgctggccgcctcctgacaagcgggagggatccgccgtggacccagggaagcggaggagcctggcggccaccccctcttccccacttccctgcactctcatcgctctcggcctcggcctcggcctccgacacgagaaagatgctggtttcgagttttggagatccttgttttttatggaacacagttctgtaaaattttcataagattccttggcaataacatacgcttgtgatggaccctagaaatactgctatgttaggattgggttctgattccgaaggtttttcaagaaagagtccttctgccatcagtactggcacattggtcagtaagagagaagtagagctagaaaaaaacacaaaggaggaagaggaccttcgcaaacggaatcgagaaagaaacatcgaagctgggaaagatgatggtttgactgatgcacagcaacagttttcagtgaaagaaacaaacttttcagagggaaatttaaaattgaaaattggcctccaggctaagagaactaaaaaacctccaaagaacttggagaactatgtatgtcgacctgccataaaaacaactattaagcacccaaggaaagcacttaaaagtggaaagatgacggatgaaaagaatgaacactgtccttcaaaacgagacccttcaaagttgtacaagaaagcagatgatgttgcagccattgaatgccagtctgaagaagtcatccgtcttcattcacagggagaaaacaatcctttgtctaagaagctgtctccagtacactcagaaatggcagattatattaatgcaacgccatctactcttcttggtagccgggatcctgatttaaaggacagagcattacttaatggaggaactagtgtaacagaaaagttggcacagctgattgctacctgtcctccttccaagtcttccaagacaaaaccgaagaagttaggaactggcactacagcaggattggttagcaaggatttgatcaggaaagcaggtgttggctctgtagctggaataatacataaggacttaataaaaaagccaaccatcagcacagcagttggattggtaactaaagatcctgggaaaaagccagtgtttaatgcagcagtaggattggtcaataaggactctgtgaaaaaactgggaactggcactacagcggtattcattaataaaaacttaggcaaaaagccaggaactatcactacagtaggactgctaagcaaagattcaggaaagaagctaggaattggtattgttccaggtttagtgcataaagagtctggcaagaagttaggacttggcactgtggttggactggttaataaagatttgggaaagaaattgggttctactgttggcctagtggccaaggactgtgcaaagaagattgtagcaagttcagcaatgggattggttaataaggacattggaaagaaactaatgagttgtcctttggcaggtctgatcagtaaagatgccataaaccttaaagccgaagcactgctccccactcaggaaccgcttaaggcttcttgtagtacaaacatcaataatcaggaaagtcaggaactttctgaatccctgaaagatagtgccaccagcaaaacttttgaaaagaatgttgtacggcagaataaagaaagcatattggaaaagttctcagtacgaaaagaaatcattaatttggagaaagaaatgtttaatgaaggaacatgcattcagcaagacagtttctcatccagtgaaaagggatcttatgaaacctcaaagcatgaaaagcagcctcctgtatattgcacttctccggactttaaaatgggaggtgcttctgatgtatctaccgctaaatccccattcagtgcagtaggagaaagcaatctcccttccccatcacctactgtatctgttaatcctttaaccagaagtccccctgaaacttcttcacagttggctcctaatccattacttttaagttctactacagaactaatcgaagaaatttctgaatctgttggaaagaaccagtttacttctgaaagtacccacttgaacgttggtcataggtcagttggtcatagtataagtattgaatgtaaagggattgataaagaggtaaatgattcaaaaactacccatatagatattccaagaataagctcttcccttggaaaaaagccaagtttgacttctgaatccagcattcatactattactccttcagttgttaacttcactagtttatttagtaataagccttttttaaaactgggtgcagtatctgcatcagacaaacactgccaagttgctgaaagcctaagtactagtttgcagtccaaaccattaaaaaaaagaaaaggaagaaaacctcggtggactaaagtggtggcaagaagcacatgccggtctccaaaagggctagaattagaaagatcagagctttttaaaaacgtttcatgtagctcactatcaaatagtaattctgagccagccaagtttatgaaaaacattggacccccttcatttgtagatcatgacttccttaaacgccgattgccaaagttgagcaaatccacagctccatctcttgctctcttagctgatagtgaaaaaccatctcataagtcttttgctactcacaaactatcctccagtatgtgtgtctctagtgaccttttgtctgatatttataagcccaaaagaggaaggcctaaatctaaggagatgcctcaactggaagggccacctaaaaggactttaaaaatccctgcttctaaagtgttttctttacagtctaaggaagaacaagaacccccaattttacagccagaaattgaaatcccttccttcaaacaaggtctgtctgtgtctccttttccaaaaaagagaggcaggcctaagaggcaaatgaggtcaccagtcaagatgaagccacctgtactgtcagtggctccatttgttgccactgaaagtccaagcaagctagaatctgaaagtgacaaccatagaagtagcagtgatttctttgagagcgaggatcaacttcaggatccagatgacctagatgacagtcataggccaagtgtctgtagtatgagtgaccttgagatggaaccagataaaaaaattaccaagagaaacaatggacaattaatgaaaacaattatccgcaaaataaataaaatgaagactttaaagagaaagaaactgttgaatcagattctttcaagttctgtagaatcaagtaataaagggaaagtgcaatccaaactccataatacggtatcaagtcttgctgccacatttggctctaaattgggccaacagataaatgtcagcaagaaaggaaccatttatataggaaagagaagaggtcgcaaaccaaaaactgtcttaaatggtattctttctggtagtcctactagccttgctgttcttgagcaaacagctcaacaggcagctgggtcagcattaggacagattcttcccccattactgccttcatctgctagtagttctgagattcttccatcacctatttgctctcagtcttctgggactagtggaggtcagagccctgtaagtagtgatgcaggttttgttgaacccagttcagtgccatatttgcatttacactccagacagggcagtatgattcagactcttgcaatgaagaaggcctcaaaggggaggaggcggttatctcctcctactttgttgccaaattctccttcgcacttgagtgaactcacatctctaaaagaagctactccttccccaatcagtgagtctcatagtgatgagaccattcccagtgatagtggaattggaacagataataacagcacatcagacagggcagagaaattttgtgggcaaaaaaagaggaggcattcttttgagcatgtttctctgattccccctgaaacctctacagtgctaagcagtcttaaagaaaaacataaacacaaatgtaagcgcaggaatcatgattacctcagctatgacaagatgaaaaggcagaaacgaaaacggaaaaagaaatatccccagcttcgaaatagacaggatccagactttattgcagagctggaggaactaataagtcgcctaagtgaaattcggatcactcatcgaagtcatcattttatcccccgagatcttctgccaactatctttcgaatcaactttaatagtttctatacacatccttctttccccttagaccctttgcactacattcgaaaacctgacttaaaaaagaaaagagggagaccccctaagatgagggaggcaatggctgaaatgccttttatgcacagccttagttttcctctttctagtactggattctatccatcttatggtatgccttactctccttcaccccttacagctgctcccataggattaggttactatggaaggtatcctcccactctttatccacctcctccatctccttctttcaccacgccacttccacctccttcctatatgcatgctggtcatttacttctcaatcctgccaaataccataagaaaaagcataagctacttcgacaggaggcctttcttacaaccagcaggactcccctcctttccatgagtacctaccccagtgttcctcctgagatggcctatggttggatggttgagcacaaacacaggcaccgtcacaaacacagagaacaccgttcttctgaacaaccccaggtttctatggacactggctcttcccgatctgtcctggaatctttgaagcgctatagatttggaaaggatgctgttggagagcgatataagcataaggaaaagcaccgttgtcacatgtcctgccctcatctctctccttcaaaaagcttaataaacagagaggaacagtgggtccaccgagagccttcagaatctagtccattggccttgggattgcagacacctttacagattgactgttcagaaagttctccaagcttatcccttggaggattcactcccaactctgagccagccagcagtgatgaacatacaaaccttttcacaagtgcaataggcagctgcagagtttcaaaccctaactccagtggccggaagaaattaactgacagccctggactcttttctgcacaggacacttcactaaatcggcttcacagaaaggagtcactgccttctaacgaaagggcagtacagactttggcaggctcccagccaacctctgataaaccctcccagcggccatcagagagcacaaattgtagccctacccggaaaaggtcttcatctgagagtacttcttcaacagtaaacggagttccctctcgaagtccaagattagttgcttctggggatgactctgtggatagtctgctgcagcggatggtacaaaatgaggaccaagagcccatggagaaaagtattgatgctgtgattgcaactgcctctgcaccaccttcttccagtccaggccgtagccacagcaaggaccgaaccctgggaaaaccagacagccttttagtgcctgcagtcacaagtgactcttgcaataatagcatctcactcctatctgaaaagttgacaagcagctgttccccccatcatatcaagagaagtgtagtggaagctatgcaacgccaagctcggaaaatgtgcaattacgacaaaatcttggccacaaagaaaaacctagaccatgtcaataaaatcttaaaagccaaaaaacttcaaaggcaggccaggacagggaataactttgtgaaacgtaggccaggtcgacctcggaaatgtccccttcaggctgtcgtatcaatgcaagcattccaggctgctcagtttgtcaacccagaattgaacagagacgaggaaggagcagcactgcacctcagtcctgacacagttacagatgtaattgaggctgttgttcagagtgtaaatctgaacccagaacataaaaaggggttgaagagaaaaggttggctattggaagaacagaccagaaaaaagcagaagccattaccagaggaagaagagcaagagaataataaaagctttaatgaagcaccagttgagattcccagtccttctgaaaccccagctaaaccttctgaacctgaaagtaccttgcagcctgtgctttctctcatcccaagggaaaagaagcccccacgtcccccaaagaagaagtatcagaaagcagggctgtattctgacgtttacaaaactacagacccaaagagtcgattgatccaattaaagaaagagaagctggagtatactccaggagagcatgaatatggattatttccagcgcccattcatgttgtgttttttgtttcaggaaagtatctaagacaaaagagaattgacttccagcttccttatgatatcctttggcagtggaaacacaatcagctatacaaaaagccagatgtcccactatataagaaaattcgttcaaatgtctacgttgatgtcaaacccctttctggttacgaagctaccacctgtaactgtaagaagccagatgatgacaccaggaagggctgtgttgatgactgcctcaatagaatgatctttgctgagtgttcccccaacacttgcccatgtggcgagcaatgctgtaaccagaggatacagaggcatgaatgggtgcaatgtctagaacgatttcgagctgaggaaaaaggttggggaatcagaaccaaagagcccctaaaagctgggcagttcatcattgaatacctaggggaggtcgtcagtgaacaggagttcaggaacaggatgattgagcagtatcataatcacagtgaccactactgcctgaacctggatagtgggatggtgattgacagttaccgcatgggaaatgaggcccgattcatcaaccatagctgtgacccaaattgtgaaatgcagaaatggtctgttaatggagtataccggattggactctatgctcttaaagacatgccagctgggactgaactcacttatgattataactttcattccttcaatgtggaaaaacagcaactttgtaagtgtggctttgagaaatgtcgaggaatcatcggaggcaagagtcagcgtgtgaatggactcaccagcagcaaaaacagccagcccatggccacacacaaaaaatctggacggtcaaaagagaagagaaagtctaagcacaagctgaagaaaaggagaggccatctctctgaggaacccagtgaaaatatcaacaccccaactagattgaccccccaattacagatgaagccaatgtccaatcgtgaaaggaactttgtgttaaagcatcatgtattcttggtccgaaactgggagaagattcgtcaaaaacaggaggaagtaaagcacaccagtgataatattcactcagcatcattatatacccgttggaatgggatctgccgagatgatgggaatatcaagtctgatgtcttcatgacccagttctctgccctgcagacagctcgatctgttcgaacaagacggttggcagctgcagaggaaaatattgaagtggctcgggcagcccgcctagcccagatcttcaaagaaatttgtgatggtatcatctcttataaagattcttcccggcaagcactggcagctccacttttgaaccttcccccaaagaaaaagaatgctgattattatgagaagatctctgatcccctagatcttatcaccatagagaagcagatcctcactggttactataagacagtggaagcttttgatgctgacatgctcaaagtctttcggaatgctgagaagtactatgggcgtaaatccccagttgggagagatgtttgtcgtctacgaaaggcctattacaatgcccggcatgaggcatcagcccagattgatgagattgtgggagagacagcaagtgaggcagacagcagtgagacctcagtctctgaaaaggagaatgggcatgagaaggacgacgatgttattcgctgtatctgtggcctctacaaggatgaaggtctcatgatccagtgtgacaagtgcatggtatggcagcactgtgattgtatgggagtgaactcagatgtggagcactacctttgtgagcagtgtgacccaaggcctgtggacagggaggttcccatgatccctcggccccactatgcccaacctggctgtgtctacttcatctgtttgctccgagatgacttgctgcttcgtcagggtgactgtgtgtatctgatgagggatagtcggcgcacccctgatggccacccggtccgtcagtcctatcgactgttatctcacattaaccgagataaacttgacatctttcgcattgagaagctttggaagaatgaaaaagaggaacggtttgcctttggtcaccattatttccgtccccacgaaacacaccactctccatcccgtcggttctatcataatgaactatttcgggtgccactctatgagatcattcccttggaggctgtagtggggacctgctgtgtgttggacctttatacgtattgtaaagggagacccaaaggagtaaaggagcaagatgtgtacatctgtgattatcggcttgacaagtcagcacacctgttttacaagatccaccggaaccgctatcctgtctgcaccaaaccctatgcttttgatcacttccccaagaagctcactcccaaaaaagatttctcgcctcattacgtcccagacaactacaagaggaatggaggacgatcatcctggaagtctgagcgctcaaagccacccctaaaagacttgggccaggaggatgatgctctacccttgattgaagaggttctagccagtcaagagcaagcagccaatgagatacccagcctggaggagccagaacgggaaggggccactgctaacgtcagtgagggtgaaaaaaaaacagaggaaagtagtcaagaaccccagtcaacctgtacccctgaggaacgacggcataaccaacgggaacgactcaaccagatcttgctcaatctccttgaaaaaatccctggaaaaaatgccattgatgtgacctacttgctggaggaaggatcaggcaggaaactgcgaaggcgtactttgtttatcccagaaaacagctttcgaaagtgaccctcaaagaatgagaacctcaagcatctgggatccagtggagctaatcagtcctgcctcctgctctctgggtatagacaggggtgggaagggtccatctgggcaaggggaatggggccatgttgttgacattaggtacttaataagccttggagctagtggagagggagaggaaagggttctgtccaagacagttcaggttaattaattttcttctccattgcttcaccttaagggttaataatgtagagaggagggaggaccacattgatgaccagaacctactggtactttatagcatttgccccaccccacagcttaggtttttctgtcatcctcagatcccacaggcattgcgaagaagctgcttcctatacccaggtataactcaaaatccaaagggatagggccaggatccctattcctaccccatctattctctgttggctccaagagctaccccagagaccttaaacagaaacagtagctgaggcttcttcctagatacctgactagggaagtttgtctctcctttcttgcccaaccaggtcaaagtaaaatgtgagttgacagctcaaagcacttgtaactgctgccccctccctacctctactccccaaaatggaatcatgggatagggaaggcccccatggggtcagaagggcacggtagttcttgcaattatttttgttttacccttcataacctgtcaaacatatttttttctaatgagaaagccaggcccccgccagcacacatgctgtttttaatgcgctgtagttcttgtgtgtctgctgtgctgtgcaaatggagattcagttcaaaataaaatcatttaaaaacctacataaaaagaactctaaacccacccctgcaacaaaagtcactacataaactgttcagcagtattcacctatcagagtatttgttgtgagtatagattatcaattgaaaacactactcttgttttcttaattgtacagttttcaatgtccctttcttaaagagacagtatatttctcttcacccctagcccatcttccctcaccctcctgaatgacatcaggaggtatatccagggtgtctccttccttcctactctcttgaccagaagttaacagactatactgtctctttaaaaataaaatttaaaaagctttgttgtcttttcagacatacatatgcatatatgttttagatgttcttataagagaaaagatggtttttaaatgtgccaagttgtgtgtgtgtgtgtatatatatgtgtgtatgtgtgtgtatatatatatgtgtgtgtgtatatatatacacacacacacacacacctgctgtgtgattggtaagcaatacaatagtaaacatgtccccattacttttttctaatattggaccaatgctgtcctaattgtacatttccccttatggtgacgatgctctgactcgtttaggtagacacattgaccaccttccattccattaaatattttttcctttttcccctttctgtgtcattcttgaggaaaaaacaaaagagagaggggatgccaatgatccccttgagcagagaaaaagcaaaataaatattttattaaagaaaaaagagaattaagaaaatagtttggagtattttcttactgtagagaagcactgtacattactaagagacctgggtataagatactcacatgtggagctggaaaaatcgcatgtccaagcccgtttgagtggtttcttttgtttttcattgcagggagtgggtgggagggaggtgggactaggggcactttgggggtctccttttagtcaaaagcgagaaaatgacaagaaagagattaaaattcaatgtttcctttatagtgttaaacactaaaattttaaaaaagatgaaaaagaaaaaaaaactttgtaaaatgcgagaacagaagcaaaagacactacgctctgtcattttatctttcttttgttgaaagactaaaaaaaaactgaaatgttttttagacaatcaaatgttaggtaagtgcaaaaacttgttttttcttactggtgtagaaattaatgcctttttttatttttcagttattttataataacgaaataaaaagaaccccccagctgccaggcgggttttggtgtttgaaatgcggggcaaagcactacatcactgcaaatagatacagagttagtctgcatgtctgtaggctgtgtgattgcggaaaatataaatgctgctaatatatttcctttttacaaaagcatatctaaatagatgattgttttgatgttaatctttgtaaattatgtattaccaattttaacattggatgtaattgcatacaaagcttgcatctcaatccttgaaagtctagtattaaatggaaaaaacttttcctaa

SEQ ID NO: 286059 - DNA, 10979 bp, Artificial Sequence
  derived and/or modified sequence
ggagtggaaggttgaggggggcgctaggcgcccttcgctccctccctctggaggagctgccgccgccaccgccgccactctgctgctgccgccgccgccgccgccgctcccgccgccattttgggttcgctttgcggaggggagacgatcccagtctcggttgcgggacccgcctcccctcagtttgccccctttagccttccacctttcccttctcctctctcgcatttccgccagtcagcttacccgctggccgcctcctgacaagcgggagggatccgccgtggacccagggaagcggaggagcctggcggccaccccctcttccccacttccctgcactctcatcgctctcggcctcggcctcggcctccgacacgagaaagatgctggtttcgagttttggagatccttgttttttatggaacacagttctgtaaaattttcataagattccttggcaataacatacgcttgtgatggaccctagaaatactgctatgttaggattgggttctgattccgaaggtttttcaagaaagagtccttctgccatcagtactggcacattggtcagtaagagagaagtagagctagaaaaaaacacaaaggaggaagaggaccttcgcaaacggaatcgagaaagaaacatcgaagctgggaaagatgatggtttgactgatgcacagcaacagttttcagtgaaagaaacaaacttttcagagggaaatttaaaattgaaaattggcctccaggctaagagaactaaaaaacctccaaagaacttggagaactatgtatgtcgacctgccataaaaacaactattaagcacccaaggaaagcacttaaaagtggaaagatgacggatgaaaagaatgaacactgtccttcaaaacgagacccttcaaagttgtacaagaaagcagatgatgttgcagccattgaatgccagtctgaagaagtcatccgtcttcattcacagggagaaaacaatcctttgtctaagaagctgtctccagtacactcagaaatggcagattatattaatgcaacgccatctactcttcttggtagccgggatcctgatttaaaggacagagcattacttaatggaggaactagtgtaacagaaaagttggcacagctgattgctacctgtcctccttccaagtcttccaagacaaaaccgaagaagttaggaactggcactacagcaggattggttagcaaggatttgatcaggaaagcaggtgttggctctgtagctggaataatacataaggacttaataaaaaagccaaccatcagcacagcagttggattggtaactaaagatcctgggaaaaagccagtgtttaatgcagcagtaggattggtcaataaggactctgtgaaaaaactgggaactggcactacagcggtattcattaataaaaacttaggcaaaaagccaggaactatcactacagtaggactgctaagcaaagattcaggaaagaagctaggaattggtattgttccaggtttagtgcataaagagtctggcaagaagttaggacttggcactgtggttggactggttaataaagatttgggaaagaaattgggttctactgttggcctagtggccaaggactgtgcaaagaagattgtagcaagttcagcaatgggattggttaataaggacattggaaagaaactaatgagttgtcctttggcaggtctgatcagtaaagatgccataaaccttaaagccgaagcactgctccccactcaggaaccgcttaaggcttcttgtagtacaaacatcaataatcaggaaagtcaggaactttctgaatccctgaaagatagtgccaccagcaaaacttttgaaaagaatgttgtacggcagaataaagaaagcatattggaaaagttctcagtacgaaaagaaatcattaatttggagaaagaaatgtttaatgaaggaacatgcattcagcaagacagtttctcatccagtgaaaagggatcttatgaaacctcaaagcatgaaaagcagcctcctgtatattgcacttctccggactttaaaatgggaggtgcttctgatgtatctaccgctaaatccccattcagtgcagtaggagaaagcaatctcccttccccatcacctactgtatctgttaatcctttaaccagaagtccccctgaaacttcttcacagttggctcctaatccattacttttaagttctactacagaactaatcgaagaaatttctgaatctgttggaaagaaccagtttacttctgaaagtacccacttgaacgttggtcataggtcagttggtcatagtataagtattgaatgtaaagggattgataaagaggtaaatgattcaaaaactacccatatagatattccaagaataagctcttcccttggaaaaaagccaagtttgacttctgaatccagcattcatactattactccttcagttgttaacttcactagtttatttagtaataagccttttttaaaactgggtgcagtatctgcatcagacaaacactgccaagttgctgaaagcctaagtactagtttgcagtccaaaccattaaaaaaaagaaaaggaagaaaacctcggtggactaaagtggtggcaagaagcacatgccggtctccaaaagggctagaattagaaagatcagagctttttaaaaacgtttcatgtagctcactatcaaatagtaattctgagccagccaagtttatgaaaaacattggacccccttcatttgtagatcatgacttccttaaacgccgattgccaaagttgagcaaatccacagctccatctcttgctctcttagctgatagtgaaaaaccatctcataagtcttttgctactcacaaactatcctccagtatgtgtgtctctagtgaccttttgtctgatatttataagcccaaaagaggaaggcctaaatctaaggagatgcctcaactggaagggccacctaaaaggactttaaaaatccctgcttctaaagtgttttctttacagtctaaggaagaacaagaacccccaattttacagccagaaattgaaatcccttccttcaaacaaggtctgtctgtgtctccttttccaaaaaagagaggcaggcctaagaggcaaatgaggtcaccagtcaagatgaagccacctgtactgtcagtggctccatttgttgccactgaaagtccaagcaagctagaatctgaaagtgacaaccatagaagtagcagtgatttctttgagagcgaggatcaacttcaggatccagatgacctagatgacagtcataggccaagtgtctgtagtatgagtgaccttgagatggaaccagataaaaaaattaccaagagaaacaatggacaattaatgaaaacaattatccgcaaaataaataaaatgaagactttaaagagaaagaaactgttgaatcagattctttcaagttctgtagaatcaagtaataaagggaaagtgcaatccaaactccataatacggtatcaagtcttgctgccacatttggctctaaattgggccaacagataaatgtcagcaagaaaggaaccatttatataggaaagagaagaggtcgcaaaccaaaaactgtcttaaatggtattctttctggtagtcctactagccttgctgttcttgagcaaacagctcaacaggcagctgggtcagcattaggacagattcttcccccattactgccttcatctgctagtagttctgagattcttccatcacctatttgctctcagtcttctgggactagtggaggtcagagccctgtaagtagtgatgcaggttttgttgaacccagttcagtgccatatttgcatttacactccagacagggcagtatgattcagactcttgcaatgaagaaggcctcaaaggggaggaggcggttatctcctcctactttgttgccaaattctccttcgcacttgagtgaactcacatctctaaaagaagctactccttccccaatcagtgagtctcatagtgatgagaccattcccagtgatagtggaattggaacagataataacagcacatcagacagggcagagaaattttgtgggcaaaaaaagaggaggcattcttttgagcatgtttctctgattccccctgaaacctctacagtgctaagcagtcttaaagaaaaacataaacacaaatgtaagcgcaggaatcatgattacctcagctatgacaagatgaaaaggcagaaacgaaaacggaaaaagaaatatccccagcttcgaaatagacaggatccagactttattgcagagctggaggaactaataagtcgcctaagtgaaattcggatcactcatcgaagtcatcattttatcccccgagatcttctgccaactatctttcgaatcaactttaatagtttctatacacatccttctttccccttagaccctttgcactacattcgaaaacctgacttaaaaaagaaaagagggagaccccctaagatgagggaggcaatggctgaaatgccttttatgcacagccttagttttcctctttctagtactggattctatccatcttatggtatgccttactctccttcaccccttacagctgctcccataggattaggttactatggaaggtatcctcccactctttatccacctcctccatctccttctttcaccacgccacttccacctccttcctatatgcatgctggtcatttacttctcaatcctgccaaataccataagaaaaagcataagctacttcgacaggaggcctttcttacaaccagcaggactcccctcctttccatgagtacctaccccagtgttcctcctgagatggcctatggttggatggttgagcacaaacacaggcaccgtcacaaacacagagaacaccgttcttctgaacaaccccaggtttctatggacactggctcttcccgatctgtcctggaatctttgaagcgctatagatttggaaaggatgctgttggagagcgatataagcataaggaaaagcaccgttgtcacatgtcctgccctcatctctctccttcaaaaagcttaataaacagagaggaacagtgggtccaccgagagccttcagaatctagtccattggccttgggattgcagacacctttacagattgactgttcagaaagttctccaagcttatcccttggaggattcactcccaactctgagccagccagcagtgatgaacatacaaaccttttcacaagtgcaataggcagctgcagagtttcaaaccctaactccagtggccggaagaaattaactgacagccctggactcttttctgcacaggacacttcactaaatcggcttcacagaaaggagtcactgccttctaacgaaagggcagtacagactttggcaggctcccagccaacctctgataaaccctcccagcggccatcagagagcacaaattgtagccctacccggaaaaggtcttcatctgagagtacttcttcaacagtaaacggagttccctctcgaagtccaagattagttgcttctggggatgactctgtggatagtctgctgcagcggatggtacaaaatgaggaccaagagcccatggagaaaagtattgatgctgtgattgcaactgcctctgcaccaccttcttccagtccaggccgtagccacagcaaggaccgaaccctgggaaaaccagacagccttttagtgcctgcagtcacaagtgactcttgcaataatagcatctcactcctatctgaaaagttgacaagcagctgttccccccatcatatcaagagaagtgtagtggaagctatgcaacgccaagctcggaaaatgtgcaattacgacaaaatcttggccacaaagaaaaacctagaccatgtcaataaaatcttaaaagccaaaaaacttcaaaggcaggccaggacagggaataactttgtgaaacgtaggccaggtcgacctcggaaatgtccccttcaggctgtcgtatcaatgcaagcattccaggctgctcagtttgtcaacccagaattgaacagagacgaggaaggagcagcactgcacctcagtcctgacacagttacagatgtaattgaggctgttgttcagagtgtaaatctgaacccagaacataaaaaggggttgaagagaaaaggttggctattggaagaacagaccagaaaaaagcagaagccattaccagaggaagaagagcaagagaataataaaagctttaatgaagcaccagttgagattcccagtccttctgaaaccccagctaaaccttctgaacctgaaagtaccttgcagcctgtgctttctctcatcccaagggaaaagaagcccccacgtcccccaaagaagaagtatcagaaagcagggctgtattctgacgtttacaaaactacagacccaaagagtcgattgatccaattaaagaaagagaagctggagtatactccaggagagcatgaatatggattatttccagcgcccattcatgttggaaagtatctaagacaaaagagaattgacttccagcttccttatgatatcctttggcagtggaaacacaatcagctatacaaaaagccagatgtcccactatataagaaaattcgttcaaatgtctacgttgatgtcaaacccctttctggttacgaagctaccacctgtaactgtaagaagccagatgatgacaccaggaagggctgtgttgatgactgcctcaatagaatgatctttgctgagtgttcccccaacacttgcccatgtggcgagcaatgctgtaaccagaggatacagaggcatgaatgggtgcaatgtctagaacgatttcgagctgaggaaaaaggttggggaatcagaaccaaagagcccctaaaagctgggcagttcatcattgaatacctaggggaggtcgtcagtgaacaggagttcaggaacaggatgattgagcagtatcataatcacagtgaccactactgcctgaacctggatagtgggatggtgattgacagttaccgcatgggaaatgaggcccgattcatcaaccatagctgtgacccaaattgtgaaatgcagaaatggtctgttaatggagtataccggattggactctatgctcttaaagacatgccagctgggactgaactcacttatgattataactttcattccttcaatgtggaaaaacagcaactttgtaagtgtggctttgagaaatgtcgaggaatcatcggaggcaagagtcagcgtgtgaatggactcaccagcagcaaaaacagccagcccatggccacacacaaaaaatctggacggtcaaaagagaagagaaagtctaagcacaagctgaagaaaaggagaggccatctctctgaggaacccagtgaaaatatcaacaccccaactagattgaccccccaattacagatgaagccaatgtccaatcgtgaaaggaactttgtgttaaagcatcatgtattcttggtccgaaactgggagaagattcgtcaaaaacaggaggaagtaaagcacaccagtgataatattcactcagcatcattatatacccgttggaatgggatctgccgagatgatgggaatatcaagtctgatgtcttcatgacccagttctctgccctgcagacagctcgatctgttcgaacaagacggttggcagctgcagaggaaaatattgaagtggctcgggcagcccgcctagcccagatcttcaaagaaatttgtgatggtatcatctcttataaagattcttcccggcaagcactggcagctccacttttgaaccttcccccaaagaaaaagaatgctgattattatgagaagatctctgatcccctagatcttatcaccatagagaagcagatcctcactggttactataagacagtggaagcttttgatgctgacatgctcaaagtctttcggaatgctgagaagtactatgggcgtaaatccccagttgggagagatgtttgtcgtctacgaaaggcctattacaatgcccggcatgaggcatcagcccagattgatgagattgtgggagagacagcaagtgaggcagacagcagtgagacctcagtctctgaaaaggagaatgggcatgagaaggacgacgatgttattcgctgtatctgtggcctctacaaggatgaaggtctcatgatccagtgtgacaagtgcatggtatggcagcactgtgattgtatgggagtgaactcagatgtggagcactacctttgtgagcagtgtgacccaaggcctgtggacagggaggttcccatgatccctcggccccactatgcccaacctggctgtgtctacttcatctgtttgctccgagatgacttgctgcttcgtcagggtgactgtgtgtatctgatgagggatagtcggcgcacccctgatggccacccggtccgtcagtcctatcgactgttatctcacattaaccgagataaacttgacatctttcgcattgagaagctttggaagaatgaaaaagaggaacggtttgcctttggtcaccattatttccgtccccacgaaacacaccactctccatcccgtcggttctatcataatgaactatttcgggtgccactctatgagatcattcccttggaggctgtagtggggacctgctgtgtgttggacctttatacgtattgtaaagggagacccaaaggagtaaaggagcaagatgtgtacatctgtgattatcggcttgacaagtcagcacacctgttttacaagatccaccggaaccgctatcctgtctgcaccaaaccctatgcttttgatcacttccccaagaagctcactcccaaaaaagatttctcgcctcattacgtcccagacaactacaagaggaatggaggacgatcatcctggaagtctgagcgctcaaagccacccctaaaagacttgggccaggaggatgatgctctacccttgattgaagaggttctagccagtcaagagcaagcagccaatgagatacccagcctggaggagccagaacgggaaggggccactgctaacgtcagtgagggtgaaaaaaaaacagaggaaagtagtcaagaaccccagtcaacctgtacccctgaggaacgacggcataaccaacgggaacgactcaaccagatcttgctcaatctccttgaaaaaatccctggaaaaaatgccattgatgtgacctacttgctggaggaaggatcaggcaggaaactgcgaaggcgtactttgtttatcccagaaaacagctttcgaaagtgaccctcaaagaatgagaacctcaagcatctgggatccagtggagctaatcagtcctgcctcctgctctctgggtatagacaggggtgggaagggtccatctgggcaaggggaatggggccatgttgttgacattaggtacttaataagccttggagctagtggagagggagaggaaagggttctgtccaagacagttcaggttaattaattttcttctccattgcttcaccttaagggttaataatgtagagaggagggaggaccacattgatgaccagaacctactggtactttatagcatttgccccaccccacagcttaggtttttctgtcatcctcagatcccacaggcattgcgaagaagctgcttcctatacccaggtataactcaaaatccaaagggatagggccaggatccctattcctaccccatctattctctgttggctccaagagctaccccagagaccttaaacagaaacagtagctgaggcttcttcctagatacctgactagggaagtttgtctctcctttcttgcccaaccaggtcaaagtaaaatgtgagttgacagctcaaagcacttgtaactgctgccccctccctacctctactccccaaaatggaatcatgggatagggaaggcccccatggggtcagaagggcacggtagttcttgcaattatttttgttttacccttcataacctgtcaaacatatttttttctaatgagaaagccaggcccccgccagcacacatgctgtttttaatgcgctgtagttcttgtgtgtctgctgtgctgtgcaaatggagattcagttcaaaataaaatcatttaaaaacctacataaaaagaactctaaacccacccctgcaacaaaagtcactacataaactgttcagcagtattcacctatcagagtatttgttgtgagtatagattatcaattgaaaacactactcttgttttcttaattgtacagttttcaatgtccctttcttaaagagacagtatatttctcttcacccctagcccatcttccctcaccctcctgaatgacatcaggaggtatatccagggtgtctccttccttcctactctcttgaccagaagttaacagactatactgtctctttaaaaataaaatttaaaaagctttgttgtcttttcagacatacatatgcatatatgttttagatgttcttataagagaaaagatggtttttaaatgtgccaagttgtgtgtgtgtgtgtatatatatgtgtgtatgtgtgtgtatatatatatgtgtgtgtgtatatatatacacacacacacacacacctgctgtgtgattggtaagcaatacaatagtaaacatgtccccattacttttttctaatattggaccaatgctgtcctaattgtacatttccccttatggtgacgatgctctgactcgtttaggtagacacattgaccaccttccattccattaaatattttttcctttttcccctttctgtgtcattcttgaggaaaaaacaaaagagagaggggatgccaatgatccccttgagcagagaaaaagcaaaataaatattttattaaagaaaaaagagaa

SEQ ID NO: 286060 - DNA, 8909 bp, Artificial Sequence
  derived and/or modified sequence
atggatccacgaaacacagcaatgttgggcttgggcagcgattcagagggcttcagccgtaaaagccctagcgcaatttcgacaggaacattggttagcaaaagagaggtggagctggagaaaaatacgaaggaggaagaggatttgcgcaaacgaaacagggaacgcaatatagaggcaggaaaggatgacggcttaactgatgctcagcagcagtttagtgtcaaagaaactaactttagtgaggggaacttgaagctcaagattgggctccaggccaaaaggaccaaaaagccgccaaagaacctggagaattatgtgtgtaggccggcaatcaagaccaccattaagcacccaagaaaagctctcaaatccggtaaaatgactgacgaaaaaaatgagcactgtcctagtaaaagggacccatcaaagctctataagaaagcggatgatgttgccgcaatcgaatgccagagtgaggaggtcatcagactgcatagccagggagagaataacccattatctaaaaagctgagcccggtgcactccgagatggcagattatatcaatgctaccccttccactttactggggtctagagatcccgaccttaaggaccgcgctctattgaatggcggtacttcagtcacagagaagctagcccagctgatcgccacatgccctcccagtaagtcgtctaagacgaagcctaagaagctcggaacaggtactacagccggtctggtcagcaaggacctgataaggaaagcgggtgtcggctcggtggctggaatcatccataaggatctgatcaaaaaacctacaatttcgaccgctgtcggactggtgaccaaggatcctggtaaaaaacctgtgttcaatgccgcagttggtctggtgaacaaagacagcgtcaaaaagctggggacaggaactacagctgtctttatcaataaaaacctgggaaaaaaacctggaaccatcacaactgttgggttattatccaaggactcggggaagaagttaggcatcgggatcgtccctggcttggtccataaggaatctggtaagaaactcgggctaggcactgtcgtgggattggtgaataaagatctagggaagaagctcggtagtacggtcgggttggtggcaaaggattgtgccaaaaaaattgtcgcttctagtgccatgggtctcgtcaacaaagatatcgggaagaaattaatgagctgtcccctggcgggactcattagtaaggacgcaatcaacctgaaggccgaggcactgctcccaacccaggaaccactcaaggctagttgtagtacaaacattaataaccaagagtcacaagagctaagtgaaagcctgaaagactcagcgacaagtaagactttcgagaaaaatgtcgtgcgccagaacaaagagagcatcctcgaaaagttctctgtgcggaaggaaatcataaatcttgagaaggaaatgttcaacgaggggacctgcatccagcaggatagcttcagctcttcggaaaaaggctcttatgaaacttctaaacacgagaagcagccaccagtgtattgcaccagtccagatttcaagatgggaggggctagcgacgtttctacggccaaaagtccattcagcgctgttggcgaaagtaatcttcccagtccaagcccgaccgtgtccgtgaaccccctgacacgatcaccccctgaaacctctagccagctggccccaaacccgctactgctgtcttcgaccactgagcttatagaggaaataagtgagtcggtcggaaaaaatcaattcactagcgagtctacgcacctgaacgtaggtcatcgatcagtaggccactctatttcaatcgaatgcaaaggcatcgacaaggaagtgaatgattccaagacaacccacatcgacatacctcgcatcagctctagtctcgggaagaaaccctctctaacatcagaatcaagcattcatacaatcacaccttctgtggtgaacttcactagtctatttagcaacaagcctttcctgaaactgggcgctgtgtccgccagcgacaagcactgccaagtggccgagtcgctctccacatctctgcagagtaagccactcaagaagcgcaagggcagaaaaccgaggtggaccaaggtcgtcgcccgttctacttgccgctcacccaaaggcctcgaactggaacggtcggagttgttcaaaaatgtttcctgctcctcactgtctaactccaacagtgaacctgccaagtttatgaaaaacatcgggccacctagctttgtggatcacgattttctgaaacgccgtcttcctaaattaagcaagtccaccgcaccaagcctggcactgctcgctgatagcgagaagccttcacacaaaagcttcgccacacataagctgtcgtcatccatgtgcgtctctagtgatctgctgtcagatatttataagccaaaacgcggacgtcccaagagtaaggaaatgccgcagttggagggccctccgaaacggaccctgaagatccccgctagcaaggtgttctctcttcaatcaaaagaggaacaggaacctcccatcctccagcctgaaatagagatccccagctttaagcagggcctgagtgtctcccctttcccgaaaaaacgaggcagaccgaagcgacagatgcgctcacctgtgaagatgaaaccacccgtgctaagtgtggcgccttttgtcgcgacagagtctccatctaaactggaaagtgagtctgataatcaccggtcctcatccgattttttcgaaagcgaggaccaattacaagatcctgatgacctcgatgactcgcaccgaccctccgtgtgcagtatgagtgatctggaaatggaacccgacaagaaaattaccaaacggaacaacggccaactcatgaagaccatcatccgcaagatcaacaagatgaaaactctcaagagaaaaaaactgctgaaccagatcctttcctccagtgtcgagtccagcaataagggcaaggtgcagagcaagctgcacaacactgtgagcagcctggctgcaaccttcggatccaaactcggccaacagatcaacgttagcaagaaaggcacgatatatattggtaagagacgcggacgtaaacccaagacagtcttaaatgggatcctgtctggcagcccgaccagtctagcagtgctcgaacagacagcacaacaggccgctggatccgctttagggcaaatcctgccccctcttctcccaagcagcgcatctagttcagagattttgcccagtccaatctgtagccagtcatcaggtaccagcggaggccagagcccagtttcaagcgatgccggtttcgtcgagcccagctctgttccatatcttcacctccactctcgacagggctccatgatccaaacgctggcaatgaaaaaggcgtccaaaggccgacgccgtttgtctcccccaactctgctgcccaactctccatctcacctgtcggaactgacatccctgaaggaggccactccatcgcccattagtgaaagtcactccgatgaaacaatccccagcgattcagggattggcaccgataacaatagtacctctgacagggctgaaaaattctgcggtcaaaagaaacgacgacattcttttgaacatgtttccctcatcccacctgaaaccagtacagtcctgagctcgctgaaggagaagcataagcacaagtgcaagagacgtaaccacgattacctgagctacgataaaatgaagaggcagaagcgaaagcggaaaaagaagtacccccagctccgtaaccggcaagaccccgattttattgcagaactggaagaattaatttccagacttagcgaaatacgaatcacccataggtcccaccattttatcccaagagatcttctgccaacaatcttcaggataaattttaatagcttttacacgcatccatctttcccactggaccccctgcactacatccggaaaccggacttaaagaagaaaagggggaggccacccaaaatgagagaggctatggcggaaatgcccttcatgcattccctttcttttccactgagctcaaccggcttttatccttcgtatggcatgccgtacagcccctccccattgaccgctgcccctatcggacttggttactacggaagatatccgccaactttatacccaccccctcctagtccctcattcacaacccccttgcccccaccttcatatatgcatgcagggcacctactcctgaaccctgccaagtatcataagaaaaaacacaaattgctaaggcaagaggcgttccttacgacctcccggacccctctgctgtctatgtcaacatacccgagcgtcccccctgaaatggcctacgggtggatggtcgaacataaacaccggcaccggcacaaacatcgggaacacagatctagtgagcagccgcaggtaagtatggatacaggtagcagtcgtagcgtgctcgagtcactcaaaaggtaccgctttggtaaagatgccgtgggagagcggtacaaacacaaagaaaagcatcgctgccacatgtcatgtccacatctgtctccctctaagagtttgatcaacagggaagaacagtgggtgcatcgcgagccaagcgaaagtagtcccttagcccttgggctgcagaccccgttacaaattgattgtagtgagagttccccatccctctcactcggtgggttcacccccaactcagagccagctagttcagatgaacacacaaatctttttacctcagccattggatcttgccgtgtcagcaacccaaactctagcgggaggaaaaaactcacagacagccccggtctgttctcagcgcaggacacaagcctcaacagactgcatagaaaagagtctctgccatccaatgagcgggctgtccagacattagccggtagtcaaccgacgtctgataagccctcccagcgtccctcggaatccacaaactgcagcccaactaggaagcgctcctcgagcgagagcaccagttccacggtgaatggtgttcccagtaggtctccaaggctcgttgcgtctggagacgattcggtcgactccctgcttcagcgtatggttcagaacgaggatcaagagccaatggagaaatccatcgacgccgtgatcgctaccgcctctgcccctccttcttcaagccctgggaggagccactcaaaggacaggacgctgggaaagccggattccttgttggtccctgccgtgacctccgacagttgcaacaattctatctcactgctgagcgagaagttgacgtcctcctgctctccacaccacatcaagaggtcagtagtcgaagccatgcagaggcaggcacgcaaaatgtgcaattatgataagatactagctacaaaaaaaaacctggaccacgtgaacaaaattcttaaggctaaaaagctccagaggcaggccagaacgggtaacaactttgtgaaacggagaccaggtcgtccgagaaaatgcccactgcaagccgtcgtaagcatgcaggcattccaagccgctcagtttgtgaatcctgagctgaacagagatgaggagggggcagctctgcatctgtcccccgataccgttacagacgtcattgaagctgtcgtgcagagcgtgaacctcaatcctgagcataaaaaagggctgaagaggaaagggtggttgctggaagagcagaccagaaagaagcagaagccattaccagaagaagaggaacaagagaataataagagcttcaatgaagcacccgttgagatcccttcgcctagtgaaacaccggctaaaccgtctgaaccggaatccacactgcagccagtactttcattaattcccagagagaagaaaccccctagaccgccaaagaagaagtaccagaaagccggactgtactccgacgtgtacaagaccactgatcccaagagcaggctcatacagttgaaaaaggaaaaattagaatatacacccggagaacatgagtacggtctttttccagcccctattcacgtcgtgtttttcgtgagcggaaagtacctcagacaaaagcgcatcgattttcaactaccttatgatattctctggcaatggaagcacaaccagctctacaaaaagcccgatgtgcccctctataaaaaaattcggtccaacgtgtatgtagacgtgaagccgttgagtggctacgaggccaccacttgtaactgtaagaagcctgacgacgacacccgcaaaggttgcgtagatgattgtttgaatcgcatgatatttgccgagtgctcacccaatacatgcccttgcggagagcagtgctgcaaccagcgtattcagcgacacgagtgggtgcaatgtcttgagcgtttcagggccgaagagaagggatggggaatcaggacaaaagagcctctgaaagccggacaatttattatcgagtacctgggagaggtagtaagcgaacaggagttccgaaatcgcatgatagaacaataccataaccactcagatcactattgcttgaatttggactctggaatggtcatcgactcctatcgcatgggcaacgaagcacgattcattaaccacagctgtgatcctaattgcgagatgcaaaagtggtccgtgaatggggtgtaccgtatcggactctacgccctgaaggatatgcctgccggaactgaactgacctacgattataatttccacagctttaacgtcgagaaacagcagctatgcaaatgtggttttgaaaagtgccgcggaatcatcggcggtaagtctcagagagtcaacggtctgacctcatcaaaaaactctcagcccatggctactcacaagaaatccggcagaagcaaagagaagcgaaaatcaaaacacaagctcaagaagcgcaggggtcacctctctgaagaaccctccgagaatatcaatactcccactagattgacaccgcaactccagatgaaacctatgtccaacagggagcgaaactttgtgctcaaacatcacgtgttccttgttcgcaactgggagaagattcgccagaaacaggaggaagttaaacacaccagtgacaatatccattctgctagcctgtatactcgctggaatggaatctgtcgggacgacggtaatattaagtcggacgtgttcatgacacaattttccgctctacagacggccaggagtgtaaggacccgacgtctggcagccgcagaggagaatatcgaagtggcacgcgcagctcgcttggcgcagatcttcaaggagatctgcgatggcatcattagctataaagactcttcccgacaggcgctggctgcaccgctattgaacctcccgccaaaaaagaaaaacgccgattattatgagaagatctccgaccccctcgacttaattaccatcgaaaagcagattttaacaggatactacaagacagtggaagcttttgatgccgacatgttaaaagtgttccggaatgccgaaaaatactatggcagaaaatcccctgtggggagggatgtatgtagactaagaaaagcttactataatgctcgtcacgaggcgagcgctcaaatcgacgagattgtgggtgagacagcttctgaggccgactccagcgagacttctgtgtctgagaaggagaacggacatgagaaagatgacgacgtgatcagatgtatttgtggtctgtacaaggatgagggactaatgatccaatgtgataaatgcatggtatggcagcattgtgattgtatgggagtgaacagcgatgttgagcattatctttgcgaacaatgcgaccccagaccagttgaccgtgaggtaccaatgatcccaaggcctcactatgcccagccgggttgcgtctatttcatctgtctactgcgcgacgacctcctactgaggcagggcgactgtgtataccttatgagagactctagacgtacacccgacggccacccagtccggcagtcttaccgcttactcagccacattaatcgggataagctggacatatttaggattgagaagctttggaaaaacgaaaaggaagagcgctttgcgttcggccatcactacttccgcccacacgagacacatcattcaccttcccgaagattctaccataacgagttatttcgggtgcctttatatgagatcatcccgctggaagcagtggtcggcacctgctgcgtgctggatctgtacacttattgcaaggggagacccaaaggagtgaaagagcaggacgtgtacatttgtgactatagactcgacaagagtgcccatcttttctacaagattcaccggaatcggtaccccgtgtgtacgaaaccatatgcgttcgaccacttcccgaaaaagctgactccaaagaaggacttcagccctcactacgtgcccgataattacaaaagaaatggcggaagatcgagttggaagagcgaacggagcaagccgcctctgaaagatctggggcaggaagacgacgcattgccactcatcgaagaggttctcgcttcccaagaacaggcagcgaatgaaattccaagtttggaggaacccgaacgggagggcgctacagcaaatgtgtcagaaggggaaaaaaaaactgaggagtcttctcaagagccccaatcgacctgcacccccgaggaacggcgacacaatcagcgcgagaggcttaaccagattttgctgaacctgcttgaaaaaataccaggcaaaaacgcgatcgacgttacctatctgctggaagaaggaagtgggaggaagttgagacgcagaacccttttcatccctgaaaactcctttaggaaata

SEQ ID NO: 286061 - DNA, 8894 bp, Artificial Sequence
  derived and/or modified sequence
atggaccctaggaataccgctatgcttggcctgggaagtgattcagagggattcagccggaaatctccctctgctatcagtaccggtaccctagtctcgaaacgggaagtggagcttgagaagaataccaaggaggaagaagatctcaggaagaggaatcgcgaacggaatatcgaggccggtaaagatgacggcctgaccgatgcacagcaacaattctccgtgaaggaaacaaatttctccgagggtaacctcaagctcaaaattggcttgcaggcaaaaagaaccaagaaaccaccaaagaaccttgaaaattatgtgtgccgccctgccatcaagaccaccatcaaacacccgagaaaagcactaaaatccgggaaaatgacggatgagaaaaatgaacactgcccatcgaaacgcgaccctagcaagctctacaagaaggctgacgatgttgccgcaatcgagtgtcagtctgaagaagtgatccgactgcactcccagggggaaaataaccctttgtccaaaaagctcagccctgtgcattcagaaatggctgactatataaacgccaccccctctacccttcttggatcaagggaccccgacctgaaagaccgagccctactgaatggcggtaccagtgtcacagaaaagctggcgcaactcatcgccacctgcccccctagcaagtctagcaaaacaaaaccgaagaaactcgggaccggcaccacagcagggttagtttctaaggaccttattaggaaggccggagttggctctgtcgcagggattatacacaaggatttaatcaagaagccgacaatcagcacagcagtgggcctggtgaccaaagaccccggtaagaaacccgtctttaacgccgctgttggattggtaaacaaggattccgttaagaagctgggcactggcactactgctgtgttcataaacaagaatctgggaaagaaaccgggaactattacaaccgtaggcctcttgagtaaagattccggcaaaaagcttggtatcggtattgttcccggacttgtacataaagaatcaggcaagaagctcggactcgggacggtcgtggggctagtcaataaggacctgggcaagaaacttggctccacagttgggttagtagcaaaggactgtgccaagaagatagtggcctcttcggcaatgggcctcgtgaacaaggacatcggaaaaaagctcatgagttgcccactggcgggtctcatcagcaaggacgccataaacctcaaggccgaggcactcctaccgacccaggagcccctgaaggcatcgtgctcaaccaacattaataatcaggaaagccaggaactgtctgagtctttaaaggattctgctacctctaaaactttcgaaaagaatgtggtgagacagaataaagagagcatcctggaaaaatttagcgttcgcaaggagattattaatctcgaaaaagagatgtttaacgaagggacctgcatccagcaggacagtttttcaagctcggaaaagggatcatatgagacatcaaaacacgaaaaacagcctcctgtctattgcacctctccagattttaagatgggcggagcgtcagatgtgagtacagcgaaaagccccttctccgccgtgggcgagtcgaaccttccctcaccatctcccactgtctccgttaaccccctcaccagaagccctccagaaacatcaagtcagctcgcgcctaatcccctgcttttgtcttccactactgagctcattgaggaaatctcagaaagtgtcggaaaaaaccaatttactagcgaatctactcaccttaatgtgggccaccgctctgtaggtcatagtatctccatagagtgtaagggaatcgacaaagaagtgaatgactctaagacaacgcacatagatattcccaggatttcctcctcccttggcaagaaacctagtctcacctccgagagcagcatccataccattaccccttccgtagtcaacttcacttctttgttttctaataagccctttttgaaattaggagctgtttccgcatctgataaacactgtcaggtcgccgaaagtttatctactagcctgcaaagtaagccattaaaaaagcgcaaggggagaaagccgaggtggactaaagtggttgctaggtctacatgccggagccctaagggactcgaactcgaacgatctgagctctttaaaaatgtctcatgtagttccctgtcaaattctaattctgaacctgccaaatttatgaagaacattggaccacccagctttgttgaccacgattttctgaaacgccgactgccaaagctgagtaagtcaactgcaccttctctggccttattagcggattccgagaagccatcccacaagtcattcgccacccacaagttatcatcctccatgtgtgtgtcaagcgacttgctatcagatatctacaagcctaagagagggagaccgaaaagtaaggagatgccacaactggaggggccacccaaaagaacgctcaagatccccgcaagcaaggtctttagtttacagtccaaagaagagcaggaacccccaattctccagcccgagatcgaaatcccttccttcaagcaagggttgtccgtttcccccttccccaaaaaacgcggtcgacccaagcggcagatgaggagcccagtgaagatgaagcccccagtactgagtgtggctccattcgtggctaccgagagcccctccaaactcgagagtgagagcgacaaccacaggagttcctccgatttcttcgagtctgaagatcagttgcaggatcctgatgacctggacgacagccacagacccagtgtgtgctcaatgtccgacctagagatggagccggacaaaaagataaccaagcgaaataatggccagctcatgaaaacaatcatccggaaaattaataaaatgaaaacattgaaacgcaaaaaactgctgaaccagattctctcatctagcgtcgagtcatcgaataagggcaaggtgcagtcaaaactccacaacacagtgagcagcctggcagccacctttgggagcaaattgggtcagcagattaacgtttccaaaaaaggaactatttacataggtaaacggaggggcagaaagccaaagaccgtgctcaacgggattctctctggaagtcccacatcactggcagtgctcgaacaaaccgcccagcaggcagccggatcagcattaggccagattcttcctcccctcctgccctcatccgcctcctcctctgagatccttccatcaccaatctgttcccaatcctcgggcactagcgggggacagagtcccgtttcctcagatgccggatttgtggaacctagctccgtcccataccttcatcttcattcacgtcaaggaagcatgatacaaactctggccatgaaaaaggcctctaaggggagaaggcgcctgagccctcccacgcttctgcccaactccccctctcacctgagcgagctcacttctctcaaagaggctactccctctcctatcagtgaatctcacagtgatgagactataccatctgactctggtatcggaaccgataacaacagtacttctgatcgagcggagaagttctgcgggcagaagaagaggaggcattctttcgaacatgtgagtctgataccacctgagacgtccacagtgctgtcaagtctaaaagaaaaacacaagcataagtgtaaaagaagaaatcatgactatctaagctacgataagatgaaacggcagaagaggaaaagaaaaaaaaagtatcctcagttacggaaccggcaggatccagatttcattgccgagttagaggaactcatcagccgcctgagcgaaattcgaattactcataggagtcatcactttattccaagagacctcctgccaacaatctttaggatcaacttcaactctttttacacacacccaagctttccactggatcctcttcactacattagaaaacccgatctgaagaagaaaagaggcagaccgccaaagatgagagaagctatggccgagatgccctttatgcactccctatcttttcccctgtcatccactggattctacccctcgtatggtatgccctacagcccgtcccccctgacagctgcccctatagggctgggatactatgggaggtacccaccgaccctataccctcctcctccgagtccctcattcacaacccctcttccacctccatcatatatgcatgccggacacttgctgttgaacccggctaaatatcacaaaaagaaacacaagctcttaagacaggaggcctttttaaccacaagtaggacccctctgctgagcatgtccacttaccctagtgtgccacccgagatggcttacggttggatggtcgagcataaacatagacacaggcacaaacacagagaacaccgcagctccgaacagcctcaggtgtccatggataccgggtctagcaggagtgtgctggagagcctcaagcggtacagattcggcaaggacgccgtcggagagcgatacaagcacaaagagaaacaccgatgccatatgagttgtcctcacctatctccaagtaagtccctcattaacagagaagagcaatgggttcatagagaacccagtgagtcctcacctctggcactaggtcttcagacccccttgcagatcgattgctctgaatctagcccaagtctgagtctgggcggtttcactcctaacagcgaacccgcatcttcagatgaacatactaatctgtttacttcagccatcgggtcttgtagggtgtccaatccgaatagcagtggcagaaaaaaactgacagattcgcccggactgttcagtgcacaggatacctcactgaacaggctgcatcgtaaggagagccttcctagtaatgagcgagcggtgcaaacactggcagggagccagccaaccagcgacaagccttcacagagaccgagtgaatcaactaattgttctcctacccggaagcgctccagctccgagtctacgagcagtaccgtgaatggcgtgcccagtcggtcgcctaggctggttgccagcggcgacgattctgtggatagcctgttacaaagaatggtccaaaacgaagatcaggagcctatggagaagagtattgatgctgtcatagctactgcgtctgccccaccgagttcatctcctggcagatcacacagtaaggaccgaaccctcggaaagccagacagtctccttgtgcccgctgttacgtctgatagctgcaacaattccattagtctgctgtccgaaaagctgacatcctcctgcagcccacaccacatcaagcgaagtgtcgtcgaagccatgcaaagacaagccaggaagatgtgcaattatgacaagatcctagctaccaagaaaaacctcgaccacgttaataagattctgaaggccaagaagctgcagagacaggcccgaaccggcaacaattttgtcaagagacgaccagggaggccccgaaagtgcccattgcaggctgtggtctccatgcaggctttccaggcagctcaattcgtgaacccagagttgaaccgggatgaagaaggggctgcactgcatctgtcacccgacacagtgactgatgtaattgaggcagtggttcaaagtgttaatttgaatccagagcacaaaaaaggcctgaagcggaaaggttggctgttggaagagcagaccaggaaaaagcagaagccactgccagaagaagaggagcaggagaacaacaaaagcttcaatgaggcacctgtggaaattcctagccccagtgagacccctgcgaagccttccgaaccagagtccactctccagccggtgctgtcgctcatcccacgcgagaaaaaaccccctcggcctcccaaaaaaaagtaccagaaagccggtttatacagtgacgtgtacaaaaccacggatcctaagtccagactcatccagcttaagaaagagaaactggaatacacccccggagaacacgaatacggtctgttcccggctccaatccacgtggggaagtatcttcgtcagaagcggatcgatttccagctgccctacgatattttgtggcaatggaagcacaaccagctatacaagaaacccgacgtgccactttacaagaaaattcgcagtaatgtgtatgtcgatgtaaagccactgtccgggtacgaagctaccacatgtaattgtaagaaaccagatgatgatacaagaaaggggtgtgtggatgattgtctcaaccgtatgatcttcgcagaatgctccccaaacacctgcccatgtggcgaacagtgctgtaaccagcggatccagcggcatgagtgggttcagtgtctcgagcgctttcgcgctgaggaaaagggatggggcatacgtaccaaggagcctttgaaagccggacagttcatcatcgagtatctaggggaggtggtatctgagcaggaattcaggaatagaatgatagaacaatatcacaatcattctgatcactattgcctgaatctggactcggggatggtgattgacagctaccgcatggggaacgaggctagattcatcaatcactcgtgcgacccaaattgcgagatgcagaagtggagcgtgaacggggtgtataggattggcctttatgcactgaaggacatgccggctggcaccgagctgacttacgattacaatttccactccttcaacgtcgaaaaacagcagctttgcaaatgcggatttgagaagtgtcgtggaataatcggcggaaagtcccagcgggtgaatgggttgactagcagcaagaactcccagccaatggccacccataagaaatccggtcgctcgaaagagaaacgtaagtctaagcacaagctaaaaaaacgcaggggtcacctgagcgaggaaccctcggagaacattaataccccgactcggctgacaccgcagctgcaaatgaaacccatgtccaaccgagagcgaaacttcgtgcttaagcaccacgtgtttctggtacgcaactgggaaaaaatccgacaaaaacaagaagaagtgaagcatacaagtgacaatatccatagtgcatcgctgtacacaagatggaacgggatctgtagggacgatggaaacattaaaagcgatgtgtttatgacgcaattcagtgctttgcagacagccagatctgtcagaacccggaggcttgccgctgctgaggagaatatcgaggtggccagagctgctaggttagctcagattttcaaagagatctgtgatggaattatttcctataaggactcatcccgccaggcacttgctgcacctttacttaacctcccaccgaaaaaaaagaacgcagattactatgagaaaatctccgatccgcttgatctgattaccatcgagaagcaaatcctgactgggtattacaagactgtcgaggcttttgatgctgacatgctcaaagtgtttagaaatgcggaaaagtattacggcagaaagtcacccgtgggcagggacgtctgccgcctgcggaaagcctactataatgctcgccacgaagcatccgctcagattgacgagattgtgggggagaccgccagcgaggcggactcttcagagacttccgtctccgagaaagaaaacggccacgagaaagacgatgacgtgatcagatgtatctgtggtctttataaggacgaaggcctgatgatccagtgtgataaatgcatggtctggcagcattgtgattgcatgggcgtgaactcagatgtagaacattacctctgtgaacagtgcgatcctcgccctgttgaccgggaagtgcccatgattcctcgccctcactatgctcagccaggatgcgtgtactttatctgtctcctgagagatgatttactattgcggcagggagattgcgtatatctgatgcgcgactccaggaggacccctgatggccacccagtgagacaaagctacaggttacttagccacatcaatagagacaaactcgatatcttccgtatcgaaaagttgtggaagaatgagaaggaggagagattcgctttcggccaccattacttccgaccccacgagacccaccactcaccctctcgcaggttctaccacaacgagctgtttcgcgtccccttgtatgaaatcatccctcttgaagccgtagtaggaacgtgctgcgtgttggacctgtacacctactgcaagggacggccaaaaggcgttaaggagcaggatgtttacatatgcgactatcggcttgacaaaagcgctcatttattctataagattcacagaaataggtaccctgtatgtacaaagccatacgctttcgaccacttccccaagaagctgacaccaaagaaagacttttccccccattacgttcctgataactataagcggaacggaggcaggtcaagttggaaaagtgagcgctcaaagcccccactgaaggacctcggccaagaagacgatgcgctccccctgatcgaggaagtcctagcctctcaggagcaggcagccaatgagatcccctcattagaagaacccgagcgagagggagccaccgctaacgtgagcgaaggcgaaaaaaagacagaagagtcaagtcaggaaccgcagtctacctgtactcctgaagagcgcagacacaatcagcgtgagcgtctcaaccagatattgctcaacttacttgagaagatcccaggcaaaaatgccattgatgtcacatatttactggaggaaggctcaggcagaaagctgaggagaaggacgttattcatcccagaaaactccttccgcaaata

SEQ ID NO: 286062 - protein, 593 aa, Artificial Sequence
  derived and/or modified sequence
MDRMTEDALRLNLLKRSLDPADERDDVLAKRLKMEGHEAMERLKMLALLKRKDLANLEVPHELPTKQDGSGVKGYEEKLNGNLRPHGDNRTAGRPGKENINDEPVDMSARRSEPERGRLTPSPDIIVLSDNEASSPRSSSRMEERLKAANLEMFKGKGIEERQQLIKQLRDELRLEEARLVLLKKLRQSQLQKENVVQKTPVVQNAASIVQPSPAHVGQQGLSKLPSRPGAQGVEPQNLRTLQGHSVIRSATNTTLPHMLMSQRVIAPNPAQLQGQRGPPKPGLVRTTTPNMNPAINYQPQSSSSVPCQRTTSSAIYMNLASHIQPGTVNRVSSPLPSPSAMTDAANSQAAAKLALRKQLEKTLLEIPPPKPPAPLLHFLPSAANSEFIYMVGLEEVVQSVIDSQGKSCASLLRVEPFVCAQCRTDFTPHWKQEKNGKILCEQCMTSNQKKALKAEHTNRLKNAFVKALQQEQEIEQRLQQQAALSPTTAPAVSSVSKQETIMRHHTLRQAPQPQSSLQRGIPTSARSMLSNFAQAPQLSVPGGLLGMPGVNIAYLNTGIGGHKGPSLADRQREYLLDMIPPRSISQSISGQK

SEQ ID NO: 286063 - DNA, 1782 bp, Artificial Sequence
  derived and/or modified sequence
atggacagaatgaccgaggacgccttgagactgaatctgctgaagcggtcccttgaccccgccgacgagagagacgatgttctcgccaagcgcctgaaaatggagggacacgaagctatggagcgtctgaaaatgttggcactcctcaaacggaaggacttagccaacttggaagtgccgcacgagcttcccacaaagcaggatggtagcggagtgaaaggctatgaggagaaacttaacggcaatctgaggccacatggagacaacagaacggctggacgccccgggaaagaaaacatcaatgacgaacctgtggatatgtccgcccgccggagcgagcccgaacgcgggcggctcaccccatcccctgacatcatagttctctcagacaacgaagcgtcctctcccaggagtagcagtcgcatggaggaacggctaaaagccgctaacctggagatgtttaaaggaaagggtattgaggagcgtcagcagctcattaaacaactgcgagatgaattgcggttagaagaggcccgacttgtgctgttgaagaagctgagacaatcccagctgcagaaggaaaacgtggtgcaaaaaacccctgtggtacagaatgctgcttctatcgtgcaaccatcacctgcacacgtcggccaacaggggctcagcaagctccctagtcgaccaggcgcacaaggcgtcgaaccgcaaaacctgcgtactctgcagggacacagtgtcattaggagcgctaccaataccaccttgccccatatgcttatgtcacagagagtgatagctcctaatcccgctcagctgcaggggcagcgaggtcctcccaagccaggactcgtgcgaacaaccacacccaatatgaacccagccatcaactaccagcctcaaagtagcagctctgtgccatgccaacggactacgagtagcgcaatctacatgaaccttgccagccatattcagcccgggacagtgaatcgggtgtcaagtccattgcccagcccaagtgccatgacagacgccgccaactcccaggctgcggcaaagctggccctccggaagcagttagagaaaacactgctggaaattccccctcctaagcccccggcacctctgcttcactttctaccctcagcggccaatagtgagtttatatacatggtcggattggaagaggttgtgcaatctgtcatcgattcccaggggaagagctgtgcctccctgctcagggtagaaccttttgtatgcgctcagtgccggacagactttacgcctcattggaaacaggaaaaaaacggcaaaattctttgtgagcagtgcatgacatctaaccagaaaaaagcacttaaagcagagcacacaaataggttgaagaatgcattcgtgaaggccctccagcaagagcaggagatcgagcagcgtctgcagcagcaggccgccttgagcccaacaaccgcccccgctgtcagcagcgtttcgaaacaggaaacaatcatgaggcaccatactctgcgccaagctccccagccccagtcctcccttcagagagggattcctacaagtgccagaagtatgttgtctaactttgcacaggcccctcagctaagtgtgcctggcggcctgcttggcatgccaggagtgaatatagcctacctaaacacaggcattgggggacataagggcccatccctggcagatcggcagcgggagtacctgctggatatgatccctccccgtagcatttcgcagtcgatctccgggcagaaatag

SEQ ID NO: 286064 - DNA, 1782 bp, Artificial Sequence
  derived and/or modified sequence
atggacaggatgacagaagatgccctgcggctgaacctgctgaagaggagcctggaccctgcagatgaaagagatgatgtgctggccaagaggctgaagatggagggccacgaggccatggagcggctgaagatgctggccctgctgaagaggaaggacctggccaacctggaggtgccccatgagctgcccaccaagcaggacggcagcggcgtgaagggctatgaggagaagctgaatggaaacctgcggccccacggggacaacagaacagctggccggcctgggaaggagaacatcaatgatgagcctgtggacatgtctgcccggcgctctgagcctgagcggggccgcctgacccccagcccagacatcatcgtgctgagtgacaatgaggccagcagccccaggagcagcagcaggatggaggagcggctgaaggccgccaacctggagatgtttaaaggaaaaggaattgaggagcggcagcagctgatcaagcagctgagagatgagctgcggctggaggaggcccggctggtgctgctgaagaagctgcggcagagccagctgcagaaggaaaatgtggtgcagaagacccctgtggtgcagaatgctgccagcatcgtgcagcccagccctgcccacgtgggccagcagggcctgagcaagctgcccagcaggcctggggcccagggcgtggagccccagaacctgcggaccctgcagggccacagcgtcatccgcagcgccaccaacaccaccctgccccacatgctgatgagccagagggtcatcgcccccaacccagcccagctgcagggccagaggggcccccccaagccaggcctggtgaggaccaccacccccaacatgaacccagccatcaactaccagccccagagcagcagctctgtgccctgccagaggaccaccagcagcgccatctacatgaacctggccagccacatccagcccggcaccgtgaacagagtgagcagccccctgcccagccccagcgccatgacagatgctgccaacagccaggccgccgccaagctggccctgaggaagcagctggagaagaccctgctggagatccccccacccaagcccccagcccccctgctgcacttcctgcccagcgctgccaacagcgagttcatctacatggtgggcctggaggaggtggtgcagagcgtcatcgacagccagggcaagagctgtgccagcctgctgcgggtggagccctttgtgtgtgcccagtgcaggacagacttcaccccccactggaagcaggagaagaatggcaagatcctgtgtgagcagtgcatgaccagcaaccagaagaaggccctgaaggccgagcacaccaaccggctgaagaatgcctttgtgaaggccctgcagcaggagcaggagattgagcagaggctgcagcagcaggccgccctgagccccaccacagccccagctgtgtcctctgtgtccaagcaggagaccatcatgaggcaccacaccctgcggcaggccccccagccccagagcagcctgcagaggggcatccccaccagcgcccgctccatgctgagcaactttgcccaggccccccagctgtctgtgcctgggggcctgctgggcatgcctggggtgaacatcgcctacctgaacacaggcatcggcggccacaagggccccagcctggccgaccggcagcgggagtacctgctggacatgatccccccaagaagcatcagccagagcatcagcggccagaagtag

SEQ ID NO: 286065 - DNA, 1782 bp, Artificial Sequence
  derived and/or modified sequence
atggaccggatgaccgaggacgccctgcggctgaacctgctgaagagaagtctagatcctgctgacgaacgagatgatgtccttgccaagagactgaagatggaggggcacgaagccatggaacgcctgaaaatgttagcactgctcaaacgcaaagatttagctaacttagaggtgccccatgaactgcccactaagcaggatggttccggcgttaagggctacgaagaaaaactgaatgggaacctgcggccccacggggataacagaactgctgggagacccggaaaagagaacattaatgacgagcccgtcgatatgagcgctaggagatccgagccagagcgcggccgccttacccctagtccagacatcattgtactctcagacaacgaagcatcatcaccaagaagtagctcacgtatggaagaaagacttaaggcagccaacctggagatgttcaaagggaaaggaattgaagaacgacaacagctcatcaagcagctgcgggatgagctgaggctcgaggaagcacggttagtgctcctgaaaaagctaaggcagtcccagcttcagaaagaaaacgtcgtacagaaaacccccgttgtccagaacgccgcttcgatagtccaacctagcccggcgcacgtcgggcagcagggattatctaagcttccaagcaggcccggggctcagggagtggagccacagaatctgagaacgctccaaggccattcagtgattagatccgccacgaatacaactcttcctcacatgctgatgagtcagagagtgatagcacccaacccggctcaactgcaaggacaaaggggccctcccaagccgggcttagtgaggacaacaacaccaaatatgaaccccgcgattaactaccaaccccaaagctccagttcagttccatgtcaaaggacaacctcgagcgcaatctacatgaatttagcgtctcacattcagcctggaactgtcaatagggtttcctctccactcccaagtccatccgccatgaccgatgctgctaactcacaagccgctgccaaactggctcttcgaaagcaattagagaaaactttgctggagatcccccccccaaaaccacctgctccactgctgcacttcctcccgtcagccgccaattctgagttcatctatatggtcggcctggaggaagtggtgcaatcagtgatcgactcccaggggaagtcttgcgcaagtctattgagagtggagccatttgtgtgcgcccaatgcagaactgatttcacccctcattggaaacaggaaaaaaatggcaaaatcctgtgtgagcaatgcatgactagcaaccagaaaaaagctctgaaagctgaacacaccaaccgcttgaagaacgcttttgtgaaagcgctgcagcaggaacaggaaatcgaacagagactacagcagcaggccgcattgtctccaacaaccgcaccagccgtgtcatcggttagcaagcaggagacaattatgagacaccacacgctaaggcaggccccccagccacagtccagtcttcaaagaggaatcccgacaagtgccagaagcatgctgagcaattttgctcaagcgccgcaattatctgtgccaggcgggctgctgggtatgccaggagttaacatagcttacctcaatactgggattggagggcacaaagggccatctctcgctgatcggcagcgggagtacctacttgatatgattccgccacggtcgatttcccagtctatcagcgggcagaagtag

SEQ ID NO: 286066 - DNA, 1782 bp, Artificial Sequence
  derived and/or modified sequence
atggacagaatgacagaggatgcactgcggctgaaccttcttaagcgctccttggacccagcagatgagcgtgatgacgtattggcaaagaggctcaaaatggagggtcatgaggccatggagcggttgaagatgttagctttactcaagcggaaagatttagcaaatttggaagtgccccacgaacttcctaccaagcaggacggatcaggcgtcaagggttatgaggaaaaactaaatggcaacttaagaccgcacggggacaacagaaccgcaggtcgacctggaaaggaaaatatcaatgacgagcctgttgacatgagtgcaagacgatcggaaccagagcgaggcagactgacacctagtccagatattattgtgctgtccgacaatgaggccagctcaccgcgtagttcaagtcggatggaggagcggctgaaggctgctaatctggaaatgtttaaaggaaagggcattgaagagcgtcaacaacttattaaacagcttcgtgatgaactccgattggaggaggcacgactggtgctcctgaagaagctacgccagtcacagttacagaaagagaatgtggttcaaaaaaccccagtcgtccagaatgcggcttcaattgtgcagccgagccccgctcatgtaggccaacaaggcctgagcaaactgcctagcaggccaggagcccagggggtggaacctcaaaatctgcggacgcttcagggccactccgttatcagatccgcgaccaataccactctgccccatatgttgatgtcgcaaagagtcatcgcaccaaaccccgctcagctgcagggtcaacgcggaccaccaaaacccggattggtgcggaccacaactcccaatatgaatcccgcaatcaattatcagccccagagcagctcgagtgttccttgtcagagaaccacttcgtcagcaatttacatgaaccttgcgagccacatccagcctggaactgtcaaccgcgtgtcttcacctctcccatctccaagcgctatgactgacgctgctaacagccaagctgccgcaaagcttgcactgaggaagcagctcgaaaagaccctgctggagatccccccacccaagccgcctgctcccttgttgcacttcctgccttccgcagcaaactctgagtttatttatatggtggggctcgaagaggtggttcaaagtgtgatagactcccagggaaagtcctgtgctagtctgcttagggtggagcccttcgtgtgtgcacaatgcaggaccgattttacccctcactggaagcaagaaaagaatgggaagatcctatgcgagcagtgcatgacctctaaccagaagaaagccctaaaggctgaacacactaacaggctgaagaatgcctttgtgaaagccttgcagcaggaacaggagattgagcaacgactccaacaacaggcagcacttagtccaacaactgcaccggcagtctcgtccgtaagtaagcaggagaccattatgcggcaccatactctgagacaagccccacaaccccaatcgtccctacagcgcggtatccccacttccgcgcgaagcatgctttctaattttgcccaggcccctcaattatccgttcccggtggtctattgggaatgccaggggtaaacattgcttacctgaatacaggcatagggggacacaagggacctagcttggcggatcggcagcgtgaatacctccttgacatgatcccgccaaggtctattagtcagtctatctccggacagaagtag

SEQ ID NO: 286067 - DNA, 7478 bp, Artificial Sequence
  derived and/or modified sequence
agcgtccttgtttgtgtggtgccgccgccgccggtgcagccgtcgccgccgccgctgcccccgtctgtaccgcagtgtctgctccgcccgcccgccccggtccggcccgcccccctcccctacccccgtccctagtcccgtcagcagggtctggatcccctgtgccgtcgcctcttcctttttcgacgcctccgccgccgcctgaggaggcgagctagccgggagttacaccgccaccgccaggatggatagaatgacagaagatgctcttcgcttgaatctgttgaagcggagcttggacccagcagatgagcgagatgatgtcctggcaaagcgactcaaaatggaggggcatgaggccatggaacgtctgaaaatgttggcattgctcaaaaggaaggatttggcaaatcttgaggtgccacatgagttacccaccaaacaggatggcagtggtgtcaagggctatgaagaaaaacttaacgggaatctcaggcctcatggagacaacaggactgctggaaggccaggcaaagaaaacatcaatgatgagcctgtggatatgagtgctagacggagtgagccagagcgaggaaggctaactccctcaccagacatcattgttttgtctgacaatgaggcttccagtccccgttccagttccagaatggaagaaagactcaaagcagccaacttagagatgtttaaggggaaaggcattgaggagcggcagcagcttatcaagcagctgagggatgagctacgattggaagaagcccgactggtcctgttaaagaaactgagacagagtcagctacagaaagagaatgtggtccagaagactccagttgtacagaatgcagcatctattgttcagccatctcctgcccatgtgggacagcagggcctatctaagcttccctctcggcctggggcccaaggggttgaacctcaaaatttgagaacattacagggtcacagtgtcatccgttcagctaccaataccacccttccacacatgttgatgtctcaacgtgttattgcaccaaacccagcccagctacagggtcagcggggcccgcctaagcctggccttgtacgcaccacaacacccaacatgaatcccgccatcaattatcaaccgcagtcaagttcttctgttccatgtcagcgtacaacatcctctgccatctatatgaaccttgcttctcatatccagccagggacggtgaacagagtgtcctcgccacttcctagccccagcgccatgactgatgctgccaactcacaggctgcagccaaattggctcttcgcaaacagctggaaaagacactcctggagatcccaccccctaaacctcctgctcccttacttcatttcttgcctagtgcagccaatagcgagttcatctacatggtaggcttggaagaagtcgtacagagtgtcattgacagccaaggcaaaagctgtgcctcacttctgcgggttgaaccctttgtatgtgcccagtgccgcacagatttcacccctcactggaagcaagaaaagaatggtaagattctatgtgagcagtgtatgacctccaaccagaaaaaggctctaaaagctgaacacaccaaccggctgaaaaatgcatttgtgaaagccctacagcaggaacaggaaattgaacagcgattacagcagcaggcagccctctcccccactacggctccagctgtgtccagtgtcagtaaacaagagaccatcatgagacatcatacgcttcggcaggctccacagccccagagcagcctccagcgtggcatacccacatctgcccgctccatgctttcaaactttgcacaggcaccccagttgtctgtgccaggtggcctccttggtatgccaggtgtcaacattgcatacttgaatactggcatcggaggacacaaaggccccagtttggcagaccgacagcgtgaataccttttagacatgatccctccccggtctatatcgcagtccatcagtggacagaaataacgcctgttccacttgtactgccccatccttgaatcctttatccctttcctctttcattcccccaacttctgtcgcatgcagtgcctgtactggtgcctaccatacacggaaagcaaaacagaaaaacagaagacaaaaaatagagatcagcaagaaaacacacgccctgccctgccacctcccctttatttcacactgctgcgatctgttcttctgccgctctgtcttctctcttcagttttctttaacagtgaggtggatctttacctctgatagaggtcagaatgaggtcctggggagaatctaagccctccgatgtgtgtttctaaagttgttttatgctataattattaccatttttaatgatgttgtgtgtcctccctttgttcagtggacggttaaaccttcccccactcaaccaatctttttctttttccttttcttccttttttttttttttttttgtaaacacaaatgacattcagttcaatgatacgagcattgcagattgcagtaggggtcccagctgccaagtaggacatgactaggagtgttaggggcagaagttttgaatgcacttaaccggaggagggcgcagggtggggggtatcaaagaaggacgaatagcaccctacctgtgggtgtttgggggctggacaatttgggtggcagtgtttggtactgaagttgggctctaagaatgaggggaaagagcctggggaggagcttaaaactcaaccactctggaatttacccatagaagacgggaagaaagaggtatgaagatgggctcaattatgagccagggaggattgaaactaggtcctgcctttctgtatcttggggaaataagaccgatctcctgaccccattgggaacacggaagtctattccaggccaaccagcccaaaattatttcatcttgtattctttgtaaaattctccctcaccccaccctgcttttaaaaattctaatctatcccctctaaccatagccccatctataatacagaggaacggctgttccaaggctgtttgctgggtgtcccacaagttgggtggacataaatgagtcaagtgacaacaggaggaaatagacttagacgaaagaaaggatttctcttccaacagttgagattcgcatatttgcctattctttcaccctctgagtgccaggagatgagaggctgggggtacacaatcaggttggagtcctgtccttactctgctgcaccagctgcagaaccaactgctcaaagccaaacagctcatggcaaaaccagcttaggacctctgctgtacaaatagttgcttcccactgccccccgcccgcccccagaatgatattaattttgccttttttttttttttttttttaagcgctactaatgtagagaatgaattgaattgtgcaatgttgctgttctggggactggggagattagcatcccatttgcccacactgtgggaagacggagtggaccaggctgtttttgaagtaagggaagccccttaaaggtacgggtttctgctcttctcatagtgtacacccacctgcctctctggctccagaagctgccagagtgcactggggggaatgttctcagcagagaagaatgaggagaagtttaatattttgcccttgaaagtcacctgaggaagtttccccacttttattttttaaaattaagtaattttttaaagaaggcacttttaaaattaacacacacatgaactgcacaccttccccataaaatttggaggtggggtgggagaaagagctaaaatcaggctcagttcccctactctggcctctactccccacaccccagtgccactgtgggtgactatactggccctacgggccttcctggcttttttctttcctcccttaccccaaattcattgagcacttaaaggagcagagatgcagccagtgtctgggctcccccagtggtgaaatgatctggaagctagatgctagtaacaggtagtgattgggttttttgagtatttttccggggaatgtggtacccctgactgtaagtggtgggagagggaggggggttaatggaactgggtctgggattattttaaaattatatatatatatataaagatatattcttacatcttttctttgccctctgtgctttgaaagcactggataaattgtttggttttgcttttctctcttccacaaaattggaagctttttttaaaaatgttttccccacaagtcatcttgccttgtggcatgtctgtctagcctcttcctccctccctcatgatgaagtgccatttctgttacgtctccctctccccaagctcagaggtgctcagaggtacgagatgcccaagtttgtcagttgagattaaaagtaaggaacagagaatgtgcaataccgtctggctgggggctgtccctgccctgccctgagctgagtcctttccctgggagccaggccaccttagaatggggtttggaagtaagatgtatagagttggggaatcatggagaaggaaagcctatagtcgagtgcctgcttaggtgctgaggtcacaggggagatggtggaatcttccctgtttttatcccctcagggtcagttacatagaagctgcttcttgactagtatagctcggtgaccctttgttcaaccgctgaggtttgatttcttaccctttcttctccccattttcatactcttcccagggattagtgatggaggtgaggtctccctaatcatggtaaagtgttaaccttccacctcctcccttccctcctccttcctcatccttctgtcttcctcaattctccgtctcttttttttcatcactgattgccttgtgtccctccaagtctacttgttactatccatctccaggctctgggccgtgtagacactaaacctcatgccctaaggacaggaggaaagaccctctgtttggagcattattagtagagtgaggatcccaccagttctgcctggcttcctccatccccagaggcactaaaagcagtattttaaggttggtgtcttactccctggaagcctgaaatgggtggaatagcggtaaggcttgagtaaaactaggggacagaggttcttatttgtcgattttattttataatttgaccacagcatctgaactccctctctccctggaataagtatttttcccacatttttggatatatgtatggtagacaatttttttttaagacacagagataaatgttttcctgctttggttacctttcctttcccctttaaaaggaattagctatagaactgctttgtaaagatgcttcttgatattttacttttgttccttttccctaatcattcccttttctccccactcctccagaaggcataacccttctctccacaccccctacccccacccccgtcctaggctcccatcctttccatcaagaccttcattagcttatgatatttgctgccgagatgttataacaaggactcgttcatgtatataagctatttcttgatccatttaaaaggaattgtacattgtgtagaaaaaaaaaaaaacctgaaaaagagaaaaaaaagccctagccatggatattgtgaaactgtgttatgtcattttgtaatgtgcccgtttgtgtatgatccgtgcaaaagggtttctggggaaggggagggggtagggaggcagggctgtggagggtgggtaggggagtgggccgggcccagcacactgagactggcagctgctccaaccccatccctccttagagatgccacctcccccaccacccacccctaatttgtgccttgcctccccaccctggagtagtccctccgggtcaccagcactgccttggcagagcccactccctaccctaacctgcccaccctccctatcccccagcattaggttgatactgtggggaagtgctgggggctgggaggtagccgaggaatggggcagttcccgggggcatcgaaaccaagtattattatgaattgtaattgtatttgcactgtttttttcctctgattgcatcagcatatatacaatatacctatataacaaaattcagtgtcaagctttcttatgcaagggatttcccccaccccacctcctcaaaaaagaaagaacctagtcttatgggcctttgagggtggattgtcaggggatgatagaaaggattttaataagtcatcctgaggaaatttcacctagtgagagccacatccatctgcacagccttaggctgcgtgaaccgaggtgaggctgagctcctgtgaaagccaagacctcctggtccaggactttgtagagtaaaaagaaccaccaacacaaaaggggttgagggggctacaatctggagacctggggtctcctactaacttgctatatgatctttggtagagttaattttctgagtatcaattttcttatctgtgaagtgaagagggggatcatctggccaccaagtttaaaattctatacttctcacctgccaaaaccaaaaaacaacttgaggtgaggaaagtgttgggcccagaaaccagggaggaactgaaagtgactcgcgttgaagtggttatgtgtatgacaatgctcttggagaactgccagtcctctatggttacccttgatttgggagaggcagcagagtcatgtccagggcatcagaccagtgacatctttgcctttatgcctctagtcatctgagggcggggactaggcctcaagccccatctcacagccaaccacagagcccttaagggtggttgacaattgaatgccccaggttggtgctttagttatttactccctttgtgagctacaggatgtgtaacttttcccccatcttggtgataaaataggagagcgcagacacagcccacattttgtctcctttcctcagatttcatctgaaccccgctaaaggcagctgtttcacagtctgtctccttcaggggcccaatttccccacagcctgggctgagtactcctactctcttctttaggttctgggctgataaagcctggagagggtacagggtgatgggtgaagccctggtgaaggtgaaaggatagattggggttggggggtggggagcagggaggtgggatggggaatggccttccctgaatagggtgggtgggaggggaacaagacccttttgcacaactctctttaagtttcctttatttcttttttaactcattctgattttctgcattgtgtttgggaaataaaatgaaaaaactaagaccaatagaaactggttttcaaaaaggcaaatacactcccatctgtttcagatgctgctgagcatttcagcagtgacagattcaaataataagctaatttttggagaaaggattaaaagaaaaaaaaactttgtaatatttatcacttgcaagctatgtttaataaagaaaggaatggtttctaaaa

SEQ ID NO: 286068 - DNA, 1782 bp, Artificial Sequence
  derived and/or modified sequence
atggacagaatgaccgaggacgccctgagactgaacctgctgaagagaagcctggaccccgccgacgagagagacgacgtgctggccaagagactgaagatggagggccacgaggccatggagagactgaagatgctggccctgctgaagagaaaggacctggccaacctggaggtgccccacgagctgcccaccaagcaggacggcagcggcgtgaagggctacgaggagaagctgaacggcaacctgagaccccacggcgacaacagaaccgccggcagacccggcaaggagaacatcaacgacgagcccgtggacatgagcgccagaagaagcgagcccgagagaggcagactgacccccagccccgacatcatcgtgctgagcgacaacgaggccagcagccccagaagcagcagcagaatggaggagagactgaaggccgccaacctggagatgttcaagggcaagggcatcgaggagagacagcagctgatcaagcagctgagagacgagctgagactggaggaggccagactggtgctgctgaagaagctgagacagagccagctgcagaaggagaacgtggtgcagaagacccccgtggtgcagaacgccgccagcatcgtgcagcccagccccgcccacgtgggccagcagggcctgagcaagctgcccagcagacccggcgcccagggcgtggagccccagaacctgagaaccctgcagggccacagcgtgatcagaagcgccaccaacaccaccctgccccacatgctgatgagccagagagtgatcgcccccaaccccgcccagctgcagggccagagaggcccccccaagcccggcctggtgagaaccaccacccccaacatgaaccccgccatcaactaccagccccagagcagcagcagcgtgccctgccagagaaccaccagcagcgccatctacatgaacctggccagccacatccagcccggcaccgtgaacagagtgagcagccccctgcccagccccagcgccatgaccgacgccgccaacagccaggccgccgccaagctggccctgagaaagcagctggagaagaccctgctggagatccccccccccaagccccccgcccccctgctgcacttcctgcccagcgccgccaacagcgagttcatctacatggtgggcctggaggaggtggtgcagagcgtgatcgacagccagggcaagagctgcgccagcctgctgagagtggagcccttcgtgtgcgcccagtgcagaaccgacttcaccccccactggaagcaggagaagaacggcaagatcctgtgcgagcagtgcatgaccagcaaccagaagaaggccctgaaggccgagcacaccaacagactgaagaacgccttcgtgaaggccctgcagcaggagcaggagatcgagcagagactgcagcagcaggccgccctgagccccaccaccgcccccgccgtgagcagcgtgagcaagcaggagaccatcatgagacaccacaccctgagacaggccccccagccccagagcagcctgcagagaggcatccccaccagcgccagaagcatgctgagcaacttcgcccaggccccccagctgagcgtgcccggcggcctgctgggcatgcccggcgtgaacatcgcctacctgaacaccggcatcggcggccacaagggccccagcctggccgacagacagagagagtacctgctggacatgatcccccccagaagcatcagccagagcatcagcggccagaagtag

SEQ ID NO: 286069 - protein, 1256 aa, Artificial Sequence
  derived and/or modified sequence
MYLWLKLLAFGFAFLDTEVFVTGQSPTPSPTGLTTAKMPSVPLSSDPLPTHTTAFSPASTFERENDFSETTTSLSPDNTSTQVSPDSLDNASAFNTTGVSSVQTPHLPTHADSQTPSAGTDTQTFSGSAANAKLNPTPGSNAISDAYLNASETTTLSPSGSAVISTTTIATTPSKPTCDEKYANITVDYLYNKETKLFTAKLNVNENVECGNNTCTNNEVHNLTECKNASVSISHNSCTAPDKTLILDVPPGVEKFQLHDCTQVEKADTTICLKWKNIETFTCDTQNITYRFQCGNMIFDNKEIKLENLEPEHEYKCDSEILYNNHKFTNASKIIKTDFGSPGEPQIIFCRSEAAHQGVITWNPPQRSFHNFTLCYIKETEKDCLNLDKNLIKYDLQNLKPYTKYVLSLHAYIIAKVQRNGSAAMCHFTTKSAPPSQVWNMTVSMTSDNSMHVKCRPPRDRNGPHERYHLEVEAGNTLVRNESHKNCDFRVKDLQYSTDYTFKAYFHNGDYPGEPFILHHSTSYNSKALIAFLAFLIIVTSIALLVVLYKIYDLHKKRSCNLDEQQELVERDDEKQLMNVEPIHADILLETYKRKIADEGRLFLAEFQSIPRVFSKFPIKEARKPFNQNKNRYVDILPYDYNRVELSEINGDAGSNYINASYIDGFKEPRKYIAAQGPRDETVDDFWRMIWEQKATVIVMVTRCEEGNRNKCAEYWPSMEEGTRAFGDVVVKINQHKRCPDYIIQKLNIVNKKEKATGREVTHIQFTSWPDHGVPEDPHLLLKLRRRVNAFSNFFSGPIVVHCSAGVGRTGTYIGIDAMLEGLEAENKVDVYGYVVKLRRQRCLMVQVEAQYILIHQALVEYNQFGETEVNLSELHPYLHNMKKRDPPSEPSPLEAEFQRLPSYRSWRTQHIGNQEENKSKNRNSNVIPYDYNRVPLKHELEMSKESEHDSDESSDDDSDSEEPSKYINASFIMSYWKPEVMIAAQGPLKETIGDFWQMIFQRKVKVIVMLTELKHGDQEICAQYWGEGKQTYGDIEVDLKDTDKSSTYTLRVFELRHSKRKDSRTVYQYQYTNWSVEQLPAEPKELISMIQVVKQKLPQKNSSEGNKHHKSTPLLIHCRDGSQQTGIFCALLNLLESAETEEVVDIFQVVKALRKARPGMVSTFEQYQFLYDVIASTYPAQNGQVKKNNHQEDKIEFDNEVDKVKQDANCVNPLGAPEKLPEAKEQAEGSEPTSGTEGPEHSVNGPASPALNQGS

SEQ ID NO: 286070 - protein, 116 aa, Artificial Sequence
  derived and/or modified sequence
MYLWLKLLAFGFAFLDTEVFVTGQSPTPSPTGLTTAKMPSVPLSSDPLPTHTTAFSPASTFERENDFSETTTSLSPDNTSTQVSPDSLDNASAFNTTGVSSVQTPHLPTHADSQTP

SEQ ID NO: 286071 - protein, 756 aa, Artificial Sequence
  derived and/or modified sequence
MYLWLKLLAFGFAFLDTEVFVTGQSPTPSPTGLTTAKMPSVPLSSDPLPTHTTAFSPASTFERENDFSETTTSLSPDNTSTQVSPDSLDNASAFNTTGVSSVQTPHLPTHADSQTPSAGTDTQTFSGSAANAKLNPTPGSNAISDAYLNASETTTLSPSGSAVISTTTIATTPSKPTCDEKYANITVDYLYNKETKLFTAKLNVNENVECGNNTCTNNEVHNLTECKNASVSISHNSCTAPDKTLILDVPPGVEKFQLHDCTQVEKADTTICLKWKNIETFTCDTQNITYRFQCGNMIFDNKEIKLENLEPEHEYKCDSEILYNNHKFTNASKIIKTDFGSPGEPQIIFCRSEAAHQGVITWNPPQRSFHNFTLCYIKETEKDCLNLDKNLIKYDLQNLKPYTKYVLSLHAYIIAKVQRNGSAAMCHFTTKSAPPSQVWNMTVSMTSDNSMHVKCRPPRDRNGPHERYHLEVEAGNTLVRNESHKNCDFRVKDLQYSTDYTFKAYFHNGDYPGEPFILHHSTSYNSKALIAFLAFLIIVTSIALLVVLYKIYDLHKKRSCNLDEQQELVERDDEKQLMNVEPIHADILLETYKRKIADEGRLFLAEFQSIPRVFSKFPIKEARKPFNQNKNRYVDILPYDYNRVELSEINGDAGSNYINASYIDGFKEPRKYIAAQGPRDETVDDFWRMIWEQKATVIVMVTRCEEGNRNKCAEYWPSMEEGTRAFGDVVVKINQHKRCPDYIIQKLNIVNKQKSK

SEQ ID NO: 286072 - DNA, 3771 bp, Artificial Sequence
  derived and/or modified sequence
atgtacctgtggctgaagctgctggccttcggcttcgccttcctggacaccgaggtgttcgtgaccggccagagccccacccccagccccaccggcctgaccaccgccaagatgcccagcgtgcccctgagcagcgaccccctgcccacccacaccaccgccttcagccccgccagcaccttcgagagagagaacgacttcagcgagaccaccaccagcctgagccccgacaacaccagcacccaggtgagccccgacagcctggacaacgccagcgccttcaacaccaccggcgtgagcagcgtgcagaccccccacctgcccacccacgccgacagccagacccccagcgccggcaccgacacccagaccttcagcggcagcgccgccaacgccaagctgaaccccacccccggcagcaacgccatcagcgacgcctacctgaacgccagcgagaccaccaccctgagccccagcggcagcgccgtgatcagcaccaccaccatcgccaccacccccagcaagcccacctgcgacgagaagtacgccaacatcaccgtggactacctgtacaacaaggagaccaagctgttcaccgccaagctgaacgtgaacgagaacgtggagtgcggcaacaacacctgcaccaacaacgaggtgcacaacctgaccgagtgcaagaacgccagcgtgagcatcagccacaacagctgcaccgcccccgacaagaccctgatcctggacgtgccccccggcgtggagaagttccagctgcacgactgcacccaggtggagaaggccgacaccaccatctgcctgaagtggaagaacatcgagaccttcacctgcgacacccagaacatcacctacagattccagtgcggcaacatgatcttcgacaacaaggagatcaagctggagaacctggagcccgagcacgagtacaagtgcgacagcgagatcctgtacaacaaccacaagttcaccaacgccagcaagatcatcaagaccgacttcggcagccccggcgagccccagatcatcttctgcagaagcgaggccgcccaccagggcgtgatcacctggaaccccccccagagaagcttccacaacttcaccctgtgctacatcaaggagaccgagaaggactgcctgaacctggacaagaacctgatcaagtacgacctgcagaacctgaagccctacaccaagtacgtgctgagcctgcacgcctacatcatcgccaaggtgcagagaaacggcagcgccgccatgtgccacttcaccaccaagagcgccccccccagccaggtgtggaacatgaccgtgagcatgaccagcgacaacagcatgcacgtgaagtgcagaccccccagagacagaaacggcccccacgagagataccacctggaggtggaggccggcaacaccctggtgagaaacgagagccacaagaactgcgacttcagagtgaaggacctgcagtacagcaccgactacaccttcaaggcctacttccacaacggcgactaccccggcgagcccttcatcctgcaccacagcaccagctacaacagcaaggccctgatcgccttcctggccttcctgatcatcgtgaccagcatcgccctgctggtggtgctgtacaagatctacgacctgcacaagaagagaagctgcaacctggacgagcagcaggagctggtggagagagacgacgagaagcagctgatgaacgtggagcccatccacgccgacatcctgctggagacctacaagagaaagatcgccgacgagggcagactgttcctggccgagttccagagcatccccagagtgttcagcaagttccccatcaaggaggccagaaagcccttcaaccagaacaagaacagatacgtggacatcctgccctacgactacaacagagtggagctgagcgagatcaacggcgacgccggcagcaactacatcaacgccagctacatcgacggcttcaaggagcccagaaagtacatcgccgcccagggccccagagacgagaccgtggacgacttctggagaatgatctgggagcagaaggccaccgtgatcgtgatggtgaccagatgcgaggagggcaacagaaacaagtgcgccgagtactggcccagcatggaggagggcaccagagccttcggcgacgtggtggtgaagatcaaccagcacaagagatgccccgactacatcatccagaagctgaacatcgtgaacaagaaggagaaggccaccggcagagaggtgacccacatccagttcaccagctggcccgaccacggcgtgcccgaggacccccacctgctgctgaagctgagaagaagagtgaacgccttcagcaacttcttcagcggccccatcgtggtgcactgcagcgccggcgtgggcagaaccggcacctacatcggcatcgacgccatgctggagggcctggaggccgagaacaaggtggacgtgtacggctacgtggtgaagctgagaagacagagatgcctgatggtgcaggtggaggcccagtacatcctgatccaccaggccctggtggagtacaaccagttcggcgagaccgaggtgaacctgagcgagctgcacccctacctgcacaacatgaagaagagagacccccccagcgagcccagccccctggaggccgagttccagagactgcccagctacagaagctggagaacccagcacatcggcaaccaggaggagaacaagagcaagaacagaaacagcaacgtgatcccctacgactacaacagagtgcccctgaagcacgagctggagatgagcaaggagagcgagcacgacagcgacgagagcagcgacgacgacagcgacagcgaggagcccagcaagtacatcaacgccagcttcatcatgagctactggaagcccgaggtgatgatcgccgcccagggccccctgaaggagaccatcggcgacttctggcagatgatcttccagagaaaggtgaaggtgatcgtgatgctgaccgagctgaagcacggcgaccaggagatctgcgcccagtactggggcgagggcaagcagacctacggcgacatcgaggtggacctgaaggacaccgacaagagcagcacctacaccctgagagtgttcgagctgagacacagcaagagaaaggacagcagaaccgtgtaccagtaccagtacaccaactggagcgtggagcagctgcccgccgagcccaaggagctgatcagcatgatccaggtggtgaagcagaagctgccccagaagaacagcagcgagggcaacaagcaccacaagagcacccccctgctgatccactgcagagacggcagccagcagaccggcatcttctgcgccctgctgaacctgctggagagcgccgagaccgaggaggtggtggacatcttccaggtggtgaaggccctgagaaaggccagacccggcatggtgagcaccttcgagcagtaccagttcctgtacgacgtgatcgccagcacctaccccgcccagaacggccaggtgaagaagaacaaccaccaggaggacaagatcgagttcgacaacgaggtggacaaggtgaagcaggacgccaactgcgtgaaccccctgggcgcccccgagaagctgcccgaggccaaggagcaggccgagggcagcgagcccaccagcggcaccgagggccccgagcacagcgtgaacggccccgccagccccgccctgaaccagggcagctag

SEQ ID NO: 286073 - DNA, 351 bp, Artificial Sequence
  derived and/or modified sequence
atgtacctgtggctgaagctgctggccttcggcttcgccttcctggacaccgaggtgttcgtgaccggccagagccccacccccagccccaccggcctgaccaccgccaagatgcccagcgtgcccctgagcagcgaccccctgcccacccacaccaccgccttcagccccgccagcaccttcgagagagagaacgacttcagcgagaccaccaccagcctgagccccgacaacaccagcacccaggtgagccccgacagcctggacaacgccagcgccttcaacaccaccggcgtgagcagcgtgcagaccccccacctgcccacccacgccgacagccagaccccctag

SEQ ID NO: 286074 - DNA, 2271 bp, Artificial Sequence
  derived and/or modified sequence
atgtacctgtggctgaagctgctggccttcggcttcgccttcctggacaccgaggtgttcgtgaccggccagagccccacccccagccccaccggcctgaccaccgccaagatgcccagcgtgcccctgagcagcgaccccctgcccacccacaccaccgccttcagccccgccagcaccttcgagagagagaacgacttcagcgagaccaccaccagcctgagccccgacaacaccagcacccaggtgagccccgacagcctggacaacgccagcgccttcaacaccaccggcgtgagcagcgtgcagaccccccacctgcccacccacgccgacagccagacccccagcgccggcaccgacacccagaccttcagcggcagcgccgccaacgccaagctgaaccccacccccggcagcaacgccatcagcgacgcctacctgaacgccagcgagaccaccaccctgagccccagcggcagcgccgtgatcagcaccaccaccatcgccaccacccccagcaagcccacctgcgacgagaagtacgccaacatcaccgtggactacctgtacaacaaggagaccaagctgttcaccgccaagctgaacgtgaacgagaacgtggagtgcggcaacaacacctgcaccaacaacgaggtgcacaacctgaccgagtgcaagaacgccagcgtgagcatcagccacaacagctgcaccgcccccgacaagaccctgatcctggacgtgccccccggcgtggagaagttccagctgcacgactgcacccaggtggagaaggccgacaccaccatctgcctgaagtggaagaacatcgagaccttcacctgcgacacccagaacatcacctacagattccagtgcggcaacatgatcttcgacaacaaggagatcaagctggagaacctggagcccgagcacgagtacaagtgcgacagcgagatcctgtacaacaaccacaagttcaccaacgccagcaagatcatcaagaccgacttcggcagccccggcgagccccagatcatcttctgcagaagcgaggccgcccaccagggcgtgatcacctggaaccccccccagagaagcttccacaacttcaccctgtgctacatcaaggagaccgagaaggactgcctgaacctggacaagaacctgatcaagtacgacctgcagaacctgaagccctacaccaagtacgtgctgagcctgcacgcctacatcatcgccaaggtgcagagaaacggcagcgccgccatgtgccacttcaccaccaagagcgccccccccagccaggtgtggaacatgaccgtgagcatgaccagcgacaacagcatgcacgtgaagtgcagaccccccagagacagaaacggcccccacgagagataccacctggaggtggaggccggcaacaccctggtgagaaacgagagccacaagaactgcgacttcagagtgaaggacctgcagtacagcaccgactacaccttcaaggcctacttccacaacggcgactaccccggcgagcccttcatcctgcaccacagcaccagctacaacagcaaggccctgatcgccttcctggccttcctgatcatcgtgaccagcatcgccctgctggtggtgctgtacaagatctacgacctgcacaagaagagaagctgcaacctggacgagcagcaggagctggtggagagagacgacgagaagcagctgatgaacgtggagcccatccacgccgacatcctgctggagacctacaagagaaagatcgccgacgagggcagactgttcctggccgagttccagagcatccccagagtgttcagcaagttccccatcaaggaggccagaaagcccttcaaccagaacaagaacagatacgtggacatcctgccctacgactacaacagagtggagctgagcgagatcaacggcgacgccggcagcaactacatcaacgccagctacatcgacggcttcaaggagcccagaaagtacatcgccgcccagggccccagagacgagaccgtggacgacttctggagaatgatctgggagcagaaggccaccgtgatcgtgatggtgaccagatgcgaggagggcaacagaaacaagtgcgccgagtactggcccagcatggaggagggcaccagagccttcggcgacgtggtggtgaagatcaaccagcacaagagatgccccgactacatcatccagaagctgaacatcgtgaacaagcagaagagcaagtag

SEQ ID NO: 286075 - DNA, 3771 bp, Artificial Sequence
  derived and/or modified sequence
atgtatttgtggcttaaactgctggcattcggattcgcgttcttggacacagaggtctttgtaactggtcagtcgccgaccccatctcctacaggcctgactactgcgaagatgccatctgtgccattgtcctctgaccccctgcctactcacactactgccttttcgcctgcttccaccttcgagcgggagaatgacttcagcgagaccaccacatccttatcacccgacaacacgagcacccaggtgtcacccgattccttggataatgccagcgcctttaatacgaccggagtgtcctccgttcagaccccccatctgccaacgcatgccgattcccagacgccctcggccggtactgacacccaaacattctctgggtcggctgccaatgccaaattaaatccaaccccgggctcaaacgccatcagcgacgcttatctgaatgcctctgagactaccacactgtctcctagtgggtcggctgtcatctccacgactactattgctaccacacccagcaaaccaacctgcgacgaaaaatatgctaacattaccgtggactacctgtacaataaggaaactaagctgtttacagccaaactgaacgtcaacgaaaacgtggaatgcggcaacaatacttgcaccaataatgaagttcataacttaacggagtgtaagaacgcctctgtaagtattagccataacagctgcaccgcgccagacaaaacactgatcctggatgtgcctcctggtgtcgagaagtttcaactgcacgactgcacacaggtggagaaggcagacaccaccatttgccttaaatggaaaaatattgaaaccttcacctgcgacacccagaacataacatataggttccagtgcgggaacatgatcttcgacaacaaggagataaaactcgaaaatcttgagcccgagcatgagtacaagtgcgacagcgagatcctttacaataatcacaagttcacaaatgcttctaagattataaagactgactttggatcgcctggagaacctcaaatcatattttgtcgcagtgaggccgcccaccagggggtgatcacctggaacccccctcagagatccttccacaatttcacactatgctacataaaggaaaccgagaaggattgtctgaacttggataagaacctgattaagtacgacttacagaatcttaagccgtataccaagtacgtcttgtctctccacgcatatattatcgccaaagtgcagcggaatgggtccgccgccatgtgtcacttcaccactaagagtgcccctccctcacaggtgtggaacatgactgtatctatgacgtccgataattctatgcacgtcaaatgccgcccaccgcgcgacagaaacggtccccatgaacgataccatcttgaggtggaggcgggcaataccctggtcaggaacgagagccacaagaattgcgacttcagggtgaaagacctgcagtatagtacagactacacatttaaagcgtattttcataacggtgattatcccggggagcctttcattctccaccactccacaagctacaattccaaagccctgatcgcgttcctggcatttctcataatcgtgacaagcattgctcttctggtagtgctttataagatttacgatcttcacaagaagcggtcttgcaacctggatgagcagcaagagttagtcgaacgtgacgatgagaaacagctcatgaatgtggagcctattcacgccgacatcttgctggaaacttacaagcggaaaatcgccgatgagggtagactgttccttgctgaatttcagagtattccgagagtcttctcaaagttcccaattaaggaggcaagaaagcctttcaatcagaataaaaaccggtacgtggacatcttaccatacgactataacagggtagagctgtctgagatcaatggagacgccgggtccaactacattaacgcatcctacattgacggctttaaagaaccgcgcaagtatatcgccgcacagggcccgagagacgaaactgtcgacgatttttggagaatgatttgggagcagaaggcaaccgtgattgttatggtcactcggtgtgaggaagggaataggaataaatgcgcagagtactggccttctatggaggaaggtacacgggctttcggtgatgttgtcgtgaagattaatcagcacaagcggtgtcccgactacatcattcaaaaactgaatatagtgaataagaaagagaaggccacgggtagggaagttacgcacatccagttcaccagctggcctgaccatggcgtcccggaggatcctcatctgttgcttaagcttaggaggagggtgaatgccttttccaactttttcagtgggccaattgtcgttcactgtagtgctggagtgggccggaccggaacgtatataggcattgacgcaatgctcgagggattagaggcagaaaacaaggtggatgtgtatggctacgtggtgaagttacggagacaacggtgtctaatggtgcaggtggaagcgcagtacattctcattcatcaggcgctcgtggagtacaatcaatttggggaaactgaagtcaacctctctgagctgcacccctatttacacaacatgaagaagagagatccccctagcgaaccgtcccctctggaagcagagttccagaggttgccctcttatcgctcctggcggacacagcacatcgggaatcaagaggagaataagtctaaaaaccgcaacagcaatgtcattccttatgactataatcgagtacctctgaagcacgaacttgagatgtccaaggagagtgagcatgactccgacgaatctagtgatgacgactctgacagcgaggagccctccaaatatataaacgcatcctttatcatgtcttactggaaacccgaggtgatgattgctgcccaggggccactcaaagagaccattggcgatttttggcagatgatctttcagcgaaaagtgaaggtgatagttatgctgactgagcttaagcacggcgatcaggagatctgtgcccagtactggggtgaaggaaagcagacatatggtgatatagaagtggacctgaaggatacagacaagtcatccacctatactttgagggtgttcgagctgcgtcatagtaagagaaaggacagccgtaccgtgtaccagtaccagtataccaactggtctgtagagcagctccccgccgagcctaaggagctcatatccatgatacaggtcgtgaaacagaagctgcctcaaaaaaactcttccgagggaaataaacaccataaaagcacaccacttcttatccactgtagagacgggtctcagcagacaggcatcttctgtgctctgctgaacttactggaatcagctgagacggaggaagtcgttgacatctttcaggttgtgaaggcgctgcggaaggctaggccgggaatggtgtcaacgtttgaacaatatcagttcttatatgacgttatcgccagtacctatccagcgcagaatggccaagtcaagaaaaacaatcatcaggaagacaagatagaatttgataatgaggtggataaagtgaaacaagatgccaactgcgttaacccgctgggagctccagagaagctgccggaagccaaggagcaggcagagggtagcgagcctacatctggtactgaagggcccgagcactctgtgaatggacccgcctcaccagcactgaaccaaggatcctag

SEQ ID NO: 286076 - DNA, 351 bp, Artificial Sequence
  derived and/or modified sequence
atgtatctgtggctgaagctccttgctttcggtttcgctttccttgacactgaagtctttgtgacaggtcagtctcccacccctagtccaacaggccttacgaccgcaaagatgccttcggtccctctctctagcgatcccctgcctacccacactaccgctttctctccagctagcaccttcgagcgcgagaatgatttctctgagactaccacaagcctctcgccagacaatacttctacacaggtatcccctgactctctcgataatgccagtgcattcaatacgaccggagtgagctctgtacagactcctcaccttcctacccacgctgattctcagaccccttag

SEQ ID NO: 286077 - DNA, 2271 bp, Artificial Sequence
  derived and/or modified sequence
atgtatctctggctgaaattactggcatttggtttcgcatttctcgacacagaggtctttgtgaccggccagtctcctacacccagccctaccggcctgaccaccgccaaaatgcctagcgtgcccttgagctctgacccacttccaacgcacacaactgctttcagtccagccagcaccttcgaaagagagaatgatttttcagaaaccacaacgagtctttctcccgacaatacgagcacacaggtgagtcccgatagtctggataatgcgtcggcatttaataccaccggggtgtcctccgtgcaaaccccccatctacctacccacgccgattcccagacaccaagtgcaggcaccgatacccaaacattttccggatctgctgccaacgccaagctgaatcccaccccgggcagcaatgctatatccgacgcatacttgaatgcctccgagacaaccactctgtcacctagcggcagtgccgtcattagtactacgacaattgccactacccctagcaagcccacatgcgatgaaaaatacgctaacatcactgtggactacctgtacaataaggaaactaaactttttactgctaagctaaacgttaacgagaatgtagagtgcgggaacaatacatgtactaacaatgaagtgcataatttgaccgagtgtaagaatgccagtgtcagcatttctcacaacagctgcacagcgccggataagactctgattctggacgtgcctccaggagttgaaaagttccaactccacgactgtacacaggtggagaaggcagatacaacaatttgtcttaagtggaaaaatattgagacattcacatgtgatacccagaacatcacttataggttccaatgcgggaacatgatcttcgataataaggagattaaattggagaatctggaacccgagcacgaatataagtgcgacagcgaaatcctttataacaaccacaaattcactaatgccagtaaaatcattaagactgacttcggatcacccggggagcctcagatcattttctgtcgatccgaggccgcgcatcaaggggtgattacttggaatccaccccagagatcttttcacaactttacactgtgctatataaaagagacagaaaaggattgcctgaacctggacaagaatctgattaaatacgatctgcagaacctgaaaccatatactaagtacgtgctgagcctccatgcctatatcatagcaaaggtccaacggaacgggagcgcagctatgtgccacttcactacgaagtcggctcccccctcccaggtgtggaatatgaccgtgagcatgacatccgataattccatgcatgtgaaatgtagaccaccaagggatcggaacggtccacatgagaggtaccacttagaggtggaagcgggcaacactctcgtgcggaatgagtctcataagaactgcgacttcagggtcaaagacctgcagtatagcacagactatacctttaaggcttacttccacaacggcgattatccaggagagccttttattttacaccactctaccagctacaactccaaagcacttatcgcctttctggctttcctaattattgtgacatctatcgctctgctggtcgtgctctacaagatttatgacctgcataaaaaacggagctgtaatttagacgaacaacaggagctggtggagagagacgacgaaaagcagttgatgaacgtagaacccattcatgcagatatcctactcgagacatataaacggaagatagccgatgaggggcggctcttcctggcggagttccagagcatcccaagggttttctccaaatttccgatcaaagaagcccgtaagcccttcaaccaaaacaaaaacaggtatgtcgacatcctgccctacgactacaacagggttgagctgagtgaaattaacggcgatgccgggtcaaactacatcaatgcctcctatattgacggcttcaaagaaccgcgaaagtacattgcagcacagggacctcgggacgagactgtcgacgatttctggagaatgatttgggaacagaaggcgaccgtgatcgtgatggtgacacggtgtgaggaaggaaacaggaataaatgcgccgagtactggccatccatggaagagggaacacgggcttttggtgacgttgtcgtcaagatcaatcagcataagcgttgtccagactacatcatacagaagctgaacatcgtcaacaaacagaaaagcaaatag

SEQ ID NO: 286078 - DNA, 3771 bp, Artificial Sequence
  derived and/or modified sequence
atgtacctgtggctgaagctgctggccttcggctttgccttcctggacacagaggtgtttgtgacaggccagagccccacccccagccccaccggcctgaccacagccaagatgcccagcgtgcccctgagcagtgaccccctgcccacccacaccacagccttctccccagccagcacctttgagcgggagaatgacttcagcgagaccaccaccagcctgagcccagacaacaccagcacccaggtgtccccagacagcctggacaatgccagcgccttcaacaccactggagtgtcctctgtgcagaccccccacctgcccacccatgctgacagccagaccccatctgctggaacagacacccagaccttcagcggcagcgctgccaatgccaagctgaaccccaccccaggcagcaatgccatcagtgatgcctacctgaatgccagcgagaccaccaccctgagccccagcggcagcgctgtgatcagcaccaccaccatcgccaccacccccagcaagcccacctgtgatgagaagtatgccaacatcaccgtggactacctgtacaacaaggagaccaagctgttcaccgccaagctgaatgtgaatgaaaatgtggagtgtggcaacaacacctgcaccaacaatgaggtgcacaacctgacagagtgcaagaatgcctctgtgtccatcagccacaacagctgcacagccccagacaagaccctcatcctggatgtgcccccaggagtggagaagttccagctgcatgactgcacccaggtggagaaggctgacaccaccatctgcctgaagtggaagaacatcgagaccttcacctgtgacacccagaacatcacctaccgcttccagtgtggcaacatgatctttgacaacaaggagatcaagctggagaacctggagcctgagcacgagtacaagtgtgacagcgagatcctgtacaacaaccacaagttcaccaatgccagcaagatcatcaagacagactttggcagccctggagagccccagatcatcttctgccgctctgaggccgcccaccagggcgtcatcacctggaaccccccccagaggagcttccacaacttcaccctgtgctacatcaaggagacagagaaggactgcctgaacctggacaagaacctgatcaagtatgacctgcagaacctgaagccctacaccaagtatgtgctgagcctgcacgcctacatcatcgccaaggtgcagagaaatggcagcgctgccatgtgccacttcaccaccaagagcgccccacccagccaggtgtggaacatgacagtgtccatgaccagtgacaacagcatgcacgtgaagtgcaggcctccccgggacagaaatggcccccatgagcgctaccacctggaggtggaggccggcaacaccctggtgagaaatgaaagccacaagaactgtgacttccgggtgaaggacctgcagtacagcacagactacaccttcaaggcctacttccacaacggggactacccaggagagcccttcatcctgcaccacagcaccagctacaacagcaaggccctgattgccttcctggccttcctgatcatcgtgaccagcatcgccctgctggtggtgctgtacaagatctatgacctgcacaagaagaggagctgcaacctggatgagcagcaggagctggtggagagagatgatgagaagcagctgatgaatgtggagcccatccatgctgacatcctgctggagacctacaagaggaagattgctgatgagggccgcctcttcctggccgagttccagagcatccccagggtcttcagcaagttccccatcaaggaggccaggaagcccttcaaccagaacaagaacagatatgtggacatcctgccctatgactacaacagagtggagctgtctgagatcaatggagatgctggcagcaactacatcaatgccagctacattgatggcttcaaggagcccaggaagtacatcgccgcccagggccccagagatgagaccgtggatgacttctggaggatgatctgggagcagaaggccaccgtcatcgtgatggtgacccgctgtgaggagggcaacagaaataaatgtgccgagtactggcccagcatggaggagggcacccgggcctttggagatgtggtggtgaagatcaaccagcacaagcgctgcccagactacatcatccagaagctgaacatcgtgaacaagaaggagaaggccaccggccgggaggtgacccacatccagttcacctcctggccagaccacggcgtgcctgaggacccccacctgctgctgaagctgcggcggcgggtgaatgccttcagcaacttcttcagcggccccatcgtggtgcactgcagcgctggggtgggccgcacaggcacctacatcggcattgatgccatgctggagggcctggaggccgagaacaaggtggatgtgtatggctacgtggtgaagctgcggcggcagcgctgcctgatggtgcaggtggaggcccagtacatcctgatccaccaggccctggtggagtacaaccagtttggagaaacagaggtgaacctgtctgagctgcacccctacctgcacaacatgaagaagagggaccccccatctgagcccagccccctggaggccgagttccagaggctgcccagctaccgctcctggaggacccagcacatcggcaaccaggaggagaacaagagcaagaacagaaacagcaatgtcatcccctatgactacaacagagtgcccctgaagcatgagctggagatgagcaaggagagcgagcatgacagtgatgagagcagtgatgatgacagcgacagcgaggagcccagcaagtacatcaatgccagcttcatcatgagctactggaagccagaggtgatgattgctgcccagggccccctgaaggagaccatcggggacttctggcagatgatcttccagaggaaggtgaaggtgattgtgatgctgacagagctgaagcacggggaccaggagatctgtgcccagtactggggcgagggcaagcagacctatggagacatcgaggtggacctgaaggacacagacaagagcagcacctacaccctgcgggtgtttgagctgcggcacagcaagaggaaggacagcaggacagtgtaccagtaccagtacaccaactggagcgtggagcagctgcctgctgagcccaaggagctgatctccatgatccaggtggtgaagcagaagctgccccagaagaacagcagcgagggcaacaagcaccacaagagcacccccctgctgatccactgcagagatggcagccagcagacaggcatcttctgtgccctgctgaacctgctggagagcgctgagacagaggaggtggtggacatcttccaggtggtgaaggccctgaggaaggcccggcccggcatggtgtccacctttgagcagtaccagttcctgtatgatgtgattgccagcacctacccagcccagaatggccaggtgaagaagaacaaccaccaggaggacaagattgaatttgacaatgaggtggacaaggtgaagcaggatgccaactgtgtgaaccccctgggcgcccctgagaagctgcctgaggccaaggagcaggccgagggcagcgagcccaccagcggcacagagggccctgagcacagcgtgaatggacctgccagccctgccctgaaccagggcagctag

SEQ ID NO: 286079 - DNA, 351 bp, Artificial Sequence
  derived and/or modified sequence
atgtacctgtggctgaagctgctggccttcggctttgccttcctggacacagaggtgtttgtgacaggccagagccccacccccagccccaccggcctgaccacagccaagatgcccagcgtgcccctgagcagtgaccccctgcccacccacaccacagccttctccccagccagcacctttgagcgggagaatgacttcagcgagaccaccaccagcctgagcccagacaacaccagcacccaggtgtccccagacagcctggacaatgccagcgccttcaacaccactggagtgtcctctgtgcagaccccccacctgcccacccatgctgacagccagaccccctag

SEQ ID NO: 286080 - DNA, 2271 bp, Artificial Sequence
  derived and/or modified sequence
atgtacctgtggctgaagctgctggccttcggctttgccttcctggacacagaggtgtttgtgacaggccagagccccacccccagccccaccggcctgaccacagccaagatgcccagcgtgcccctgagcagtgaccccctgcccacccacaccacagccttctccccagccagcacctttgagcgggagaatgacttcagcgagaccaccaccagcctgagcccagacaacaccagcacccaggtgtccccagacagcctggacaatgccagcgccttcaacaccactggagtgtcctctgtgcagaccccccacctgcccacccatgctgacagccagaccccatctgctggaacagacacccagaccttcagcggcagcgctgccaatgccaagctgaaccccaccccaggcagcaatgccatcagtgatgcctacctgaatgccagcgagaccaccaccctgagccccagcggcagcgctgtgatcagcaccaccaccatcgccaccacccccagcaagcccacctgtgatgagaagtatgccaacatcaccgtggactacctgtacaacaaggagaccaagctgttcaccgccaagctgaatgtgaatgaaaatgtggagtgtggcaacaacacctgcaccaacaatgaggtgcacaacctgacagagtgcaagaatgcctctgtgtccatcagccacaacagctgcacagccccagacaagaccctcatcctggatgtgcccccaggagtggagaagttccagctgcatgactgcacccaggtggagaaggctgacaccaccatctgcctgaagtggaagaacatcgagaccttcacctgtgacacccagaacatcacctaccgcttccagtgtggcaacatgatctttgacaacaaggagatcaagctggagaacctggagcctgagcacgagtacaagtgtgacagcgagatcctgtacaacaaccacaagttcaccaatgccagcaagatcatcaagacagactttggcagccctggagagccccagatcatcttctgccgctctgaggccgcccaccagggcgtcatcacctggaaccccccccagaggagcttccacaacttcaccctgtgctacatcaaggagacagagaaggactgcctgaacctggacaagaacctgatcaagtatgacctgcagaacctgaagccctacaccaagtatgtgctgagcctgcacgcctacatcatcgccaaggtgcagagaaatggcagcgctgccatgtgccacttcaccaccaagagcgccccacccagccaggtgtggaacatgacagtgtccatgaccagtgacaacagcatgcacgtgaagtgcaggcctccccgggacagaaatggcccccatgagcgctaccacctggaggtggaggccggcaacaccctggtgagaaatgaaagccacaagaactgtgacttccgggtgaaggacctgcagtacagcacagactacaccttcaaggcctacttccacaacggggactacccaggagagcccttcatcctgcaccacagcaccagctacaacagcaaggccctgattgccttcctggccttcctgatcatcgtgaccagcatcgccctgctggtggtgctgtacaagatctatgacctgcacaagaagaggagctgcaacctggatgagcagcaggagctggtggagagagatgatgagaagcagctgatgaatgtggagcccatccatgctgacatcctgctggagacctacaagaggaagattgctgatgagggccgcctcttcctggccgagttccagagcatccccagggtcttcagcaagttccccatcaaggaggccaggaagcccttcaaccagaacaagaacagatatgtggacatcctgccctatgactacaacagagtggagctgtctgagatcaatggagatgctggcagcaactacatcaatgccagctacattgatggcttcaaggagcccaggaagtacatcgccgcccagggccccagagatgagaccgtggatgacttctggaggatgatctgggagcagaaggccaccgtcatcgtgatggtgacccgctgtgaggagggcaacagaaataaatgtgccgagtactggcccagcatggaggagggcacccgggcctttggagatgtggtggtgaagatcaaccagcacaagcgctgcccagactacatcatccagaagctgaacatcgtgaacaagcagaagagcaagtag

SEQ ID NO: 286081 - DNA, 3771 bp, Artificial Sequence
  derived and/or modified sequence
atgtacctgtggctgaagctgctggccttcggcttcgccttcctggatacagaggtattcgtgactggccagtcaccaaccccctctcccacaggtctgaccacagctaaaatgccatctgttcctctaagctctgatccactgccgactcacacaaccgccttttcgcccgctagcacattcgaacgagagaacgacttctcagagacaaccacatctctcagccctgacaacacatccacacaagtcagtccagactcactagacaatgcgtctgccttcaacaccactggagtatcatcagtgcagactccacatctccccacccacgccgactcacagacacctagtgccggcactgacacacagaccttttccggcagcgccgcaaatgctaagctgaacccaactcctgggtcgaacgctatttctgacgcctatctcaacgcttccgaaaccaccactctttcgcctagtggatcagctgtcatttccacaacaaccatcgctacaacccctagtaagccaacttgcgatgagaagtacgccaacatcaccgtcgactacctgtacaataaagagactaagctgttcaccgctaagctgaacgtgaacgagaatgtcgagtgtggaaacaacacatgtaccaacaacgaagtgcacaacctaacagaatgtaagaacgcatctgtatctattagtcacaatagctgtacggctcccgataagacacttattctcgacgtccctcccggtgtcgagaaattccaactgcatgactgcactcaggttgagaaggccgataccaccatttgcctgaaatggaagaacatcgaaaccttcacctgcgatactcaaaacataacttatcgatttcagtgcggtaatatgatcttcgacaacaaggaaatcaaactcgaaaatctcgaacctgaacatgagtataaatgtgactcggagattctctacaacaaccacaagtttactaatgcatctaaaatcatcaagaccgatttcggcagtcctggagagcctcaaattatattttgcaggtcagaagccgcacatcagggcgtgatcacgtggaaccctcctcagaggagcttccacaattttaccctgtgctatattaaagaaaccgagaaagactgcttgaatctcgataagaacctgattaagtatgacctgcagaacctgaagccatacaccaagtacgtgctcagcctgcacgcgtatattattgcaaaagttcagcgcaacggttctgctgcaatgtgccatttcacaacgaagtccgcccccccatcacaagtgtggaatatgacagtgagcatgacatccgataacagcatgcacgtcaagtgccggcccccaagagacaggaacggaccacacgagcgctaccatctggaagttgaggctgggaacacgctggtgagaaacgagtcacataaaaactgcgacttccgcgtgaaagacctgcagtacagtaccgactatacctttaaggcatactttcacaatggagactaccccggagagcctttcatactgcaccactccacatcctataacagtaaggccttaatcgctttcttggcgtttctgataattgtcacgtccatagctctcctggtggtgttgtataaaatatatgacctgcataaaaaacgctcttgcaatctggatgagcagcaggaactggtggagagagacgatgagaaacagctaatgaacgtggagcctatccatgccgacattctcttggaaacctacaagcgaaagatcgcagatgaggggagacttttcctagcagagttccagtccataccaagagttttttctaaattcccaatcaaagaagctagaaagccctttaaccagaataagaaccggtacgtggacatcttgccttacgactataacagagtcgagctcagcgagatcaatggcgacgcaggcagcaactacatcaacgctagctatattgatggtttcaaggaaccccgtaaatatatcgctgcacaggggccacgagacgaaactgttgacgacttctggagaatgatctgggagcagaaagcaaccgtgattgtgatggttacacgatgcgaggagggtaaccgcaacaaatgcgctgaatattggcccagcatggaggaagggacccgtgcgttcggcgacgtggttgttaagatcaatcaacataagagatgtccagattacataatccagaagttgaatattgtaaacaagaaagagaaggccacaggacgagaggtgacccatattcagtttaccagctggccggaccatggcgttcccgaggatcctcacctgctgctcaagttacgccgtagggtgaacgctttctccaactttttttctggtccgatcgttgtgcattgcagcgcaggtgtgggtcggacgggaacatatattggcatcgatgcaatgttggagggtcttgaagccgaaaataaagttgatgtctatggctacgttgtgaagttacgacgccaacggtgccttatggtccaggttgaagctcagtatatactaatccaccaggcactggtggaatataaccagttcggagagactgaagtgaatctttcggagctgcatccttatcttcacaatatgaaaaaaagggatcctccatctgaaccgagcccgctagaggccgagttccagcggttgcctagctacaggagctggagaacgcagcatatcgggaatcaggaggaaaataagagtaagaacaggaattccaacgtgattccttatgattataatcgcgtgccactaaagcatgaactggaaatgtctaaagaatccgaacacgacagcgatgaaagctcagacgatgattctgactcagaagaaccctctaaatatatcaacgcgagcttcattatgtcttattggaaaccagaagtaatgatcgccgctcagggtccgctgaaggaaacaatcggcgatttctggcagatgatatttcagaggaaagtgaaggtgatagtgatgctcaccgagctaaagcacggggaccaggagatctgtgctcagtattggggtgagggcaagcagacatatggagatattgaagtggatctcaaagatacggataagagctcaacctatactctgagagtgttcgaactgagacactcgaaacgcaaagactcccggacagtttatcaatatcagtacactaactggagtgtggagcagctacccgcggagccaaaagaacttatctccatgattcaggtcgtaaagcagaagctgccccagaaaaactccagtgaaggtaataaacaccacaagtcaaccccattactcattcattgtcgggatggcagtcaacagaccggcatcttctgcgccctactcaacctattagagtccgccgagactgaggaggttgttgacattttccaggtggtcaaggccctgagaaaggcgcgccccgggatggtatctaccttcgagcagtatcagtttttgtatgatgtcattgcctccacttaccctgctcagaatgggcaagttaagaagaacaaccaccaggaggataagattgaattcgataacgaagtggacaaagtgaaacaagatgctaattgtgtgaatccactgggagcacccgagaagttgcccgaggccaaggagcaggccgagggttccgagccaacatcaggcaccgagggacctgagcatagcgtcaatggcccagcctcaccagcccttaaccagggctcatag

SEQ ID NO: 286082 - DNA, 351 bp, Artificial Sequence
  derived and/or modified sequence
atgtacctgtggctgaagctgctggccttcggcttcgccttcctggataccgaagtctttgtgaccggccagtcacccaccccttcccccaccggactgaccaccgccaagatgccgagcgtgcctctgagttcggaccctctgcctactcacaccactgcttttagccctgcgagcacattcgagcgagagaatgatttttccgaaacaactaccagcctgagccctgataacaccagtacccaggtgtctccagattcactcgataacgcctccgcctttaacacaactggagtgtctagtgtgcaaactccccatcttccgacccacgcagattcccagacaccctag

SEQ ID NO: 286083 - DNA, 2271 bp, Artificial Sequence
  derived and/or modified sequence
atgtacctgtggctgaagctgctggccttcggcttcgccttcctggatactgaggtgtttgtgaccgggcagtctccaaccccaagtccaaccggcctcacaacagcgaagatgccatccgtgcctctctcctccgatcctctgccgacacacactaccgccttctctcccgcgagcacctttgagagagaaaacgacttctctgaaactacaacctcactatctcctgacaacaccagcactcaggtgagcccagacagccttgataatgcctctgctttcaataccactggcgtatcgtcggtccagactccgcacctgcctacacacgccgacagtcagacaccatctgctggcacagacacacaaactttctcgggctcggctgctaacgcgaagctgaatccaacccctggatcaaacgctataagtgacgcgtatcttaacgcctctgagactacaacactgagtccatccggctcagccgtgatatccacaactactatcgccacaaccccgtctaaaccaacatgcgatgaaaagtacgctaatataaccgttgactatctttacaacaaagagactaaacttttcaccgccaaactgaacgtaaacgagaacgtcgagtgcggtaataacacgtgcacgaataacgaggtgcacaacctcaccgagtgcaagaacgcctctgtgtcaatttctcacaatagttgcactgcacccgacaaaaccctaatcctggacgtccccccgggtgtcgaaaagtttcagctacacgactgtacccaggtcgaaaaagccgataccactatatgcttaaaatggaagaatatcgaaacctttacatgcgatacccagaacattacctacagattccaatgtggcaacatgatctttgataataaagagatcaagctggagaacctggaacccgaacacgaatacaaatgcgattctgagatactctataacaatcataagttcaccaatgcctccaagatcatcaaaacggattttggatccccaggagaaccacagattatcttctgtaggtccgaggccgcccaccagggagttattacctggaacccgccccagaggtctttccacaacttcaccttgtgttacataaaggaaactgaaaaggattgccttaacctggataagaacctgattaaatatgatctgcagaacctcaaaccttatactaaatacgtcctatctctccatgcctacattatcgctaaggttcaacgcaacggttcagctgccatgtgccattttacaacaaagtctgctcccccctcccaggtgtggaacatgaccgtcagcatgacaagcgataattcaatgcacgtgaaatgcagaccccccagggacagaaacggccctcatgaaagataccacttggaggtggaggctggaaatacactcgtccggaacgagagccacaaaaactgcgatttcagggttaaagaccttcagtatagcacagactacacatttaaagcgtactttcacaacggcgactaccccggggagcctttcattttgcatcatagtacctcttacaactctaaggccctaattgcttttctggccttcctgattatcgtaacctcaattgcactgctggtggtgctgtacaagatttacgacctccataagaaaagatcctgcaatcttgacgaacagcaggaactggtggagcgggacgatgagaagcagctgatgaacgtcgaaccaatccatgcagacattctgttggaaacgtataagagaaagatcgctgatgaggggcgcctgttcctggccgaattccaatccattcctcgggtgttttccaagtttccgattaaggaagctcgcaaaccctttaaccagaacaagaacaggtacgtggatatccttccctatgactataacagggtggagttgagtgaaattaacggcgacgctggttcgaactacattaatgcatcctatattgatggatttaaagagccccgcaaatatattgctgcccaaggcccaagggatgagactgtggacgatttttggagaatgatttgggagcagaaggcaaccgtcatcgtcatggttacccggtgcgaagagggaaaccgcaataaatgtgcagaatactggccatctatggaggagggcacccgagcctttggcgatgtcgtggttaagattaaccagcacaaaaggtgcccagactatattatccagaaacttaatatcgttaataagcagaagagtaagtag

SEQ ID NO: 286084 - DNA, 3771 bp, Artificial Sequence
  derived and/or modified sequence
atgtacctgtggctgaaattgttggcattcggctttgctttcctcgacacagaggtttttgtgactggacagtctcccacaccttcccccactggcctgacaaccgcgaaaatgccctccgttcctttgtctagcgatccactgcctacccacaccaccgctttctcacctgccagcacttttgaacgtgagaatgatttttccgaaacgactacatccctgtcacccgacaacacatccacacaggtatctccagactctcttgataacgcatccgcctttaatactaccggcgtctccagtgtgcagacccctcacctgccgacccatgcagactcccagaccccatccgctggaaccgacactcagacatttagtggttcagccgcaaacgctaaactgaaccctactcccggatcgaacgccataagcgatgcctacctgaacgctagtgaaacgactaccctgagtccaagcggctctgccgtcattagtaccactacaatagccacgactccatctaagcccacatgtgacgagaaatatgccaatattacggtggactatctgtacaacaaagagacgaaactgtttacggccaaactcaatgtgaatgaaaatgtggaatgtggtaacaacacctgtaccaacaatgaggttcacaatctgactgagtgtaagaacgcatcggtgagcatttcccacaatagctgcacagcacccgacaagactctcatattggatgtgcctcctggcgtagaaaagtttcagctgcatgactgtactcaggtcgaaaaggctgatacaactatttgcctgaagtggaagaacatcgagacgttcacttgtgacactcagaatatcacatatcggtttcagtgtggcaacatgatctttgataataaagaaatcaaactggagaacctagaaccagagcatgaatacaaatgtgacagtgagatcctatacaataatcacaaatttaccaatgcgtcaaagatcattaagacggacttcggaagccccggagagcctcaaattatattttgtagatctgaggccgctcaccagggggttattacctggaatccacctcagaggagttttcacaatttcaccctctgttatattaaggaaacagaaaaagactgtctcaacttggacaagaacttgatcaaatacgacctacagaacttaaaaccatatacaaagtatgtgctgagtctgcacgcttacattatcgccaaggttcagcgaaatggttccgccgctatgtgccactttactaccaaatccgctccgccttcacaggtgtggaacatgaccgtcagtatgacctcagacaactcaatgcacgtgaagtgccgcccaccacgcgaccgcaacggaccacatgaacgctatcacctagaggtggaggctggcaacacgctagtgagaaacgaatcccataagaattgcgatttccgtgttaaagaccttcagtatagcactgactacacatttaaggcatacttccataacggtgattaccccggagagcccttcatcctgcaccatagcacctcctataatagcaaagccttaatcgcttttctcgctttcttaattatcgtcaccagcatcgccttgttggtggtcttgtataaaatctacgatctccacaagaagcgtagctgcaacctggatgaacagcaggaacttgtggaacgcgacgatgagaaacagttaatgaacgtcgagcctattcatgcggacattctgctggaaacatataagcgaaaaattgcagacgaggggcgtctctttctggccgaattccagagcattcctagggtgttctctaagtttccaatcaaagaagcgaggaaaccgttcaatcagaataaaaacaggtatgtggatattttgccgtatgattacaaccgagtggagctctccgaaatcaatggagatgcaggcagcaactatattaacgcttcctacatcgacggctttaaagagccccgtaagtacatagctgcacaagggcctcgcgacgagaccgtggacgacttctggcgaatgatttgggaacagaaagcaacggtcattgtcatggtgactaggtgtgaagaagggaaccgaaacaaatgtgctgagtactggccctccatggaggagggcacccgggcattcggcgacgtggtcgtgaagatcaaccagcacaaacgctgtccagattacattatccagaaacttaacattgtcaataagaaggaaaaggctactggcagggaggtgacccacattcagttcacttcttggcctgatcacggcgtgcccgaggatccccacctacttctgaagctcagaagacgcgtgaatgccttcagtaacttctttagtggcccaatcgtggtccattgcagcgctggggtgggcagaacaggaacctatattggcatcgatgcgatgctcgagggactcgaagctgagaacaaagtagacgtgtatggctatgtagttaagctgaggcggcagcgttgtctgatggtgcaggtcgaagcccagtacatactaattcaccaggcactggtggaatataaccagttcggagaaacagaagtgaatctatccgaactgcacccttatctccacaatatgaaaaagcgggacccaccaagcgagccaagtcccttggaggccgagtttcaaagacttccttcataccgttcctggcgaacccagcacatcggtaaccaagaggaaaacaagtccaagaatcgtaatagcaacgtgatcccatacgattacaaccgcgtccccttgaagcatgagctagagatgtccaaagagtccgaacacgatagtgacgaaagctcagatgatgacagtgacagcgaggaaccatccaaatatattaatgcaagctttataatgtcctattggaagccagaagtgatgatagcagcccagggacccctgaaggagacgatcggcgatttttggcagatgatctttcaacgcaaggtcaaggtaatcgtcatgttgaccgagttgaagcatggcgatcaggagatttgtgcccaatactggggggagggtaagcagacctacggcgatattgaggtagacttgaaggatacagacaagtcctccacgtacacactcagagtgttcgagctacgccactccaagcggaaagactcccgcacagtgtatcaatatcaatacacgaactggagcgtcgaacaacttccggcagagcccaaggagctcatttccatgattcaggtggtgaagcaaaagcttccacagaaaaatagctcagaaggtaacaagcatcacaagagcacacccttactcattcattgtcgcgatggtagccaacagactggaattttctgtgctttgctaaatctactggagagcgccgaaactgaagaagtggtagatatttttcaggtcgttaaggctctgaggaaagccaggccaggaatggtctcaaccttcgaacagtatcagtttctgtatgatgttatcgcgtctacctacccagcccagaacggtcaagttaagaaaaataatcatcaggaagacaaaattgagtttgataatgaggttgacaaggtaaagcaagacgcaaactgcgtgaatcccctcggcgcaccggagaaattgccggaggcaaaggagcaggcagaaggtagcgagccgacatctgggaccgagggtcctgagcactctgtgaatggaccagctagccctgccttgaatcaaggcagttag

SEQ ID NO: 286085 - DNA, 351 bp, Artificial Sequence
  derived and/or modified sequence
atgtatctgtggctcaaactcctggctttcggtttcgcatttttagacacggaggtattcgtgaccggacagagtcccaccccaagccccaccggacttaccaccgccaagatgcctagcgtgccgctgtcttcagacccattaccgacacatactaccgcctttagtccggcttctaccttcgagcgggagaacgacttctccgaaaccacaacaagtctgagcccagataacacctctacacaggtaagtccagatagccttgataatgcatcggcgtttaacacaacaggtgtcagctctgttcagacaccccatctgcccacgcacgctgattcacagacgccatag

SEQ ID NO: 286086 - DNA, 2271 bp, Artificial Sequence
  derived and/or modified sequence
atgtacctttggctgaaactgctagcttttgggtttgcttttctcgacacagaagttttcgttaccgggcagtcccccaccccaagtcccacgggcctgactacagctaagatgccaagcgtgcctttgtcaagcgatcccctccccacgcacacaactgccttcagcccagctagcacgtttgagcgcgagaacgacttctcagagaccaccacttcactgtcccctgacaatactagcacccaggtctcccctgactccctggataacgctagtgcttttaacacaacgggtgttagcagcgtgcaaacaccccaccttcctacccacgcagactctcagacaccttcggccggtaccgatacacagaccttctcagggagcgcggctaatgccaaattgaaccccaccccgggaagtaatgcaatttccgatgcttatctgaacgcaagcgagaccaccacgctgagtccctcaggatcggcagtcatttcaacaacaacgattgcgactacgccaagtaagcccacatgcgacgagaaatatgcaaacataaccgtggactacctgtacaataaggagaccaagctgttcacagctaagctgaacgttaacgagaacgttgagtgcggcaacaatacttgcacgaacaacgaggtgcataatttaaccgagtgcaaaaatgcctccgtaagcatcagccataattcgtgcacagccccagacaaaacactgatcttggatgtgccccctggcgtggagaaatttcaactgcacgattgcacacaagtagagaaggccgatacaaccatctgcctgaaatggaagaacattgagacttttacttgtgacacccagaacattacttatcgctttcagtgtggcaacatgattttcgacaacaaggaaataaaactggaaaatcttgagccagaacatgagtataagtgcgactcagagatactgtataataatcacaaatttacaaacgctagtaagattattaaaacagatttcggctcaccgggagagccccagataattttctgccggtcagaggctgcccaccaaggagtaatcacatggaatccgccacagaggtctttccataactttactctgtgctatatcaaagagacagagaaggactgccttaacctggataagaatctcattaagtacgacctgcagaacctgaaaccatacactaagtacgttctcagcctgcacgcctatatcattgccaaagtccagaggaatggcagcgcagctatgtgtcatttcaccacaaagagcgccccaccttcccaggtctggaacatgactgtttctatgacgtcagataacagcatgcacgtgaagtgtcggcctcccagggacagaaatggaccgcacgaaaggtaccacttggaagtggaggctgggaacacccttgttaggaacgaaagccacaagaattgtgatttccgcgtgaaagatctccagtacagtactgactatacctttaaagcctatttccacaacggcgattaccctggcgaacccttcatactgcatcactcgacctcctacaattctaaggccctcattgcgtttctggcattcttaattatcgtaactagcattgcccttttggtggttctctacaaaatatacgaccttcataagaagcgcagctgtaaccttgatgagcagcaggagctggtcgagcgagacgatgaaaaacagctgatgaacgtggagccaatccacgcagacattctgctcgaaacatataagcgcaagattgccgatgagggccgtctatttctcgccgagttccagagtattcctcgggtgttcagcaaatttcccataaaggaggccagaaagcccttcaatcagaataagaataggtatgttgatatcttgccatatgactacaatcgcgtcgaacttagcgagatcaatggcgacgctggaagtaactacattaacgctagctatattgatggatttaaggaaccacgtaaatacatcgccgcacagggaccgagagatgagactgtggatgacttttggcgcatgatctgggaacagaaggccaccgtgattgtgatggtaacccggtgtgaggagggcaatcgcaataaatgcgctgagtactggccctcaatggaagagggtacacgagccttcggcgatgtggtggtcaaaatcaaccaacataagcggtgcccagactacatcattcagaaactgaacatcgtcaacaagcaaaagtctaagtag

SEQ ID NO: 286087 - DNA, 5177 bp, Artificial Sequence
  derived and/or modified sequence
ggagaagttagtaaaaccgaatctgacatcatcacctagcagttcatgcagctagcaagtggtttgttcttagggtaacagaggaggaaattgttcctcgtctgataagacaacagtggagaaaggacgcatgctgtttcttagggacacggctgacttccagatatgaccatgtatttgtggcttaaactcttggcatttggctttgcctttctggacacagaagtatttgtgacagggcaaagcccaacaccttcccccactggattgactacagcaaagatgcccagtgttccactttcaagtgaccccttacctactcacaccactgcattctcacccgcaagcacctttgaaagagaaaatgacttctcagagaccacaacttctcttagtccagacaatacttccacccaagtatccccggactctttggataatgctagtgcttttaataccacaggtgtttcatcagtacagacgcctcaccttcccacgcacgcagactcgcagacgccctctgctggaactgacacgcagacattcagcggctccgccgccaatgcaaaactcaaccctaccccaggcagcaatgctatctcagatgcctaccttaatgcctctgaaacaaccactctgagcccttctggaagcgctgtcatttcaaccacaacaatagctactactccatctaagccaacatgtgatgaaaaatatgcaaacatcactgtggattacttatataacaaggaaactaaattatttacagcaaagctaaatgttaatgagaatgtggaatgtggaaacaatacttgcacaaacaatgaggtgcataaccttacagaatgtaaaaatgcgtctgtttccatatctcataattcatgtactgctcctgataagacattaatattagatgtgccaccaggggttgaaaagtttcagttacatgattgtacacaagttgaaaaagcagatactactatttgtttaaaatggaaaaatattgaaacctttacttgtgatacacagaatattacctacagatttcagtgtggtaatatgatatttgataataaagaaattaaattagaaaaccttgaacccgaacatgagtataagtgtgactcagaaatactctataataaccacaagtttactaacgcaagtaaaattattaaaacagattttgggagtccaggagagcctcagattattttttgtagaagtgaagctgcacatcaaggagtaattacctggaatccccctcaaagatcatttcataattttaccctctgttatataaaagagacagaaaaagattgcctcaatctggataaaaacctgatcaaatatgatttgcaaaatttaaaaccttatacgaaatatgttttatcattacatgcctacatcattgcaaaagtgcaacgtaatggaagtgctgcaatgtgtcatttcacaactaaaagtgctcctccaagccaggtctggaacatgactgtctccatgacatcagataatagtatgcatgtcaagtgtaggcctcccagggaccgtaatggcccccatgaacgttaccatttggaagttgaagctggaaatactctggttagaaatgagtcgcataagaattgcgatttccgtgtaaaagatcttcaatattcaacagactacacttttaaggcctattttcacaatggagactatcctggagaaccctttattttacatcattcaacatcttataattctaaggcactgatagcatttctggcatttctgattattgtgacatcaatagccctgcttgttgttctctacaaaatctatgatctacataagaaaagatcctgcaatttagatgaacagcaggagcttgttgaaagggatgatgaaaaacaactgatgaatgtggagccaatccatgcagatattttgttggaaacttataagaggaagattgctgatgaaggaagactttttctggctgaatttcagagcatcccgcgggtgttcagcaagtttcctataaaggaagctcgaaagccctttaaccagaataaaaaccgttatgttgacattcttccttatgattataaccgtgttgaactctctgagataaacggagatgcagggtcaaactacataaatgccagctatattgatggtttcaaagaacccaggaaatacattgctgcacaaggtcccagggatgaaactgttgatgatttctggaggatgatttgggaacagaaagccacagttattgtcatggtcactcgatgtgaagaaggaaacaggaacaagtgtgcagaatactggccgtcaatggaagagggcactcgggcttttggagatgttgttgtaaagatcaaccagcacaaaagatgtccagattacatcattcagaaattgaacattgtaaataaaaaagaaaaagcaactggaagagaggtgactcacattcagttcaccagctggccagaccacggggtgcctgaggatcctcacttgctcctcaaactgagaaggagagtgaatgccttcagcaatttcttcagtggtcccattgtggtgcactgcagtgctggtgttgggcgcacaggaacctatatcggaattgatgccatgctagaaggcctggaagccgagaacaaagtggatgtttatggttatgttgtcaagctaaggcgacagagatgcctgatggttcaagtagaggcccagtacatcttgatccatcaggctttggtggaatacaatcagtttggagaaacagaagtgaatttgtctgaattacatccatatctacataacatgaagaaaagggatccacccagtgagccgtctccactagaggctgaattccagagacttccttcatataggagctggaggacacagcacattggaaatcaagaagaaaataaaagtaaaaacaggaattctaatgtcatcccatatgactataacagagtgccacttaaacatgagctggaaatgagtaaagagagtgagcatgattcagatgaatcctctgatgatgacagtgattcagaggaaccaagcaaatacatcaatgcatcttttataatgagctactggaaacctgaagtgatgattgctgctcagggaccactgaaggagaccattggtgacttttggcagatgatcttccaaagaaaagtcaaagttattgttatgctgacagaactgaaacatggagaccaggaaatctgtgctcagtactggggagaaggaaagcaaacatatggagatattgaagttgacctgaaagacacagacaaatcttcaacttatacccttcgtgtctttgaactgagacattccaagaggaaagactctcgaactgtgtaccagtaccaatatacaaactggagtgtggagcagcttcctgcagaacccaaggaattaatctctatgattcaggtcgtcaaacaaaaacttccccagaagaattcctctgaagggaacaagcatcacaagagtacacctctactcattcactgcagggatggatctcagcaaacgggaatattttgtgctttgttaaatctcttagaaagtgcggaaacagaagaggtagtggatatttttcaagtggtaaaagctctacgcaaagctaggccaggcatggtttccacattcgagcaatatcaattcctatatgacgtcattgccagcacctaccctgctcagaatggacaagtaaagaaaaacaaccatcaagaagataaaattgaatttgataatgaagtggacaaagtaaagcaggatgctaattgtgttaatccacttggtgccccagaaaagctccctgaagcaaaggaacaggctgaaggttctgaacccacgagtggcactgaggggccagaacattctgtcaatggtcctgcaagtccagctttaaatcaaggttcataggaaaagacataaatgaggaaactccaaacctcctgttagctgttatttctatttttgtagaagtaggaagtgaaaataggtatacagtggattaattaaatgcagcgaaccaatatttgtagaagggttatattttactactgtggaaaaatatttaagatagttttgccagaacagtttgtacagacgtatgcttattttaaaattttatctcttattcagtaaaaaacaacttctttgtaatcgttatgtgtgtatatgtatgtgtgtatgggtgtgtgtttgtgtgagagacagagaaagagagagaattctttcaagtgaatctaaaagcttttgcttttcctttgtttttatgaagaaaaaatacattttatattagaagtgttaacttagcttgaaggatctgtttttaaaaatcataaactgtgtgcagactcaataaaatcatgtacatttctgaaatgacctcaagatgtcctccttgttctactcatatatatctatcttatatagtttactattttacttctagagatagtacataaaggtggtatgtgtgtgtatgctactacaaaaaagttgttaactaaattaacattgggaaatcttatattccatatattagcatttagtccaatgtctttttaagcttatttaattaaaaaatttccagtgagcttatcatgctgtctttacatggggttttcaattttgcatgctcgattattccctgtacaatatttaaaatttattgcttgatacttttgacaacaaattaggttttgtacaattgaacttaaataaatgtcattaaaataaataaatgcaatatgtattaatattcattgtataaaaatagaagaatacaaacatatttgttaaatatttacatatgaaatttaatatagctatttttatggaatttttcattgatatgaaaaatatgatattgcatatgcatagttcccatgttaaatcccattcataactttcattaaagcatttactttgaatttctccaatgcttagaatgtttttaccaggaatggatgtcgctaatcataataaaattcaaccattatttttttcttgtttataatacattgtgttatatgttcaaatatgaaatgtgtatgcacctattgaaatatgtttaatgcatttattaacatttgcaggacacttttacaggccccaattatccaatagtctaataattgtttaagatctag

SEQ ID NO: 286088 - DNA, 462 bp, Artificial Sequence
  derived and/or modified sequence
acatttttgattcgtttttacagagaaaaacttctacagagataacaattattttgcttttcagaaggacgcatgctgtttcttagggacacggctgacttccagatatgaccatgtatttgtggcttaaactcttggcatttggctttgcctttctggacacagaagtatttgtgacagggcaaagcccaacaccttcccccactggattgactacagcaaagatgcccagtgttccactttcaagtgaccccttacctactcacaccactgcattctcacccgcaagcacctttgaaagagaaaatgacttctcagagaccacaacttctcttagtccagacaatacttccacccaagtatccccggactctttggataatgctagtgcttttaataccacaggtgtttcatcagtacagacgcctcaccttcccacgcacgcagactcgcagacgccct

SEQ ID NO: 286089 - DNA, 2439 bp, Artificial Sequence
  derived and/or modified sequence
ggagaagttagtaaaaccgaatctgacatcatcacctagcagttcatgcagctagcaagtggtttgttcttagggtaacagaggaggaaattgttcctcgtctgataagacaacagtggagaaaggacgcatgctgtttcttagggacacggctgacttccagatatgaccatgtatttgtggcttaaactcttggcatttggctttgcctttctggacacagaagtatttgtgacagggcaaagcccaacaccttcccccactggattgactacagcaaagatgcccagtgttccactttcaagtgaccccttacctactcacaccactgcattctcacccgcaagcacctttgaaagagaaaatgacttctcagagaccacaacttctcttagtccagacaatacttccacccaagtatccccggactctttggataatgctagtgcttttaataccacaggtgtttcatcagtacagacgcctcaccttcccacgcacgcagactcgcagacgccctctgctggaactgacacgcagacattcagcggctccgccgccaatgcaaaactcaaccctaccccaggcagcaatgctatctcagatgcctaccttaatgcctctgaaacaaccactctgagcccttctggaagcgctgtcatttcaaccacaacaatagctactactccatctaagccaacatgtgatgaaaaatatgcaaacatcactgtggattacttatataacaaggaaactaaattatttacagcaaagctaaatgttaatgagaatgtggaatgtggaaacaatacttgcacaaacaatgaggtgcataaccttacagaatgtaaaaatgcgtctgtttccatatctcataattcatgtactgctcctgataagacattaatattagatgtgccaccaggggttgaaaagtttcagttacatgattgtacacaagttgaaaaagcagatactactatttgtttaaaatggaaaaatattgaaacctttacttgtgatacacagaatattacctacagatttcagtgtggtaatatgatatttgataataaagaaattaaattagaaaaccttgaacccgaacatgagtataagtgtgactcagaaatactctataataaccacaagtttactaacgcaagtaaaattattaaaacagattttgggagtccaggagagcctcagattattttttgtagaagtgaagctgcacatcaaggagtaattacctggaatccccctcaaagatcatttcataattttaccctctgttatataaaagagacagaaaaagattgcctcaatctggataaaaacctgatcaaatatgatttgcaaaatttaaaaccttatacgaaatatgttttatcattacatgcctacatcattgcaaaagtgcaacgtaatggaagtgctgcaatgtgtcatttcacaactaaaagtgctcctccaagccaggtctggaacatgactgtctccatgacatcagataatagtatgcatgtcaagtgtaggcctcccagggaccgtaatggcccccatgaacgttaccatttggaagttgaagctggaaatactctggttagaaatgagtcgcataagaattgcgatttccgtgtaaaagatcttcaatattcaacagactacacttttaaggcctattttcacaatggagactatcctggagaaccctttattttacatcattcaacatcttataattctaaggcactgatagcatttctggcatttctgattattgtgacatcaatagccctgcttgttgttctctacaaaatctatgatctacataagaaaagatcctgcaatttagatgaacagcaggagcttgttgaaagggatgatgaaaaacaactgatgaatgtggagccaatccatgcagatattttgttggaaacttataagaggaagattgctgatgaaggaagactttttctggctgaatttcagagcatcccgcgggtgttcagcaagtttcctataaaggaagctcgaaagccctttaaccagaataaaaaccgttatgttgacattcttccttatgattataaccgtgttgaactctctgagataaacggagatgcagggtcaaactacataaatgccagctatattgatggtttcaaagaacccaggaaatacattgctgcacaaggtcccagggatgaaactgttgatgatttctggaggatgatttgggaacagaaagccacagttattgtcatggtcactcgatgtgaagaaggaaacaggaacaagtgtgcagaatactggccgtcaatggaagagggcactcgggcttttggagatgttgttgtaaagatcaaccagcacaaaagatgtccagattacatcattcagaaattgaacattgtaaataaacaaaagtcaaag

SEQ ID NO: 286090 - protein, 735 aa, Artificial Sequence
  derived and/or modified sequence
MTMYLWLKLLAFGFAFLDTEVFVTGQSPTPSPTGVSSVQTPHLPTHADSQTPSAGTDTQTFSGSAANAKLNPTPGSNAISDVPGERSTASTFPTDPVSPLTTTLSLAHHSSAALPARTSNTTITANTSDAYLNASETTTLSPSGSAVISTTTIATTPSKPTCDEKYANITVDYLYNKETKLFTAKLNVNENVECGNNTCTNNEVHNLTECKNASVSISHNSCTAPDKTLILDVPPGVEKFQLHDCTQVEKADTTICLKWKNIETFTCDTQNITYRFQCGNMIFDNKEIKLENLEPEHEYKCDSEILYNNHKFTNASKIIKTDFGSPGEPQIIFCRSEAAHQGVITWNPPQRSFHNFTLCYIKETEKDCLNLDKNLIKYDLQNLKPYTKYVLSLHAYIIAKVQRNGSAAMCHFTTKSAPPSQVWNMTVSMTSDNSMHVKCRPPRDRNGPHERYHLEVEAGNTLVRNESHKNCDFRVKDLQYSTDYTFKAYFHNGDYPGEPFILHHSTSYNSKALIAFLAFLIIVTSIALLVVLYKIYDLHKKRSCNLDEQQELVERDDEKQLMNVEPIHADILLETYKRKIADEGRLFLAEFQSIPRVFSKFPIKEARKPFNQNKNRYVDILPYDYNRVELSEINGDAGSNYINASYIDGFKEPRKYIAAQGPRDETVDDFWRMIWEQKATVIVMVTRCEEGNRNKCAEYWPSMEEGTRAFGDVVVKINQHKRCPDYIIQKLNIVN

SEQ ID NO: 286091 - protein, 733 aa, Artificial Sequence
  derived and/or modified sequence
MYLWLKLLAFGFAFLDTEVFVTGQSPTPSPTGVSSVQTPHLPTHADSQTPSAGTDTQTFSGSAANAKLNPTPGSNAISDVPGERSTASTFPTDPVSPLTTTLSLAHHSSAALPARTSNTTITANTSDAYLNASETTTLSPSGSAVISTTTIATTPSKPTCDEKYANITVDYLYNKETKLFTAKLNVNENVECGNNTCTNNEVHNLTECKNASVSISHNSCTAPDKTLILDVPPGVEKFQLHDCTQVEKADTTICLKWKNIETFTCDTQNITYRFQCGNMIFDNKEIKLENLEPEHEYKCDSEILYNNHKFTNASKIIKTDFGSPGEPQIIFCRSEAAHQGVITWNPPQRSFHNFTLCYIKETEKDCLNLDKNLIKYDLQNLKPYTKYVLSLHAYIIAKVQRNGSAAMCHFTTKSAPPSQVWNMTVSMTSDNSMHVKCRPPRDRNGPHERYHLEVEAGNTLVRNESHKNCDFRVKDLQYSTDYTFKAYFHNGDYPGEPFILHHSTSYNSKALIAFLAFLIIVTSIALLVVLYKIYDLHKKRSCNLDEQQELVERDDEKQLMNVEPIHADILLETYKRKIADEGRLFLAEFQSIPRVFSKFPIKEARKPFNQNKNRYVDILPYDYNRVELSEINGDAGSNYINASYIDGFKEPRKYIAAQGPRDETVDDFWRMIWEQKATVIVMVTRCEEGNRNKCAEYWPSMEEGTRAFGDVVVKINQHKRCPDYIIQKLNIVN

SEQ ID NO: 286092 - DNA, 2208 bp, Artificial Sequence
  derived and/or modified sequence
atgaccatgtacctgtggctgaagctgctggccttcggcttcgccttcctggacaccgaggtgttcgtgaccggccagagccccacccccagccccaccggcgtgagcagcgtgcagaccccccacctgcccacccacgccgacagccagacccccagcgccggcaccgacacccagaccttcagcggcagcgccgccaacgccaagctgaaccccacccccggcagcaacgccatcagcgacgtgcccggcgagagaagcaccgccagcaccttccccaccgaccccgtgagccccctgaccaccaccctgagcctggcccaccacagcagcgccgccctgcccgccagaaccagcaacaccaccatcaccgccaacaccagcgacgcctacctgaacgccagcgagaccaccaccctgagccccagcggcagcgccgtgatcagcaccaccaccatcgccaccacccccagcaagcccacctgcgacgagaagtacgccaacatcaccgtggactacctgtacaacaaggagaccaagctgttcaccgccaagctgaacgtgaacgagaacgtggagtgcggcaacaacacctgcaccaacaacgaggtgcacaacctgaccgagtgcaagaacgccagcgtgagcatcagccacaacagctgcaccgcccccgacaagaccctgatcctggacgtgccccccggcgtggagaagttccagctgcacgactgcacccaggtggagaaggccgacaccaccatctgcctgaagtggaagaacatcgagaccttcacctgcgacacccagaacatcacctacagattccagtgcggcaacatgatcttcgacaacaaggagatcaagctggagaacctggagcccgagcacgagtacaagtgcgacagcgagatcctgtacaacaaccacaagttcaccaacgccagcaagatcatcaagaccgacttcggcagccccggcgagccccagatcatcttctgcagaagcgaggccgcccaccagggcgtgatcacctggaaccccccccagagaagcttccacaacttcaccctgtgctacatcaaggagaccgagaaggactgcctgaacctggacaagaacctgatcaagtacgacctgcagaacctgaagccctacaccaagtacgtgctgagcctgcacgcctacatcatcgccaaggtgcagagaaacggcagcgccgccatgtgccacttcaccaccaagagcgccccccccagccaggtgtggaacatgaccgtgagcatgaccagcgacaacagcatgcacgtgaagtgcagaccccccagagacagaaacggcccccacgagagataccacctggaggtggaggccggcaacaccctggtgagaaacgagagccacaagaactgcgacttcagagtgaaggacctgcagtacagcaccgactacaccttcaaggcctacttccacaacggcgactaccccggcgagcccttcatcctgcaccacagcaccagctacaacagcaaggccctgatcgccttcctggccttcctgatcatcgtgaccagcatcgccctgctggtggtgctgtacaagatctacgacctgcacaagaagagaagctgcaacctggacgagcagcaggagctggtggagagagacgacgagaagcagctgatgaacgtggagcccatccacgccgacatcctgctggagacctacaagagaaagatcgccgacgagggcagactgttcctggccgagttccagagcatccccagagtgttcagcaagttccccatcaaggaggccagaaagcccttcaaccagaacaagaacagatacgtggacatcctgccctacgactacaacagagtggagctgagcgagatcaacggcgacgccggcagcaactacatcaacgccagctacatcgacggcttcaaggagcccagaaagtacatcgccgcccagggccccagagacgagaccgtggacgacttctggagaatgatctgggagcagaaggccaccgtgatcgtgatggtgaccagatgcgaggagggcaacagaaacaagtgcgccgagtactggcccagcatggaggagggcaccagagccttcggcgacgtggtggtgaagatcaaccagcacaagagatgccccgactacatcatccagaagctgaacatcgtgaactag

SEQ ID NO: 286093 - DNA, 2202 bp, Artificial Sequence
  derived and/or modified sequence
atgtacctgtggctgaagctgctggccttcggcttcgccttcctggacaccgaggtgttcgtgaccggccagagccccacccccagccccaccggcgtgagcagcgtgcagaccccccacctgcccacccacgccgacagccagacccccagcgccggcaccgacacccagaccttcagcggcagcgccgccaacgccaagctgaaccccacccccggcagcaacgccatcagcgacgtgcccggcgagagaagcaccgccagcaccttccccaccgaccccgtgagccccctgaccaccaccctgagcctggcccaccacagcagcgccgccctgcccgccagaaccagcaacaccaccatcaccgccaacaccagcgacgcctacctgaacgccagcgagaccaccaccctgagccccagcggcagcgccgtgatcagcaccaccaccatcgccaccacccccagcaagcccacctgcgacgagaagtacgccaacatcaccgtggactacctgtacaacaaggagaccaagctgttcaccgccaagctgaacgtgaacgagaacgtggagtgcggcaacaacacctgcaccaacaacgaggtgcacaacctgaccgagtgcaagaacgccagcgtgagcatcagccacaacagctgcaccgcccccgacaagaccctgatcctggacgtgccccccggcgtggagaagttccagctgcacgactgcacccaggtggagaaggccgacaccaccatctgcctgaagtggaagaacatcgagaccttcacctgcgacacccagaacatcacctacagattccagtgcggcaacatgatcttcgacaacaaggagatcaagctggagaacctggagcccgagcacgagtacaagtgcgacagcgagatcctgtacaacaaccacaagttcaccaacgccagcaagatcatcaagaccgacttcggcagccccggcgagccccagatcatcttctgcagaagcgaggccgcccaccagggcgtgatcacctggaaccccccccagagaagcttccacaacttcaccctgtgctacatcaaggagaccgagaaggactgcctgaacctggacaagaacctgatcaagtacgacctgcagaacctgaagccctacaccaagtacgtgctgagcctgcacgcctacatcatcgccaaggtgcagagaaacggcagcgccgccatgtgccacttcaccaccaagagcgccccccccagccaggtgtggaacatgaccgtgagcatgaccagcgacaacagcatgcacgtgaagtgcagaccccccagagacagaaacggcccccacgagagataccacctggaggtggaggccggcaacaccctggtgagaaacgagagccacaagaactgcgacttcagagtgaaggacctgcagtacagcaccgactacaccttcaaggcctacttccacaacggcgactaccccggcgagcccttcatcctgcaccacagcaccagctacaacagcaaggccctgatcgccttcctggccttcctgatcatcgtgaccagcatcgccctgctggtggtgctgtacaagatctacgacctgcacaagaagagaagctgcaacctggacgagcagcaggagctggtggagagagacgacgagaagcagctgatgaacgtggagcccatccacgccgacatcctgctggagacctacaagagaaagatcgccgacgagggcagactgttcctggccgagttccagagcatccccagagtgttcagcaagttccccatcaaggaggccagaaagcccttcaaccagaacaagaacagatacgtggacatcctgccctacgactacaacagagtggagctgagcgagatcaacggcgacgccggcagcaactacatcaacgccagctacatcgacggcttcaaggagcccagaaagtacatcgccgcccagggccccagagacgagaccgtggacgacttctggagaatgatctgggagcagaaggccaccgtgatcgtgatggtgaccagatgcgaggagggcaacagaaacaagtgcgccgagtactggcccagcatggaggagggcaccagagccttcggcgacgtggtggtgaagatcaaccagcacaagagatgccccgactacatcatccagaagctgaacatcgtgaactag

SEQ ID NO: 286094 - DNA, 2208 bp, Artificial Sequence
  derived and/or modified sequence
atgaccatgtatctgtggcttaaactgctcgcctttggtttcgcattcctggatacggaagtctttgtgaccggacagagtcctacccctagtcccactggagtctcgtccgtgcagacaccgcaccttcctacccacgctgattctcaaacaccctccgcgggtaccgacactcagaccttttcaggctccgctgcaaatgccaaactgaacccgaccccagggtcgaatgctatctccgatgtcccgggagagcgttctactgcctcgacatttcctacagaccctgtctcccctttgacaactaccttgtcactggctcatcactcttctgcagcccttcctgccagaacgagcaatacgacaattaccgcgaacacctctgatgcatatttgaacgcgagtgaaactactactctctccccttccggttctgccgtgatttcgacaactactattgcaaccactccatctaagccaacatgcgatgagaaatatgccaacataacagtggactacctttacaataaagagactaaactgttcacagccaaactcaatgtgaatgagaatgttgagtgcggaaacaatacgtgcactaataatgaagtgcacaatctgaccgaatgtaaaaatgcttccgtgtctattagccataactcctgtactgcaccagacaagaccctaatccttgatgtaccaccaggagtcgagaagtttcagctgcacgactgtactcaagtcgagaaagccgatactactatctgtcttaaatggaagaacattgagacttttacctgcgatacccagaatatcacatatagatttcagtgcggaaacatgatcttcgacaataaggagatcaaactagaaaacttggaacccgagcacgagtacaagtgcgactctgagattctgtacaacaatcacaagttcacgaatgcctcgaaaatcatcaagaccgacttcgggtcccccggcgagcctcagatcatcttctgccgatcagaggctgcacatcaaggtgtgatcacctggaatcctcctcaacggtcctttcacaacttcactttatgttacatcaaagagacggaaaaggactgtctgaaccttgataaaaacctgatcaagtacgatctgcagaacctgaagccatatactaagtacgtgctatccctgcacgcgtacatcatcgccaaggtacaacggaacgggtcggcagcgatgtgccattttaccacaaagtccgcacctccttcccaggtatggaacatgacagttagtatgacttcggataatagtatgcacgtcaagtgtaggcccccaagggatcgcaatgggccgcatgagaggtaccacttggaggtggaagctggaaacaccctcgtacgcaacgagagtcacaagaactgcgactttagagttaaggacctgcagtactcaacagactacacatttaaggcatactttcataacggcgactacccaggagagccattcatcctccatcacagtaccagttataatagtaaggctttaattgcattccttgccttccttatcatcgtgacctctatcgcacttcttgtcgtcctttacaaaatctacgacctccacaaaaagcgctcctgcaatctcgacgagcagcaggaactggtcgagagagacgatgaaaagcaactgatgaacgtggagcccatccacgcagatatcctgctagaaacgtacaaacgaaaaattgccgacgaaggccgtctcttcctggccgagttccagtctattccccgcgttttctctaagtttcccatcaaggaggccaggaagccatttaaccaaaacaaaaaccggtatgttgacattctaccctacgactataatagggtcgagctttccgagataaatggggacgccggcagcaactatattaatgctagctacatcgacgggtttaaagaaccccgcaagtatatcgccgcccaaggacccagggacgagaccgtggatgatttctggcggatgatctgggagcagaaagccactgttatcgtaatggtgactagatgtgaagaaggcaatcggaataaatgtgcagaatattggccatcaatggaggaggggaccagagcctttggcgacgtggtcgtgaagattaatcagcacaaacgctgtccagactatattattcaaaaactcaacattgtgaattag

SEQ ID NO: 286095 - DNA, 2202 bp, Artificial Sequence
  derived and/or modified sequence
atgtatctgtggctcaagctcctcgcctttggtttcgcctttctggatacagaggtgtttgtgaccggccagtccccaaccccgtcacccacaggagtttcatctgttcagactccccatctcccgactcatgctgactcccaaaccccttccgccggcacagacacacagaccttttccggaagcgctgccaatgctaagctcaatcccactccgggaagtaatgccatttcggacgttccaggtgaacggtctacagcatctacattcccgacagaccctgtttcccctctgactactacgctctcccttgctcatcattctagcgcggcccttccggctagaaccagcaatactacgatcacagcgaacacctccgatgcttacttaaacgctagtgaaacgacaactctgtccccaagcggctctgccgttatttctacaactaccattgccactacaccttctaaaccgacctgcgatgagaagtatgcgaacatcaccgttgactacctctataacaaggaaaccaaactcttcactgcaaagctcaacgtgaatgaaaacgtcgagtgcgggaacaacacctgtactaataacgaagtgcacaacctgactgagtgtaaaaacgcttccgtttctatttctcacaatagttgcaccgccccagacaaaacgctgatattggacgtgccccctggtgttgagaagtttcagttacatgactgtactcaagtggaaaaagccgataccaccatctgcctgaagtggaagaatatagaaaccttcacctgcgatactcagaatattacttacagatttcagtgtgggaatatgatcttcgacaataaggagatcaaactggaaaatctcgagcccgaacacgaatataagtgcgacagtgaaatcctgtacaacaaccacaagttcactaacgcttcaaagattattaaaaccgattttggaagtccaggggaaccgcagatcatcttttgtcggtccgaggccgctcatcaaggggtcataacatggaatcctccacagcggtccttccacaatttcacgttatgctatatcaaggaaactgagaaggattgtctgaatttggataaaaacctgatcaaatatgatctacagaacctgaagccttataccaagtacgttcttagcctgcacgcctatatcattgcaaaggtgcagcggaatggtagcgcagcaatgtgccattttaccactaagtcggcgcctccctcccaagtgtggaatatgaccgtgtccatgacctctgacaatagcatgcacgtgaagtgtaggcctccacgcgacaggaacggcccccatgagcgttatcatctagaggtggaagccgggaacacactggtccgcaacgagagccataaaaattgcgacttcagggtcaaagacttgcaatattcaaccgattatacattcaaggcatacttccacaatggcgattacccaggcgagccctttatcctgcatcacagcacttcttataattcaaaggcattgattgcttttctcgcattcctgatcatagtgacaagcatcgctttacttgtcgttctgtataaaatctacgatctgcataaaaaacggtcatgtaaccttgacgagcagcaagagctcgtcgagagggacgacgaaaaacaattaatgaatgtggagcccatccatgcagacatattgctggaaacctataagcgaaaaatcgcagacgagggacgcttatttttggctgagtttcagagtatccccagagtctttagcaaattccctatcaaggaagccaggaagccattcaatcagaataagaatcgctacgtggacattctgccctacgattacaaccgagtggaacttagtgagatcaacggcgatgccgggtctaattacatcaatgcctcctatattgatggctttaaggaacctcggaagtacatagccgcccagggccctcgggacgagacagttgatgatttttggaggatgatctgggagcagaaagctacagtcatcgtcatggtgacaaggtgtgaagagggcaacagaaacaaatgcgccgaatattggcccagtatggaagagggcactagggcatttggagacgtggtcgttaaaatcaatcagcataagaggtgccctgactatatcatccagaagctcaacatcgtaaattag

SEQ ID NO: 286096 - DNA, 2208 bp, Artificial Sequence
  derived and/or modified sequence
atgaccatgtacctgtggctgaagctgctggccttcggctttgccttcctggacacagaggtgtttgtgacaggccagagccccacccccagccccactggagtgtcctctgtgcagaccccccacctgcccacccatgctgacagccagaccccatctgctggaacagacacccagaccttcagcggcagcgctgccaatgccaagctgaaccccaccccaggcagcaatgccatcagtgatgtgcctggagagaggagcacagccagcaccttccccacagatcctgtgagccccctgaccaccaccctgagcctggcccaccacagcagcgctgccctgcctgcccggaccagcaacaccaccatcacagccaacaccagtgatgcctacctgaatgccagcgagaccaccaccctgagccccagcggcagcgctgtgatcagcaccaccaccatcgccaccacccccagcaagcccacctgtgatgagaagtatgccaacatcaccgtggactacctgtacaacaaggagaccaagctgttcaccgccaagctgaatgtgaatgaaaatgtggagtgtggcaacaacacctgcaccaacaatgaggtgcacaacctgacagagtgcaagaatgcctctgtgtccatcagccacaacagctgcacagccccagacaagaccctcatcctggatgtgcccccaggagtggagaagttccagctgcatgactgcacccaggtggagaaggctgacaccaccatctgcctgaagtggaagaacatcgagaccttcacctgtgacacccagaacatcacctaccgcttccagtgtggcaacatgatctttgacaacaaggagatcaagctggagaacctggagcctgagcacgagtacaagtgtgacagcgagatcctgtacaacaaccacaagttcaccaatgccagcaagatcatcaagacagactttggcagccctggagagccccagatcatcttctgccgctctgaggccgcccaccagggcgtcatcacctggaaccccccccagaggagcttccacaacttcaccctgtgctacatcaaggagacagagaaggactgcctgaacctggacaagaacctgatcaagtatgacctgcagaacctgaagccctacaccaagtatgtgctgagcctgcacgcctacatcatcgccaaggtgcagagaaatggcagcgctgccatgtgccacttcaccaccaagagcgccccacccagccaggtgtggaacatgacagtgtccatgaccagtgacaacagcatgcacgtgaagtgcaggcctccccgggacagaaatggcccccatgagcgctaccacctggaggtggaggccggcaacaccctggtgagaaatgaaagccacaagaactgtgacttccgggtgaaggacctgcagtacagcacagactacaccttcaaggcctacttccacaacggggactacccaggagagcccttcatcctgcaccacagcaccagctacaacagcaaggccctgattgccttcctggccttcctgatcatcgtgaccagcatcgccctgctggtggtgctgtacaagatctatgacctgcacaagaagaggagctgcaacctggatgagcagcaggagctggtggagagagatgatgagaagcagctgatgaatgtggagcccatccatgctgacatcctgctggagacctacaagaggaagattgctgatgagggccgcctcttcctggccgagttccagagcatccccagggtcttcagcaagttccccatcaaggaggccaggaagcccttcaaccagaacaagaacagatatgtggacatcctgccctatgactacaacagagtggagctgtctgagatcaatggagatgctggcagcaactacatcaatgccagctacattgatggcttcaaggagcccaggaagtacatcgccgcccagggccccagagatgagaccgtggatgacttctggaggatgatctgggagcagaaggccaccgtcatcgtgatggtgacccgctgtgaggagggcaacagaaataaatgtgccgagtactggcccagcatggaggagggcacccgggcctttggagatgtggtggtgaagatcaaccagcacaagcgctgcccagactacatcatccagaagctgaacatcgtgaactag

SEQ ID NO: 286097 - DNA, 2202 bp, Artificial Sequence
  derived and/or modified sequence
atgtacctgtggctgaagctgctggccttcggctttgccttcctggacacagaggtgtttgtgacaggccagagccccacccccagccccactggagtgtcctctgtgcagaccccccacctgcccacccatgctgacagccagaccccatctgctggaacagacacccagaccttcagcggcagcgctgccaatgccaagctgaaccccaccccaggcagcaatgccatcagtgatgtgcctggagagaggagcacagccagcaccttccccacagatcctgtgagccccctgaccaccaccctgagcctggcccaccacagcagcgctgccctgcctgcccggaccagcaacaccaccatcacagccaacaccagtgatgcctacctgaatgccagcgagaccaccaccctgagccccagcggcagcgctgtgatcagcaccaccaccatcgccaccacccccagcaagcccacctgtgatgagaagtatgccaacatcaccgtggactacctgtacaacaaggagaccaagctgttcaccgccaagctgaatgtgaatgaaaatgtggagtgtggcaacaacacctgcaccaacaatgaggtgcacaacctgacagagtgcaagaatgcctctgtgtccatcagccacaacagctgcacagccccagacaagaccctcatcctggatgtgcccccaggagtggagaagttccagctgcatgactgcacccaggtggagaaggctgacaccaccatctgcctgaagtggaagaacatcgagaccttcacctgtgacacccagaacatcacctaccgcttccagtgtggcaacatgatctttgacaacaaggagatcaagctggagaacctggagcctgagcacgagtacaagtgtgacagcgagatcctgtacaacaaccacaagttcaccaatgccagcaagatcatcaagacagactttggcagccctggagagccccagatcatcttctgccgctctgaggccgcccaccagggcgtcatcacctggaaccccccccagaggagcttccacaacttcaccctgtgctacatcaaggagacagagaaggactgcctgaacctggacaagaacctgatcaagtatgacctgcagaacctgaagccctacaccaagtatgtgctgagcctgcacgcctacatcatcgccaaggtgcagagaaatggcagcgctgccatgtgccacttcaccaccaagagcgccccacccagccaggtgtggaacatgacagtgtccatgaccagtgacaacagcatgcacgtgaagtgcaggcctccccgggacagaaatggcccccatgagcgctaccacctggaggtggaggccggcaacaccctggtgagaaatgaaagccacaagaactgtgacttccgggtgaaggacctgcagtacagcacagactacaccttcaaggcctacttccacaacggggactacccaggagagcccttcatcctgcaccacagcaccagctacaacagcaaggccctgattgccttcctggccttcctgatcatcgtgaccagcatcgccctgctggtggtgctgtacaagatctatgacctgcacaagaagaggagctgcaacctggatgagcagcaggagctggtggagagagatgatgagaagcagctgatgaatgtggagcccatccatgctgacatcctgctggagacctacaagaggaagattgctgatgagggccgcctcttcctggccgagttccagagcatccccagggtcttcagcaagttccccatcaaggaggccaggaagcccttcaaccagaacaagaacagatatgtggacatcctgccctatgactacaacagagtggagctgtctgagatcaatggagatgctggcagcaactacatcaatgccagctacattgatggcttcaaggagcccaggaagtacatcgccgcccagggccccagagatgagaccgtggatgacttctggaggatgatctgggagcagaaggccaccgtcatcgtgatggtgacccgctgtgaggagggcaacagaaataaatgtgccgagtactggcccagcatggaggagggcacccgggcctttggagatgtggtggtgaagatcaaccagcacaagcgctgcccagactacatcatccagaagctgaacatcgtgaactag

SEQ ID NO: 286098 - DNA, 2208 bp, Artificial Sequence
  derived and/or modified sequence
atgaccatgtacctgtggctgaagctgctggccttcggcttcgccttcctggacacagaggtgttcgttaccggccagtcaccgaccccttcgcccacgggagtaagcagcgttcagacgccacatctgcccactcacgccgacagccagactcccagcgcaggaactgacacccagactttcagtgggtcagctgctaacgctaagcttaacccaacacctggttccaacgccatttccgacgttcctggcgaacggtcaacagccagcaccttccctactgatccagtatcccccctgacaaccaccctcagcctggcacatcacagtagcgctgccttgccagccaggaccagcaataccactataacagcgaacacatccgacgcctacctgaacgcaagcgagacaaccacgctcagtccctctggcagtgccgtgatttctaccactaccattgccactaccccctctaaacccacctgcgatgagaaatacgcaaatattacagtggattatctctacaataaagaaactaaactcttcaccgcgaaattgaatgtaaatgaaaacgtggagtgtgggaacaacacgtgcacaaacaatgaggtacataatctgacggagtgcaagaacgctagtgtctcaattagccacaatagttgcacggcaccagataagactctcatattagatgtcccgcctggcgttgaaaaatttcagttgcacgattgtacacaagtggaaaaggcagacactaccatttgcctgaagtggaaaaacattgagacctttacgtgcgacacacaaaatattacctaccgctttcagtgtggtaacatgatcttcgataataaagagatcaagctggagaacctggagccagaacatgaatataagtgtgactctgagatcctctataataaccataagtttaccaatgcaagcaaaatcataaaaactgattttggctcacctggtgagccccagatcatattttgccggtccgaagcggcccatcagggggtgatcacttggaatcctccccagagatcctttcacaactttaccctctgttatattaaagagaccgagaaagactgtcttaacctcgataaaaacctgatcaagtacgacctacaaaacctcaaaccatacacaaagtatgtgctatctttgcacgcctatattattgctaaagtccagcgaaatggctctgccgccatgtgtcattttacgaccaagtcggccccaccttcccaggtctggaacatgacagtgagcatgacaagcgataattccatgcacgttaagtgccgcccccctagggaccggaacgggccacacgagagataccacctggaggtcgaggccggcaatactcttgtacgaaatgaatcccataaaaactgcgattttagagtaaaggacctgcagtattctactgactacacatttaaagcttacttccataatggagactaccccggtgaacctttcattctgcaccattccaccagctataactcaaaggctctcatcgcctttctcgctttcctgattatagttacttccatagccctcctcgtggtgttgtataagatatacgacctgcataagaaaagaagctgcaatctggacgagcagcaggaactggttgagcgcgatgatgaaaagcagctcatgaatgtggagcctatccacgcagacatccttctggagacatataaaagaaaaattgccgatgaggggcggctgttcctcgcggagtttcaatccatcccaagggtgttttctaagttccccattaaggaagctcgtaagccatttaatcagaacaaaaaccggtatgtggatatcctaccatacgactataaccgcgtggagctatctgagattaacggagatgcagggagcaactacataaatgcttcctacatcgacggcttcaaagaaccccggaaatacattgccgcacaggggccgcgcgatgaaaccgtcgacgacttctggcgcatgatttgggaacagaaggcaacagtcattgttatggtaactagatgtgaggaaggcaaccgcaacaaatgcgcagaatactggcctagcatggaagagggcacacgcgctttcggagatgtagtagttaaaattaatcagcataaacgttgtcctgactatataatacagaagttgaacatagtaaactag

SEQ ID NO: 286099 - DNA, 2202 bp, Artificial Sequence
  derived and/or modified sequence
atgtacctgtggctgaagctgctggccttcggcttcgccttcctggatacagaggtgttcgtcacaggtcaatctcccaccccaagccctactggcgtatcttctgtacagacgccacacttgccgacccatgcggacagtcaaaccccatccgccggtactgatacacagacattttctgggtccgctgcgaacgccaaactgaacccaacacctggctcaaacgccatcagcgacgtgccaggtgagaggtccactgcatccacatttccgactgaccctgtgagtcctctcacaacaactctatccctggctcaccattccagtgccgcactgccggcccgcacaagtaacactactattacagccaataccagcgacgcatatttgaacgcatctgagaccacaaccctgtccccgtctggcagtgcagtcatatcaaccacaaccattgcaaccacaccgtcgaaaccgacctgtgatgagaagtatgccaatataaccgttgattacctgtataataaagaaactaagctgtttacagccaaactgaacgttaacgagaacgttgagtgcggaaacaacacatgtactaataatgaggtacacaatttaactgaatgtaagaatgctagtgtgtctatctctcataatagttgcaccgccccagataagaccctcatcctcgatgtgccaccgggcgttgaaaagttccagctgcacgattgcacacaggtagagaaagccgataccacaatttgccttaagtggaaaaacatagaaacctttacctgtgacactcagaatattacctaccggtttcagtgcggcaatatgatcttcgacaacaaggaaatcaagctcgagaatttagaacctgaacatgaatacaaatgtgattccgagatcctctataataatcataaatttaccaatgcttcgaaaatcattaaaacagacttcggttcacccggagagccacagattatattttgcaggagcgaggccgcgcaccagggagtgattacctggaacccgcctcagagatcattccataatttcacactttgctatatcaaagaaactgagaaggattgtctgaacttggacaagaacctaattaagtatgacctacaaaatctgaagccctatactaaatatgttctgtccctgcacgcttacatcatcgcaaaggttcaaagaaatggctccgcagccatgtgtcacttcaccacgaagtccgcccccccgtctcaggtctggaacatgacagtgagcatgacatcggacaattccatgcatgtaaaatgcaggccacctagggatcggaatggcccccacgaacggtaccatctcgaggtcgaggccggaaatacgctggtaaggaatgagagccacaagaattgcgactttagggtcaaggacctgcagtatagtactgactatacctttaaggcatactttcacaacggcgattacccaggcgaacctttcatcctccaccactctacttcatataactctaaggctctgatcgcttttctcgcttttctgattatagttaccagcatagcccttctcgttgtcctgtacaagatctacgacctgcacaagaaacgcagttgcaacctggacgagcaacaagagcttgtggaacgcgatgatgaaaaacaattaatgaatgtggagcctatccatgccgacatcctgctagagacctataagagaaaaattgccgacgaaggtcggttgttcctagccgagttccagtcaataccaagagtattttcaaagttcccgataaaggaggcgaggaagccattcaatcagaataaaaatcgttacgtagacatattgccctacgactacaaccgtgtcgagctgagcgaaattaatggggatgccggctccaattacataaacgcgagctacatcgacggatttaaggagcctaggaaatacattgcagcccagggaccccgcgacgaaaccgttgacgatttttggaggatgatctgggagcaaaaggccacagtgatcgtcatggttactagatgcgaggaggggaacagaaacaaatgtgcggagtattggccatccatggaagagggaacccgggccttcggagacgtggtagtcaagatcaaccagcacaaacgctgccccgattacatcatccaaaaattaaatattgttaattag

SEQ ID NO: 286100 - DNA, 2208 bp, Artificial Sequence
  derived and/or modified sequence
atgaccatgtacctctggctcaaacttctggcattcggatttgcatttctggacaccgaagtttttgtgaccggacagtctccaacaccctcacccacaggcgtgtccagcgttcagacaccccacctcccaacacacgctgattcccaaaccccgagtgctgggacagatacacagacatttagtggctcagctgcaaacgctaagctcaaccccacccctgggagcaatgcaatctccgatgtgccaggagagagaagcacagcctcaacctttcccaccgatccagtgagccccctcactaccactctctctctcgctcaccattcttcagcggcattacccgctaggacgtctaataccaccattacggcaaacacttcggatgcctacctgaatgcttctgagacaaccactctctctccgagcgggtcagcagtcatctctaccaccactattgccactacaccttccaaaccgacctgcgacgagaaatatgccaacataacggttgactacctttacaacaaagagaccaagcttttcaccgcaaaactgaacgttaacgagaacgttgaatgcggcaacaacacctgtaccaacaacgaggtacacaatctgacagagtgtaagaacgcctctgtgtcaatcagtcacaatagttgtaccgctccggacaagaccctgatcctagatgtcccaccaggtgtggagaaattccagctgcacgactgcacacaggtggagaaggccgataccactatttgtctcaaatggaagaacatcgaaaccttcacctgtgacacccaaaatataacctataggtttcagtgcggtaatatgattttcgataacaaggaaattaagctggagaatctggaacccgaacatgaatacaagtgcgactcagaaatcctgtacaataatcacaaatttacgaacgcgtcgaaaatcatcaagaccgactttggcagccctggagaaccacaaattatcttttgccggtctgaggccgctcatcagggcgtgattacttggaatcccccacagcgaagctttcataacttcacgctttgttatatcaaagagaccgagaaggactgcctgaacctcgacaagaatttaattaagtacgatctgcaaaacctgaaaccctacaccaaatatgtcctgtctcttcatgcctatattatagccaaagttcagcgaaatgggagcgccgctatgtgccatttcacaactaagagtgcgccaccatcacaagtgtggaatatgactgtctcaatgaccagtgacaactccatgcacgtgaaatgtaggccaccaagagacagaaacgggcctcacgaacgctatcacttggaggtagaagccggaaacaccctcgtacgaaatgaatctcacaaaaattgtgactttagagtgaaagatctccagtacagcacggactacacatttaaggcctatttccacaatggcgattatcctggagaaccatttatcctccatcactccacttcttacaactccaaggccctgattgccttccttgccttcttgattattgtcaccagtatcgccctgctggtggtgctgtataagatttacgatctgcacaaaaaaaggagttgtaatttagacgagcagcaggaactggtagagagagacgatgagaagcagctgatgaacgtagaacccatccacgccgacattttgctggagacctacaagcgcaagatcgctgacgagggcaggctctttctcgcagaattccaatccattccgagggttttctctaaattccccatcaaagaggctaggaaaccattcaatcaaaataaaaaccgctatgtcgatatacttccttatgattacaatagggtcgaattatcggagatcaacggcgacgccggatcgaactatattaatgcgagctacatagacggctttaaggaacctcgaaaatacatcgccgctcaaggacctcgcgacgaaactgttgacgatttttggcgtatgatttgggagcagaaggcgacagtgatcgtgatggtgaccagatgcgaagagggaaaccggaataaatgtgcagaatattggccttctatggaagaaggaacaagagccttcggagacgttgtcgtgaagatcaaccagcacaagcgttgcccagactacattattcagaagcttaacatagtaaattag

SEQ ID NO: 286101 - DNA, 2202 bp, Artificial Sequence
  derived and/or modified sequence
atgtatctgtggttgaagctgctggcatttggttttgctttcctcgatactgaagtgttcgtgactggccaatctcctaccccaagtcctacaggggtgtcttccgtgcagacgccacacttaccaacccatgcagacagccagacaccttctgccggaacagacactcaaaccttttctggcagtgctgccaatgccaaactaaacccgacccccggaagcaacgcgatctccgatgtgcctggggagagaagcactgcctctacattcccaaccgaccctgtctcccccctcactacgacgctaagcctggctcaccattcatcggccgctctgccagctagaaccagcaacaccaccatcaccgccaatacttccgatgcttacctgaatgcctctgagaccaccacattgtcaccctccggaagcgccgtgatttccacaaccaccatagccacgacgcccagcaagcccacttgtgacgagaagtatgctaacattacagtggactacctctataacaaagaaaccaagctctttacagctaagctaaacgtcaacgagaatgtagaatgtggcaataacacctgtacaaataatgaggttcataatcttaccgagtgcaaaaacgcttcagtgtctatctcccacaactcttgcaccgcccctgataagaccttaatactcgacgtcccccctggtgtagagaagttccagcttcacgactgcactcaggtggaaaaagccgacacaacaatttgtctgaaatggaagaatatcgaaactttcacatgcgacacccaaaatataacttatcgctttcaatgcgggaacatgatctttgataataaggagatcaagctggagaacctggaacctgaacatgagtacaagtgcgatagtgagatcctctacaacaatcacaagtttacgaatgcgtccaagattattaagactgacttcgggtctcccggagagcctcagatcatcttctgtcgctcggaggctgcgcatcaaggggtcattacctggaacccaccacaaagaagcttccataacttcactctgtgttatatcaaggagaccgagaaagactgcctcaatctggataagaatctgataaagtacgacttgcagaatctcaagccgtacacaaagtacgttttgtctcttcacgcctatattatagcgaaggtgcaacgcaatggcagcgccgctatgtgccactttaccacaaagagtgctcctccttcacaggtatggaatatgaccgtttccatgacgagcgacaactctatgcatgtcaaatgtagaccacccagggatagaaatggccctcacgagcgataccatctagaagttgaggccggaaataccctggttcgtaacgagagccataagaattgcgattttcgggtgaaggacctccagtattccaccgattatacatttaaggcctacttccataacggcgattaccctggcgagcctttcatactgcaccactcgacatcgtacaactctaaagccctgatagctttcctggccttcctcataattgtcacctcaattgcattactggtggtgctctacaaaatatatgatttgcataaaaaacggtcttgtaaccttgacgagcagcaagagctcgtcgaaagagacgatgagaagcagctcatgaacgtggaacctattcacgccgacattctgcttgagacctacaagagaaagattgccgacgagggcagactgttcctcgctgagttccagagtatcccaagagtctttagtaagttccctatcaaggaagctagaaagccatttaaccagaataaaaatcggtatgtggatatcctcccctatgattacaaccgagtggagctctctgaaatcaacggggatgcgggatctaactatataaatgcatcctatatcgacggattcaaggaaccacgcaagtatattgccgcacaggggccacgcgacgagaccgtagatgatttctggcgaatgatctgggaacagaaagcgacagtgattgtcatggtcacacgatgtgaggaggggaacaggaataagtgcgccgaatactggccaagcatggaggagggcacccgcgcttttggagacgtcgtggttaaaataaaccaacacaagagatgccctgactacattatccaaaagcttaatattgtaaactag

SEQ ID NO: 286102 - DNA, 5123 bp, Artificial Sequence
  derived and/or modified sequence
ggagaagttagtaaaaccgaatctgacatcatcacctagcagttcatgcagctagcaagtggtttgttcttagggtaacagaggaggaaattgttcctcgtctgataagacaacagtggagaaaggacgcatgctgtttcttagggacacggctgacttccagatatgaccatgtatttgtggcttaaactcttggcatttggctttgcctttctggacacagaagtatttgtgacagggcaaagcccaacaccttcccccactggtgtttcatcagtacagacgcctcaccttcccacgcacgcagactcgcagacgccctctgctggaactgacacgcagacattcagcggctccgccgccaatgcaaaactcaaccctaccccaggcagcaatgctatctcagatgtcccaggagagaggagtacagccagcacctttcctacagacccagtttccccattgacaaccaccctcagccttgcacaccacagctctgctgccttacctgcacgcacctccaacaccaccatcacagcgaacacctcagatgcctaccttaatgcctctgaaacaaccactctgagcccttctggaagcgctgtcatttcaaccacaacaatagctactactccatctaagccaacatgtgatgaaaaatatgcaaacatcactgtggattacttatataacaaggaaactaaattatttacagcaaagctaaatgttaatgagaatgtggaatgtggaaacaatacttgcacaaacaatgaggtgcataaccttacagaatgtaaaaatgcgtctgtttccatatctcataattcatgtactgctcctgataagacattaatattagatgtgccaccaggggttgaaaagtttcagttacatgattgtacacaagttgaaaaagcagatactactatttgtttaaaatggaaaaatattgaaacctttacttgtgatacacagaatattacctacagatttcagtgtggtaatatgatatttgataataaagaaattaaattagaaaaccttgaacccgaacatgagtataagtgtgactcagaaatactctataataaccacaagtttactaacgcaagtaaaattattaaaacagattttgggagtccaggagagcctcagattattttttgtagaagtgaagctgcacatcaaggagtaattacctggaatccccctcaaagatcatttcataattttaccctctgttatataaaagagacagaaaaagattgcctcaatctggataaaaacctgatcaaatatgatttgcaaaatttaaaaccttatacgaaatatgttttatcattacatgcctacatcattgcaaaagtgcaacgtaatggaagtgctgcaatgtgtcatttcacaactaaaagtgctcctccaagccaggtctggaacatgactgtctccatgacatcagataatagtatgcatgtcaagtgtaggcctcccagggaccgtaatggcccccatgaacgttaccatttggaagttgaagctggaaatactctggttagaaatgagtcgcataagaattgcgatttccgtgtaaaagatcttcaatattcaacagactacacttttaaggcctattttcacaatggagactatcctggagaaccctttattttacatcattcaacatcttataattctaaggcactgatagcatttctggcatttctgattattgtgacatcaatagccctgcttgttgttctctacaaaatctatgatctacataagaaaagatcctgcaatttagatgaacagcaggagcttgttgaaagggatgatgaaaaacaactgatgaatgtggagccaatccatgcagatattttgttggaaacttataagaggaagattgctgatgaaggaagactttttctggctgaatttcagagcatcccgcgggtgttcagcaagtttcctataaaggaagctcgaaagccctttaaccagaataaaaaccgttatgttgacattcttccttatgattataaccgtgttgaactctctgagataaacggagatgcagggtcaaactacataaatgccagctatattgatggtttcaaagaacccaggaaatacattgctgcacaaggtcccagggatgaaactgttgatgatttctggaggatgatttgggaacagaaagccacagttattgtcatggtcactcgatgtgaagaaggaaacaggaacaagtgtgcagaatactggccgtcaatggaagagggcactcgggcttttggagatgttgttgtaaagatcaaccagcacaaaagatgtccagattacatcattcagaaattgaacattgtaaataaaaaagaaaaagcaactggaagagaggtgactcacattcagttcaccagctggccagaccacggggtgcctgaggatcctcacttgctcctcaaactgagaaggagagtgaatgccttcagcaatttcttcagtggtcccattgtggtgcactgcagtgctggtgttgggcgcacaggaacctatatcggaattgatgccatgctagaaggcctggaagccgagaacaaagtggatgtttatggttatgttgtcaagctaaggcgacagagatgcctgatggttcaagtagaggcccagtacatcttgatccatcaggctttggtggaatacaatcagtttggagaaacagaagtgaatttgtctgaattacatccatatctacataacatgaagaaaagggatccacccagtgagccgtctccactagaggctgaattccagagacttccttcatataggagctggaggacacagcacattggaaatcaagaagaaaataaaagtaaaaacaggaattctaatgtcatcccatatgactataacagagtgccacttaaacatgagctggaaatgagtaaagagagtgagcatgattcagatgaatcctctgatgatgacagtgattcagaggaaccaagcaaatacatcaatgcatcttttataatgagctactggaaacctgaagtgatgattgctgctcagggaccactgaaggagaccattggtgacttttggcagatgatcttccaaagaaaagtcaaagttattgttatgctgacagaactgaaacatggagaccaggaaatctgtgctcagtactggggagaaggaaagcaaacatatggagatattgaagttgacctgaaagacacagacaaatcttcaacttatacccttcgtgtctttgaactgagacattccaagaggaaagactctcgaactgtgtaccagtaccaatatacaaactggagtgtggagcagcttcctgcagaacccaaggaattaatctctatgattcaggtcgtcaaacaaaaacttccccagaagaattcctctgaagggaacaagcatcacaagagtacacctctactcattcactgcagggatggatctcagcaaacgggaatattttgtgctttgttaaatctcttagaaagtgcggaaacagaagaggtagtggatatttttcaagtggtaaaagctctacgcaaagctaggccaggcatggtttccacattcgagcaatatcaattcctatatgacgtcattgccagcacctaccctgctcagaatggacaagtaaagaaaaacaaccatcaagaagataaaattgaatttgataatgaagtggacaaagtaaagcaggatgctaattgtgttaatccacttggtgccccagaaaagctccctgaagcaaaggaacaggctgaaggttctgaacccacgagtggcactgaggggccagaacattctgtcaatggtcctgcaagtccagctttaaatcaaggttcataggaaaagacataaatgaggaaactccaaacctcctgttagctgttatttctatttttgtagaagtaggaagtgaaaataggtatacagtggattaattaaatgcagcgaaccaatatttgtagaagggttatattttactactgtggaaaaatatttaagatagttttgccagaacagtttgtacagacgtatgcttattttaaaattttatctcttattcagtaaaaaacaacttctttgtaatcgttatgtgtgtatatgtatgtgtgtatgggtgtgtgtttgtgtgagagacagagaaagagagagaattctttcaagtgaatctaaaagcttttgcttttcctttgtttttatgaagaaaaaatacattttatattagaagtgttaacttagcttgaaggatctgtttttaaaaatcataaactgtgtgcagactcaataaaatcatgtacatttctgaaatgacctcaagatgtcctccttgttctactcatatatatctatcttatatagtttactattttacttctagagatagtacataaaggtggtatgtgtgtgtatgctactacaaaaaagttgttaactaaattaacattgggaaatcttatattccatatattagcatttagtccaatgtctttttaagcttatttaattaaaaaatttccagtgagcttatcatgctgtctttacatggggttttcaattttgcatgctcgattattccctgtacaatatttaaaatttattgcttgatacttttgacaacaaattaggttttgtacaattgaacttaaataaatgtcattaaaataaataaatgcaatatgtattaatattcattgtataaaaatagaagaatacaaacatatttgttaaatatttacatatgaaatttaatatagctatttttatggaatttttcattgatatgaaaaatatgatattgcatatgcatagttcccatgttaaatcccattcataactttcattaaagcatttactttgaatttctccaatgcttagaatgtttttaccaggaatggatgtcgctaatcataataaaattcaaccattatttttttcttgtttataatacattgtgttatatgttcaaatatgaaatgtgtatgcacctattgaaatatgtttaatgcatttattaacatttgcaggacacttttacaggccccaattatccaatagtctaataattgtttaagatctag

SEQ ID NO: 286103 - DNA, 2291 bp, Artificial Sequence
  derived and/or modified sequence
agaggaggaaattgttcctcgtctgataagacaacagtggagaaaggacgcatgctgtttcttagggacacggctgacttccagatatgaccatgtatttgtggcttaaactcttggcatttggctttgcctttctggacacagaagtatttgtgacagggcaaagcccaacaccttcccccactggtgtttcatcagtacagacgcctcaccttcccacgcacgcagactcgcagacgccctctgctggaactgacacgcagacattcagcggctccgccgccaatgcaaaactcaaccctaccccaggcagcaatgctatctcagatgtcccaggagagaggagtacagccagcacctttcctacagacccagtttccccattgacaaccaccctcagccttgcacaccacagctctgctgccttacctgcacgcacctccaacaccaccatcacagcgaacacctcagatgcctaccttaatgcctctgaaacaaccactctgagcccttctggaagcgctgtcatttcaaccacaacaatagctactactccatctaagccaacatgtgatgaaaaatatgcaaacatcactgtggattacttatataacaaggaaactaaattatttacagcaaagctaaatgttaatgagaatgtggaatgtggaaacaatacttgcacaaacaatgaggtgcataaccttacagaatgtaaaaatgcgtctgtttccatatctcataattcatgtactgctcctgataagacattaatattagatgtgccaccaggggttgaaaagtttcagttacatgattgtacacaagttgaaaaagcagatactactatttgtttaaaatggaaaaatattgaaacctttacttgtgatacacagaatattacctacagatttcagtgtggtaatatgatatttgataataaagaaattaaattagaaaaccttgaacccgaacatgagtataagtgtgactcagaaatactctataataaccacaagtttactaacgcaagtaaaattattaaaacagattttgggagtccaggagagcctcagattattttttgtagaagtgaagctgcacatcaaggagtaattacctggaatccccctcaaagatcatttcataattttaccctctgttatataaaagagacagaaaaagattgcctcaatctggataaaaacctgatcaaatatgatttgcaaaatttaaaaccttatacgaaatatgttttatcattacatgcctacatcattgcaaaagtgcaacgtaatggaagtgctgcaatgtgtcatttcacaactaaaagtgctcctccaagccaggtctggaacatgactgtctccatgacatcagataatagtatgcatgtcaagtgtaggcctcccagggaccgtaatggcccccatgaacgttaccatttggaagttgaagctggaaatactctggttagaaatgagtcgcataagaattgcgatttccgtgtaaaagatcttcaatattcaacagactacacttttaaggcctattttcacaatggagactatcctggagaaccctttattttacatcattcaacatcttataattctaaggcactgatagcatttctggcatttctgattattgtgacatcaatagccctgcttgttgttctctacaaaatctatgatctacataagaaaagatcctgcaatttagatgaacagcaggagcttgttgaaagggatgatgaaaaacaactgatgaatgtggagccaatccatgcagatattttgttggaaacttataagaggaagattgctgatgaaggaagactttttctggctgaatttcagagcatcccgcgggtgttcagcaagtttcctataaaggaagctcgaaagccctttaaccagaataaaaaccgttatgttgacattcttccttatgattataaccgtgttgaactctctgagataaacggagatgcagggtcaaactacataaatgccagctatattgatggtttcaaagaacccaggaaatacattgctgcacaaggtcccagggatgaaactgttgatgatttctggaggatgatttgggaacagaaagccacagttattgtcatggtcactcgatgtgaagaaggaaacaggaacaagtgtgcagaatactggccgtcaatggaagagggcactcgggcttttggagatgttgttgtaaagatcaaccagcacaaaagatgtccagattacatcattcagaaattgaacattgtaaat

SEQ ID NO: 286104 - protein, 34 aa, Artificial Sequence
  derived and/or modified sequence
MYLWLKLLAFGFAFLDTEVFVTGQSPTPSPTGKN

SEQ ID NO: 286105 - protein, 598 aa, Artificial Sequence
  derived and/or modified sequence
MYLWLKLLAFGFAFLDTEVFVTGQSPTPSPTGVSSVQTPHLPTHADSQTPSAGTDTQTFSGSAANAKLNPTPGSNAISDAYLNASETTTLSPSGSAVISTTTIATTPSKPTCDEKYANITVDYLYNKETKLFTAKLNVNENVECGNNTCTNNEVHNLTECKNASVSISHNSCTAPDKTLILDVPPGVEKFQLHDCTQVEKADTTICLKWKNIETFTCDTQNITYRFQCGNMIFDNKEIKLENLEPEHEYKCDSEILYNNHKFTNASKIIKTDFGSPGEPQIIFCRSEAAHQGVITWNPPQRSFHNFTLCYIKETEKDCLNLDKNLIKYDLQNLKPYTKYVLSLHAYIIAKVQRNGSAAMCHFTTKSAPPSQVWNMTVSMTSDNSMHVKCRPPRDRNGPHERYHLEVEAGNTLVRNESHKNCDFRVKDLQYSTDYTFKAYFHNGDYPGEPFILHHSTSYNSKALIAFLAFLIIVTSIALLVVLYKIYDLHKKRSCNLDEQQELVERDDEKQLMNVEPIHADILLETYKRKIADEGRLFLAEFQSIPRVFSKFPIKEARKPFNQNKNRYVDILPYDYNRVELSEINGDAGSNYINASYID

SEQ ID NO: 286106 - DNA, 1797 bp, Artificial Sequence
  derived and/or modified sequence
atgtacctgtggctgaagctgctggccttcggcttcgccttcctggacaccgaggtgttcgtgaccggccagagccccacccccagccccaccggcgtgagcagcgtgcagaccccccacctgcccacccacgccgacagccagacccccagcgccggcaccgacacccagaccttcagcggcagcgccgccaacgccaagctgaaccccacccccggcagcaacgccatcagcgacgcctacctgaacgccagcgagaccaccaccctgagccccagcggcagcgccgtgatcagcaccaccaccatcgccaccacccccagcaagcccacctgcgacgagaagtacgccaacatcaccgtggactacctgtacaacaaggagaccaagctgttcaccgccaagctgaacgtgaacgagaacgtggagtgcggcaacaacacctgcaccaacaacgaggtgcacaacctgaccgagtgcaagaacgccagcgtgagcatcagccacaacagctgcaccgcccccgacaagaccctgatcctggacgtgccccccggcgtggagaagttccagctgcacgactgcacccaggtggagaaggccgacaccaccatctgcctgaagtggaagaacatcgagaccttcacctgcgacacccagaacatcacctacagattccagtgcggcaacatgatcttcgacaacaaggagatcaagctggagaacctggagcccgagcacgagtacaagtgcgacagcgagatcctgtacaacaaccacaagttcaccaacgccagcaagatcatcaagaccgacttcggcagccccggcgagccccagatcatcttctgcagaagcgaggccgcccaccagggcgtgatcacctggaaccccccccagagaagcttccacaacttcaccctgtgctacatcaaggagaccgagaaggactgcctgaacctggacaagaacctgatcaagtacgacctgcagaacctgaagccctacaccaagtacgtgctgagcctgcacgcctacatcatcgccaaggtgcagagaaacggcagcgccgccatgtgccacttcaccaccaagagcgccccccccagccaggtgtggaacatgaccgtgagcatgaccagcgacaacagcatgcacgtgaagtgcagaccccccagagacagaaacggcccccacgagagataccacctggaggtggaggccggcaacaccctggtgagaaacgagagccacaagaactgcgacttcagagtgaaggacctgcagtacagcaccgactacaccttcaaggcctacttccacaacggcgactaccccggcgagcccttcatcctgcaccacagcaccagctacaacagcaaggccctgatcgccttcctggccttcctgatcatcgtgaccagcatcgccctgctggtggtgctgtacaagatctacgacctgcacaagaagagaagctgcaacctggacgagcagcaggagctggtggagagagacgacgagaagcagctgatgaacgtggagcccatccacgccgacatcctgctggagacctacaagagaaagatcgccgacgagggcagactgttcctggccgagttccagagcatccccagagtgttcagcaagttccccatcaaggaggccagaaagcccttcaaccagaacaagaacagatacgtggacatcctgccctacgactacaacagagtggagctgagcgagatcaacggcgacgccggcagcaactacatcaacgccagctacatcgactag

SEQ ID NO: 286107 - DNA, 1797 bp, Artificial Sequence
  derived and/or modified sequence
atgtacctatggctgaaactcctggcgtttgggttcgcttttcttgataccgaagtcttcgtgacaggccagtcgcctaccccttcccctaccggggtgagttccgttcagaccccgcacttgccaacacacgccgactctcagactcccagtgccggtaccgacactcagacctttagtggtagcgccgctaatgcgaaactaaacccaactcccggatcaaacgccataagcgatgcctacctcaacgcgtctgagacaaccacgctgtccccctctggaagtgccgtgatttccactacaactatagccacgacacccagtaagcctacatgtgatgagaaatatgcaaacatcacagtggactacctgtataacaaagaaacaaagctttttacagctaaactgaatgttaatgaaaacgtggagtgtgggaataacacctgcactaacaatgaggtgcataatctcactgaatgtaagaatgcgtcagtgagtatcagccataacagttgcaccgcccccgataagaccttaattctggacgtgcccccaggcgtggagaagttccagctgcatgattgtacccaggtcgagaaagccgatacaacaatatgtctcaaatggaagaacattgaaacctttacctgcgacacacagaatataacttataggtttcaatgtggcaatatgattttcgacaataaggaaattaaactggagaacttggagccagagcatgagtacaaatgcgattccgagattctgtataataaccataagttcactaacgcctcaaaaattatcaagaccgactttggaagtcccggcgagccccaaatcattttttgcagaagcgaggccgcacaccagggcgtgatcacctggaacccacctcagcggtctttccacaactttactctctgctatattaaggagaccgagaaggattgtctcaacctggacaagaacctcattaagtatgatctgcaaaatcttaaaccatatacaaagtacgtgttgtccctgcatgcttatatcatcgcgaaagtgcagcgaaacggatctgctgccatgtgccatttcacaacgaaatctgcccccccatcacaggtatggaacatgacagtgagtatgacgagcgataacagcatgcacgttaagtgtcgcccaccgcgcgaccgcaatgggcctcacgagcgctaccatttggaggtggaggctggaaatactctggtgcggaacgaaagccacaagaactgcgattttcgggttaaagatctgcagtattcgacagactacacctttaaagcttattttcataacggggattatccaggggagccttttattctacatcactccacatcatacaacagtaaagcccttatcgcttttctcgcatttctgattatcgtgaccagcattgccctgctggttgtactttataaaatttacgacctccataagaagagatcctgtaacctggatgagcagcaggagttggtcgagagggacgacgaaaagcaattaatgaatgtggagcctatccacgctgacatcctgcttgaaacatataagcgaaagatagcggacgaaggtcgcctgtttctagccgagtttcagagcattccgcgagtgtttagtaagttcccaattaaggaggctcggaaaccattcaaccaaaacaagaatcgatacgtagatatcctgccctatgactataatagagtggaactgtccgaaataaacggggatgcaggaagtaactacattaacgccagctatattgattag

SEQ ID NO: 286108 - DNA, 1797 bp, Artificial Sequence
  derived and/or modified sequence
atgtacctgtggctgaagctgctggccttcggctttgccttcctggacacagaggtgtttgtgacaggccagagccccacccccagccccactggagtgtcctctgtgcagaccccccacctgcccacccatgctgacagccagaccccatctgctggaacagacacccagaccttcagcggcagcgctgccaatgccaagctgaaccccaccccaggcagcaatgccatcagtgatgcctacctgaatgccagcgagaccaccaccctgagccccagcggcagcgctgtgatcagcaccaccaccatcgccaccacccccagcaagcccacctgtgatgagaagtatgccaacatcaccgtggactacctgtacaacaaggagaccaagctgttcaccgccaagctgaatgtgaatgaaaatgtggagtgtggcaacaacacctgcaccaacaatgaggtgcacaacctgacagagtgcaagaatgcctctgtgtccatcagccacaacagctgcacagccccagacaagaccctcatcctggatgtgcccccaggagtggagaagttccagctgcatgactgcacccaggtggagaaggctgacaccaccatctgcctgaagtggaagaacatcgagaccttcacctgtgacacccagaacatcacctaccgcttccagtgtggcaacatgatctttgacaacaaggagatcaagctggagaacctggagcctgagcacgagtacaagtgtgacagcgagatcctgtacaacaaccacaagttcaccaatgccagcaagatcatcaagacagactttggcagccctggagagccccagatcatcttctgccgctctgaggccgcccaccagggcgtcatcacctggaaccccccccagaggagcttccacaacttcaccctgtgctacatcaaggagacagagaaggactgcctgaacctggacaagaacctgatcaagtatgacctgcagaacctgaagccctacaccaagtatgtgctgagcctgcacgcctacatcatcgccaaggtgcagagaaatggcagcgctgccatgtgccacttcaccaccaagagcgccccacccagccaggtgtggaacatgacagtgtccatgaccagtgacaacagcatgcacgtgaagtgcaggcctccccgggacagaaatggcccccatgagcgctaccacctggaggtggaggccggcaacaccctggtgagaaatgaaagccacaagaactgtgacttccgggtgaaggacctgcagtacagcacagactacaccttcaaggcctacttccacaacggggactacccaggagagcccttcatcctgcaccacagcaccagctacaacagcaaggccctgattgccttcctggccttcctgatcatcgtgaccagcatcgccctgctggtggtgctgtacaagatctatgacctgcacaagaagaggagctgcaacctggatgagcagcaggagctggtggagagagatgatgagaagcagctgatgaatgtggagcccatccatgctgacatcctgctggagacctacaagaggaagattgctgatgagggccgcctcttcctggccgagttccagagcatccccagggtcttcagcaagttccccatcaaggaggccaggaagcccttcaaccagaacaagaacagatatgtggacatcctgccctatgactacaacagagtggagctgtctgagatcaatggagatgctggcagcaactacatcaatgccagctacattgattag

SEQ ID NO: 286109 - DNA, 1797 bp, Artificial Sequence
  derived and/or modified sequence
atgtacctgtggctgaagctgctggccttcggcttcgccttcctggacacagaagtctttgtgacaggacaaagcccgaccccctctccaactggggtgtcctcagtccaaaccccacatctccccacccatgctgactcccagactccaagcgccggaactgacacccaaacatttagcggcagcgcagccaacgctaagcttaatccgacccccggttcaaacgctatcagtgacgcttatctgaacgcctccgagacaacaaccttgtccccttcagggagcgctgtgattagcaccacgacaatcgcaaccactccgtctaaacccacctgcgatgaaaaatatgccaatattacggtggactacctctacaataaggaaactaaactgtttacggccaaactgaatgtgaatgaaaatgtggagtgtggcaataatacctgcaccaataacgaggttcataatcttacagaatgtaagaacgccagcgtatccatatcacataatagctgcaccgcacctgataagacgctcattctcgatgtgccccccggagtggagaagttccagctgcatgactgcacacaggtggagaaagcagacacaaccatttgtctgaaatggaagaacatcgaaacgttcacctgtgacactcagaatattacctatcgcttccagtgcggtaacatgattttcgacaacaaagagattaagcttgagaatctggagccggaacatgaatacaaatgcgattccgagattctttataataaccataagtttactaatgcaagcaaaattataaagacagattttgggtcaccaggcgaaccccagatcatcttctgtcgctcagaagctgcccaccaaggcgtcattacatggaatccaccacagcgcagcttccataactttactttgtgctatatcaaggagacagagaaggactgcctgaacctggacaaaaatctgattaagtacgatctccagaaccttaagccctacactaaatacgtgctttccctacatgcatacataatcgctaaggttcagcgcaacgggagtgcggcgatgtgccatttcaccacgaaatctgccccccccagccaggtgtggaacatgaccgtctcaatgactagcgacaactcaatgcacgtcaagtgccgccctccgagagaccggaatggcccacacgagagatatcatctggaggtggaagcaggaaacactctggtgcgcaatgagagccacaaaaattgcgattttagggtcaaggatttgcaatacagtacggattacacattcaaagcatactttcacaatggggactaccctggcgagcctttcatactgcaccacagtacctcttacaacagcaaagccctgattgctttccttgctttcctgattattgtaacttctatagctctgctggtcgtactctacaaaatctacgacctgcataagaaacggagctgcaatctggacgagcagcaggaactggtggaacgagacgacgagaaacagctgatgaatgtggagcccattcatgccgatattctgctggaaacttataaacggaagatagcagacgaagggaggctgttcctggctgagtttcagtctatccctagagtcttctcaaaatttccgatcaaagaggctcgaaaaccttttaaccagaataaaaatagatatgtggacattctgccttacgattataatcgcgtggaactgtcagagattaacggcgacgctggcagtaactacataaacgcaagctacatcgactag

SEQ ID NO: 286110 - DNA, 1797 bp, Artificial Sequence
  derived and/or modified sequence
atgtatctgtggctgaagttactggcctttggattcgcgttccttgataccgaagtattcgtcaccggtcagtccccaacccctagcccaactggggtctcaagtgtgcaaaccccccatctgcccacccacgctgattctcaaactccctcagctggcacagacacgcagactttttccggtagcgctgctaatgccaagctgaatcccacacccggatcaaatgcaatttctgacgcatacctaaatgcctcagaaacaactaccctttctccgtcaggatctgcagtgattagcacaaccaccatagcaacaaccccttctaagcccacttgcgatgagaaatatgcaaatataacagttgactatctgtacaacaaggaaacaaagctgtttaccgccaagctaaacgtgaacgaaaacgtcgaatgtggtaataatacgtgtacaaataacgaggtacataacttgacagagtgcaagaatgcctcagtcagcatttcccacaatagctgcaccgcccctgataagacacttattttggatgtccctccgggagtggagaagttccagctgcacgattgcacgcaggtagagaaggcagacaccaccatctgcctgaaatggaagaatatagaaacctttacatgtgatactcagaacattacatatagattccagtgcggtaatatgatatttgataacaaagaaatcaagctggagaacctggaaccagagcacgagtataagtgcgattccgagatcttatataataaccataaattcacaaacgcgtctaagattataaagacagattttggctcacccggagagcctcagattattttttgtcggtctgaagcagcccaccagggcgtgatcacctggaatcccccacagaggtcatttcacaatttcactttgtgttatattaaagagacagaaaaggactgcttgaacctcgacaagaaccttatcaagtacgacctgcaaaaccttaaaccctacacaaaatatgtcctatctcttcatgcctatatcatcgccaaggtgcagaggaatggcagtgctgccatgtgtcactttacaaccaaaagcgctcctcctagtcaggtctggaacatgaccgtttcaatgacttcggataattctatgcacgtgaaatgccgtccgcctcgggacaggaacggccctcacgaaagatatcatctcgaggtcgaggccggaaatactctcgtccggaacgagagtcataaaaactgtgactttagagtgaaagaccttcaatactccaccgactatacgttcaaggcctatttccacaacggggactatccaggtgaaccctttatccttcaccatagcacttcctacaactccaaagcccttatagcctttttggccttcctcatcattgtgacctctatcgccctgctggtggtgctctataaaatttatgatctccacaagaagcggtcctgtaatcttgacgaacagcaggaactggttgaaagagacgacgagaaacagctgatgaatgtggagccgatccatgccgacatcctcttggaaacctacaagcgcaaaattgccgacgagggcaggttgtttctggccgagtttcagtctatccctcgggtgttcagcaagttccctattaaagaagccaggaagccttttaaccagaataaaaatcgctacgtcgacatcctcccctatgactataaccgcgttgaactgtccgagataaatggggacgcgggatccaactatatcaatgcttcctatatcgattag

SEQ ID NO: 286111 - DNA, 1962 bp, Artificial Sequence
  derived and/or modified sequence
gaagttagtaaaaccgaatctgacatcatcacctagcagttcatgcagctagcaagtggtttgttcttagggtaacagaggaggaaattgttcctcgtctgataagacaacagtggagaaaggacgcatgctgtttcttagggacacggctgacttccagatatgaccatgtatttgtggcttaaactcttggcatttggctttgcctttctggacacagaagtatttgtgacagggcaaagcccaacaccttcccccactggtgtttcatcagtacagacgcctcaccttcccacgcacgcagactcgcagacgccctctgctggaactgacacgcagacattcagcggctccgccgccaatgcaaaactcaaccctaccccaggcagcaatgctatctcagatgcctaccttaatgcctctgaaacaaccactctgagcccttctggaagcgctgtcatttcaaccacaacaatagctactactccatctaagccaacatgtgatgaaaaatatgcaaacatcactgtggattacttatataacaaggaaactaaattatttacagcaaagctaaatgttaatgagaatgtggaatgtggaaacaatacttgcacaaacaatgaggtgcataaccttacagaatgtaaaaatgcgtctgtttccatatctcataattcatgtactgctcctgataagacattaatattagatgtgccaccaggggttgaaaagtttcagttacatgattgtacacaagttgaaaaagcagatactactatttgtttaaaatggaaaaatattgaaacctttacttgtgatacacagaatattacctacagatttcagtgtggtaatatgatatttgataataaagaaattaaattagaaaaccttgaacccgaacatgagtataagtgtgactcagaaatactctataataaccacaagtttactaacgcaagtaaaattattaaaacagattttgggagtccaggagagcctcagattattttttgtagaagtgaagctgcacatcaaggagtaattacctggaatccccctcaaagatcatttcataattttaccctctgttatataaaagagacagaaaaagattgcctcaatctggataaaaacctgatcaaatatgatttgcaaaatttaaaaccttatacgaaatatgttttatcattacatgcctacatcattgcaaaagtgcaacgtaatggaagtgctgcaatgtgtcatttcacaactaaaagtgctcctccaagccaggtctggaacatgactgtctccatgacatcagataatagtatgcatgtcaagtgtaggcctcccagggaccgtaatggcccccatgaacgttaccatttggaagttgaagctggaaatactctggttagaaatgagtcgcataagaattgcgatttccgtgtaaaagatcttcaatattcaacagactacacttttaaggcctattttcacaatggagactatcctggagaaccctttattttacatcattcaacatcttataattctaaggcactgatagcatttctggcatttctgattattgtgacatcaatagccctgcttgttgttctctacaaaatctatgatctacataagaaaagatcctgcaatttagatgaacagcaggagcttgttgaaagggatgatgaaaaacaactgatgaatgtggagccaatccatgcagatattttgttggaaacttataagaggaagattgctgatgaaggaagactttttctggctgaatttcagagcatcccgcgggtgttcagcaagtttcctataaaggaagctcgaaagccctttaaccagaataaaaaccgttatgttgacattcttccttatgattataaccgtgttgaactctctgagataaacggagatgcagggtcaaactacataaatgccagctatattgat

SEQ ID NO: 286112 - protein, 572 aa, Artificial Sequence
  derived and/or modified sequence
MWGTGPSAGKDRMSGRPWPHPWSKSGTPSEQDRRATGLVSCEHGGGKFEGQSHQAPGPPGGGRTGCLELLAAKKTHTSQIEVIPCKICGDKSSGIHYGVITCEGCKGFFRRSQRCNAAYSCTRQQNCPIDRTSRNRCQHCRLQKCLALGMSRDAVKFGRMSKKQRDSLHAEVQKQLQQRQQQQQEPVVKTPPAGAQGADTLTYTLGLPDGQLPLGSSPDLPEASACPPGLLKASGSGPSYSNNLAKAGLNGASCHLEYSPERGKAEGRESFYSTGSQLTPDRCGLRFEEHRHPGLGELGQGPDSYGSPSFRSTPEAPYASLTEIEHLVQSVCKSYRETCQLRLEDLLRQRSNIFSREEVTGYQRKSMWEMWERCAHHLTEAIQYVVEFAKRLSGFMELCQNDQIVLLKAGAMEVVLVRMCRAYNADNRTVFFEGKYGGMELFRALGCSELISSIFDFSHSLSALHFSEDEIALYTALVLINAHRPGLQEKRKVEQLQYNLELAFHHHLCKTHRQSILAKLPPKGKLRSLCSQHVERLQIFQHLHPIVVQAAFPPLYKELFSTETESPVGLSK

SEQ ID NO: 286113 - DNA, 1719 bp, Artificial Sequence
  derived and/or modified sequence
atgtggggcacaggcccctcggccgggaaagaccggatgtctgggcgcccatggccccacccctggtccaagagtggaacaccctctgaacaggatcgtcgcgcaacaggcctcgtctcgtgtgaacacggaggcgggaagtttgagggacagtcccatcaggctccaggcccccctggcggaggacgtaccggctgcctcgagcttttagccgccaagaaaacgcacacatcacagattgaagtgatcccctgcaaaatttgcggtgacaagtcatccgggatccactatggcgtaattacctgcgagggttgcaaaggtttctttcggcgttctcagaggtgcaacgccgcgtattcttgcacacggcagcagaactgccccattgacagaacatcgaggaacaggtgccaacattgtagacttcagaaatgtctagcgctgggaatgtcacgcgatgcagtgaaatttgggaggatgtccaagaaacagcgggacagcctgcatgccgaggtgcagaagcagctgcagcagagacagcagcagcagcaggagcctgtcgtaaagacacccccagccggcgcccaaggggccgatactctgacatacacactgggtctcccagacggacagctgccactaggttccagtcccgacctcccagaggccagcgcttgccctcccgggctgctgaaggctagcggaagtggacccagctacagcaacaacctggcgaaggcgggcctaaatggcgctagttgccatcttgagtactcaccggaacgggggaaggcggagggacgtgagtccttctactctaccggatcacagctcacccctgaccggtgcggacttcggtttgaagaacataggcaccccgggctgggtgagcttggacaaggcccagacagttatgggagcccttctttccgctctacacctgaggctccatatgccagtttgaccgagattgagcatttagttcagtccgtctgtaagtcttatcgcgagacctgtcagctccgcctggaggacttgctgcgccagcgttcgaacatcttctcgagggaggaggtcacgggataccagcgaaaaagcatgtgggagatgtgggagcggtgcgcccatcatctgaccgaggcaatccagtacgtagttgagttcgccaaaaggctaagtggctttatggaactgtgccaaaacgatcaaatagtattgcttaaggcaggagctatggaagtggtgctcgtgcgcatgtgcagagcctataacgcagataaccggacggtgttttttgaagggaaatacggcggcatggaacttttcagagccctgggttgttcggagcttatttcaagcatctttgacttctcccactcgctgagcgccttgcacttttcagaagacgaaatcgctttgtataccgccctggtcctgatcaatgcccacagaccaggactccaggaaaagaggaaggtagagcagctacagtataacctggaactagcgtttcatcaccacctatgtaaaacgcacaggcagtctatcctggcaaagttaccacccaaagggaagttacgaagcctgtgctctcagcacgttgagaggctgcagattttccaacacctgcatccgatcgtggttcaggccgcatttccccccctctacaaggagcttttttcgacggagacagaatcgcccgtgggcctgagtaagtag

SEQ ID NO: 286114 - DNA, 1719 bp, Artificial Sequence
  derived and/or modified sequence
atgtggggcaccggccccagcgctgggaaggacaggatgagcggccggccctggccccacccctggagcaagagcggcaccccatctgagcaggacagaagagccaccggcctggtgtcctgtgaacatggaggcggcaagtttgagggccagagccaccaggcccctggccccccaggcggcggccgcacaggctgcctggagctgctggccgccaagaagacccacaccagccagatcgaggtgatcccctgcaagatctgtggggacaagagcagcggcatccactatggagtcatcacctgtgagggctgcaagggcttcttccgccgcagccagcgctgcaatgctgcctacagctgcacccggcagcagaactgccccatcgacaggaccagcaggaaccgctgccagcactgccgcctgcagaagtgcctggccctgggcatgagcagagatgctgtgaagtttggaaggatgagcaagaagcagagggacagcctgcacgccgaggtgcagaagcagctgcagcagaggcagcagcagcagcaggagcctgtggtgaagaccccacctgctggggcccagggcgctgacaccctgacctacaccctgggcctgcctgatggccagctgcccctgggcagcagcccagacctgcctgaggccagcgcctgccccccaggcctgctgaaggccagcggcagcggccccagctacagcaacaacctggccaaggccggcctgaatggagccagctgccacctggagtacagccctgagcggggcaaggccgagggccgggagagcttctacagcacaggcagccagctgaccccagacagatgtggcctgcgctttgaggagcaccgccaccctggcctgggggagctgggccagggccctgacagctatggcagccccagcttccgcagcaccccagaggccccctatgccagcctgacagaaattgagcacctggtgcagagcgtgtgcaagagctaccgggagacctgccagctgcggctggaggacctgctgcggcagaggagcaacatcttcagccgggaggaggtgacaggctaccagaggaagtccatgtgggagatgtgggagcgctgtgcccaccacctgacagaggccatccagtatgtggtggagtttgccaagaggctgagcggcttcatggagctgtgccagaatgaccagatcgtgctgctgaaggccggggccatggaggtggtgctggtgaggatgtgccgggcctacaatgctgacaacagaacagtgttctttgagggcaagtatggaggcatggagctgttccgggccctgggctgcagcgagctgatcagcagcatctttgacttcagccacagcctgagcgccctgcacttctctgaagatgaaattgccctgtacacagccctggtgctgatcaatgcccacaggcctggcctgcaggagaagaggaaggtggagcagctgcagtacaacctggagctggccttccaccaccacctgtgcaagacccaccggcagagcatcctggccaagctgccccccaagggcaagctgcggagcctgtgcagccagcacgtggagcggctgcagatcttccagcacctgcaccccatcgtggtgcaggccgccttcccccccctgtacaaggagctgttcagcacagaaacagagagccctgtgggcctgagcaagtag

SEQ ID NO: 286115 - DNA, 1719 bp, Artificial Sequence
  derived and/or modified sequence
atgtggggcaccggccccagcgccggcaaggaccggatgagcggccggccttggcctcatccttggtcgaaatccggaaccccctctgagcaggaccgacgggcaaccgggctcgtgagttgcgagcacgggggaggcaaattcgaggggcagtcgcaccaggccccaggtcctccgggtggcggcaggacggggtgcttggaactcctggcagcaaaaaagactcatacaagccagatcgaagtgatcccttgtaagatttgtggagacaagagcagtgggattcactacggggtcataacatgtgagggctgcaagggtttcttcaggcgcagccaaaggtgcaacgcggcatacagttgcactcgccagcagaattgtcccattgatcgcacatcacggaaccggtgccagcattgccgtctacagaaatgtcttgcactgggcatgtcaagagatgcagttaagttcggccggatgagcaagaaacagcgggacagcctgcacgccgaagtccagaagcagttacagcagaggcagcagcagcagcaggaacccgttgttaagaccccaccagctggcgcacaaggggccgacacgctgacttatactctcggactccccgatggacagctgcccctgggcagcagccccgacctgccagaagcttccgcatgtccgcctggccttctgaaagcaagcggttctgggccaagctatagtaataatcttgctaaggcagggctgaacggtgcaagttgtcatctcgaatacagccctgaacgagggaaggctgaagggagggagagtttctactccactggttcccagctgacacctgacagatgcgggctgcggtttgaagaacatcgccatcccgggctcggcgagctgggccaagggcctgatagctacgggtccccgagttttcggtccactcctgaggctccttatgcctcccttactgagatcgagcacttggttcagtcggtgtgtaaaagctacagggagacctgccaactgcgtctggaagacttattgcggcagagatcaaacatattctctagagaagaggtcaccggataccagcgtaaatcaatgtgggaaatgtgggagcggtgcgcccatcatctgacagaagccatccagtatgtggtggagtttgctaaacggctatctggcttcatggagctgtgtcaaaacgatcagatcgtgctgcttaaagccggtgctatggaggtggttctggtgcggatgtgccgagcatacaatgctgataaccgcaccgtgttctttgaggggaagtacggcggcatggagttattcagagcactcggatgctccgagctaatctcatctatatttgacttctctcacagtctgagtgccttacatttttccgaggacgagatcgcgctttatactgcattggtcctgataaatgctcatcgcccaggcttacaggagaaacggaaggtagaacagctgcagtataatctggagctcgcctttcaccaccatttgtgcaaaacccacaggcagtctatcctggcaaagctcccaccaaaggggaagctgcgctccctatgtagccagcatgttgaacggttgcagatcttccagcatctgcatcccatagtggtccaggccgcctttcctcccctctacaaagaactgtttagtaccgaaacagaatcacctgtggggttaagtaaatag

SEQ ID NO: 286116 - DNA, 1719 bp, Artificial Sequence
  derived and/or modified sequence
atgtggggaacaggaccttccgcaggcaaggaccgcatgtcaggtcgcccatggccacacccttggagcaagtctgggacccccagtgaacaggatcgtcgggcaacggggctggtctcatgcgagcacggcggtggaaagttcgagggccagtctcaccaggctcccggacccccagggggtggaagaactgggtgtttggagctgctggctgccaaaaaaactcatactagtcagattgaggtgatcccctgcaaaatttgtggggacaagtctagtggaatccactacggcgtgattacctgtgagggatgtaaaggcttcttccgtcgctctcagcgttgcaacgccgcatactcctgcactcgccagcaaaactgtccgattgatcgcacctcaaggaatagatgtcagcattgcaggctgcagaagtgcctggctcttggcatgtctagagacgcggtgaagtttgggaggatgagcaaaaaacaaagggattcattgcatgctgaggttcagaagcaactgcagcagcgtcagcagcagcagcaggagccagtcgtgaagaccccgcctgccggtgcacagggcgctgacaccttaacatacaccctgggcctacccgacgggcagctccccttaggtagctccccagatctcccggaagcctctgcatgcccgcctggcctgctgaaagctagtggaagtggacccagctactcaaacaatctagcgaaggcagggctcaatggggcttcttgccacctggagtactcacctgagagaggcaaagcggaagggagggaatccttctattctactggcagccagttaactccggacagatgtgggctgcgcttcgaggagcatcgacaccctgggttgggagagcttggacagggacccgatagttatggatctccaagcttccggagcacccctgaggcaccatatgcttcactgacagagattgaacatctggtccagtccgtgtgcaagtcctaccgcgaaacctgccagctgcgcctggaagatctgctgcgccaaagatcaaacattttcagcagagaggaggtcacagggtaccagcgcaagagcatgtgggagatgtgggaacggtgtgcccaccacctgacagaggctatacagtatgtggtggaattcgccaaacgtctgtctggattcatggagctctgccagaacgatcagattgttttgctgaaagcaggagccatggaagtggtgctggtcagaatgtgtcgcgcatacaacgctgacaatagaactgtgttctttgagggcaagtatggcggaatggaactgttcagagccttaggatgctctgagttaattagttcaatcttcgatttttctcactcactgtcagctctgcatttcagtgaagacgagatcgcgctgtacaccgcgctagtattgatcaatgcacaccgcccaggccttcaggagaagagaaaggtcgagcagctacagtataatctggaactggcgtttcaccaccacctgtgcaagacacacagacaaagcatccttgctaagctgccacctaaaggaaagttacgcagtttgtgctcacagcatgttgagaggctccagatttttcagcatttgcaccctattgtggtgcaggccgcattccctcctctgtacaaggagctgttcagcacagagaccgaatcgcccgtaggcttgtccaaatag

SEQ ID NO: 286117 - DNA, 2326 bp, Artificial Sequence
  derived and/or modified sequence
acagagacagcaccgagcctcacgggagaatgtggggcactgggccatcagcagggaaggacagaatgtcaggccgtccttggccccacccatggtccaagtcaggaaccccctcagagcaggatcgcagggccacaggcttggtcagctgtgagcatggaggaggaaagtttgagggccagagccaccaagctccagggccacctggtggaggaagaactggctgcctggagctgctggctgcaaagaagacccacacctcacaaattgaagtgatcccttgcaaaatctgtggggacaagtcgtctgggatccactacggggttatcacctgtgaggggtgcaagggcttcttccgccggagccagcgctgtaacgcggcctactcctgcacccgtcagcagaactgccccatcgaccgcaccagccgaaaccgatgccagcactgccgcctgcagaaatgcctggcgctgggcatgtcccgagatgctgtcaagttcggccgcatgtccaagaagcagagggacagcctgcatgcagaagtgcagaaacagctgcagcagcggcaacagcagcaacaggaaccagtggtcaagacccctccagcaggggcccaaggagcagataccctcacctacaccttggggctcccagacgggcagctgcccctgggctcctcgcctgacctgcctgaggcttctgcctgtccccctggcctcctgaaagcctcaggctctgggccctcatattccaacaacttggccaaggcagggctcaatggggcctcatgccaccttgaatacagccctgagcggggcaaggctgagggcagagagagcttctatagcacaggcagccagctgacccctgaccgatgtggacttcgttttgaggaacacaggcatcctgggcttggggaactgggacagggcccagacagctacggcagccccagtttccgcagcacaccggaggcaccctatgcctccctgacagagatagagcacctggtgcagagcgtctgcaagtcctacagggagacatgccagctgcggctggaggacctgctgcggcagcgctccaacatcttctcccgggaggaagtgactggctaccagaggaagtccatgtgggagatgtgggaacggtgtgcccaccacctcaccgaggccattcagtacgtggtggagttcgccaagaggctctcaggctttatggagctctgccagaatgaccagattgtgcttctcaaagcaggagcaatggaagtggtgctggttaggatgtgccgggcctacaatgctgacaaccgcacggtcttttttgaaggcaaatacggtggcatggagctgttccgagccttgggctgcagcgagctcatcagctccatctttgacttctcccactccctaagtgccttgcacttttccgaggatgagattgccctctacacagcccttgttctcatcaatgcccatcggccagggctccaagagaaaaggaaagtagaacagctgcagtacaatctggagctggcctttcatcatcatctctgcaagactcatcgccaaagcatcctggcaaagctgccacccaaggggaagcttcggagcctgtgtagccagcatgtggaaaggctgcagatcttccagcacctccaccccatcgtggtccaagccgctttccctccactctacaaggagctcttcagcactgaaaccgagtcacctgtggggctgtccaagtgacctggaagagggactccttgcctctccctatggcctgctggcccacctccctggaccccgttccaccctcacccttttcctttcccatgaaccctggagggtggtccccaccagctctttggaagtgagcagatgctgcggctggctttctgtcagcaggccggcctggcagtgggacaatcgccagagggtggggctggcagaacaccatctccagcctcagctttgacctgtctcatttcccatattccttcacacccagcttctggaaggcatggggtggctgggatttaaggacttctgggggaccaagacatcctcaagaaaacaggggcatccagggctccctggatgaatagaatgcaattcattcagaagctcagaagctaagaataagcctttgaaatacctcattgcatttccctttgggcttcggcttggggagatggatcaagctcagagactggcagtgagagcccagaaggacctgtataaaatgaatctggagctttacattttctgcctctgccttcctcccagctcagcaaggaagtatttgggcaccctaccctttacct

SEQ ID NO: 286118 - DNA, 1719 bp, Artificial Sequence
  derived and/or modified sequence
atgtggggcaccggccccagcgccggcaaggacagaatgagcggcagaccctggccccacccctggagcaagagcggcacccccagcgagcaggacagaagagccaccggcctggtgagctgcgagcacggcggcggcaagttcgagggccagagccaccaggcccccggcccccccggcggcggcagaaccggctgcctggagctgctggccgccaagaagacccacaccagccagatcgaggtgatcccctgcaagatctgcggcgacaagagcagcggcatccactacggcgtgatcacctgcgagggctgcaagggcttcttcagaagaagccagagatgcaacgccgcctacagctgcaccagacagcagaactgccccatcgacagaaccagcagaaacagatgccagcactgcagactgcagaagtgcctggccctgggcatgagcagagacgccgtgaagttcggcagaatgagcaagaagcagagagacagcctgcacgccgaggtgcagaagcagctgcagcagagacagcagcagcagcaggagcccgtggtgaagaccccccccgccggcgcccagggcgccgacaccctgacctacaccctgggcctgcccgacggccagctgcccctgggcagcagccccgacctgcccgaggccagcgcctgcccccccggcctgctgaaggccagcggcagcggccccagctacagcaacaacctggccaaggccggcctgaacggcgccagctgccacctggagtacagccccgagagaggcaaggccgagggcagagagagcttctacagcaccggcagccagctgacccccgacagatgcggcctgagattcgaggagcacagacaccccggcctgggcgagctgggccagggccccgacagctacggcagccccagcttcagaagcacccccgaggccccctacgccagcctgaccgagatcgagcacctggtgcagagcgtgtgcaagagctacagagagacctgccagctgagactggaggacctgctgagacagagaagcaacatcttcagcagagaggaggtgaccggctaccagagaaagagcatgtgggagatgtgggagagatgcgcccaccacctgaccgaggccatccagtacgtggtggagttcgccaagagactgagcggcttcatggagctgtgccagaacgaccagatcgtgctgctgaaggccggcgccatggaggtggtgctggtgagaatgtgcagagcctacaacgccgacaacagaaccgtgttcttcgagggcaagtacggcggcatggagctgttcagagccctgggctgcagcgagctgatcagcagcatcttcgacttcagccacagcctgagcgccctgcacttcagcgaggacgagatcgccctgtacaccgccctggtgctgatcaacgcccacagacccggcctgcaggagaagagaaaggtggagcagctgcagtacaacctggagctggccttccaccaccacctgtgcaagacccacagacagagcatcctggccaagctgccccccaagggcaagctgagaagcctgtgcagccagcacgtggagagactgcagatcttccagcacctgcaccccatcgtggtgcaggccgccttcccccccctgtacaaggagctgttcagcaccgagaccgagagccccgtgggcctgagcaagtag

SEQ ID NO: 286119 - DNA, 774 bp, Artificial Sequence
  derived and/or modified sequence
atgagcggtagtcgtcaggccggcagcggtagtgctgggacatctcctggtagctctgcagcaagcagcgtgacttcagcgtcatctagcttgtcaagcagcccatcccctccttctgtggctgtgagcgcagccgccctagtgtctggcggcgtggcccaggccgccggttcaggaggattgggcggtcctgtgagaccagtcctggtggcgcccgcggtatcggggtccggagggggagccgtgagtacaggattaagtagacattcatgcgctgccagaccctctgcgggggttggcggtagcagcagttccttgggctctgggtcccgaaagcgacctttactggcccctttgtgcaatgggctgatcaactcctatgaagataaaagtaacgacttcgtgtgtcctatttgcttcgatatgattgaagaggcatatatgacaaaatgcggccacagtttttgctacaagtgcattcaccaatcattggaggacaataaccgctgtccgaagtgtaattacgttgttgataatatagaccacttgtacccaaattttttagtgaatgaattgatcctgaagcaaaaacagaggttcgaggaaaaacggtttaagcttgaccactcagtcagcagcacgaatggccacaggtggcaaattttccaagattggctcggtactgaccaggataacctggacctggcaaatgtaaacctgatgctggagctgttggttcaaaagaacaagaagaagaagaagaaaaagaaatag

SEQ ID NO: 286120 - DNA, 774 bp, Artificial Sequence
  derived and/or modified sequence
atgagcggcagccggcaggccggcagcggcagcgctggcaccagccctggcagcagcgctgccagctctgtgaccagcgccagcagcagcctgagcagcagccccagccccccatctgtggccgtgtctgctgctgccctggtgtctggaggagtggcccaggccgccggcagcggcggcctgggcggccctgtgcggcctgtgctggtggccccagctgtgtctggcagcggcggcggcgctgtgtccacaggcctgagccgccacagctgtgccgcccggcccagcgctggggtgggcggcagcagcagcagcctgggcagcggcagcaggaagaggcccctgctggcccccctgtgcaatggcctcatcaacagctatgaggacaagagcaatgactttgtgtgccccatctgctttgacatgattgaggaggcctacatgaccaagtgtggccacagcttctgctacaagtgcatccaccagagcctggaggacaacaaccgctgccccaagtgcaactacgtggtggacaacatcgaccacctgtaccccaacttcctggtgaatgagctgatcctgaagcagaagcagagatttgaggagaagcgcttcaagctggaccacagcgtgagcagcaccaacggccaccgctggcagatcttccaggactggctgggcacagaccaggacaacctggacctggccaacgtgaacctgatgctggagctgctggtgcagaagaacaagaagaagaagaagaagaagaagtag

SEQ ID NO: 286121 - DNA, 774 bp, Artificial Sequence
  derived and/or modified sequence
atgagcggcagccggcaggccggcagcggcagcgccggcaccagcccgggaagttcagcagccagctcagtgacctccgcgagttcatctttgtccagctcaccctccccgcctagcgtggcggtgagtgcggcggctctggtgtccgggggcgtggctcaggctgctggatcaggcggacttggtgggcctgtccgtccggttcttgtggcccctgctgttagtgggtccggcggcggtgccgtgtcaaccggcctcagcaggcactcctgcgccgccaggcctagtgcaggggtaggaggcagttccagcagtctcggaagcggatcaagaaagagacccctattggccccactgtgcaacggtctcataaattcttacgaggacaaatcaaacgactttgtgtgtcccatttgttttgatatgattgaagaggcttacatgacaaagtgcggtcacagcttctgctacaaatgcatccaccagagtctggaagataacaatcggtgtcctaaatgtaactatgtagtggataatatcgatcacctgtatcccaactttcttgtcaatgagctgatcctgaagcagaagcagagattcgaggagaaacggtttaagttggaccacagcgtttcttctactaacggtcaccggtggcagatctttcaggactggctcggaaccgatcaggataaccttgacttggccaacgttaatctcatgctcgagctgctggtccagaaaaacaagaaaaagaagaaaaaaaagaagtag

SEQ ID NO: 286122 - DNA, 774 bp, Artificial Sequence
  derived and/or modified sequence
atgtcaggttctcggcaagccggatctggatccgcaggcacatctcccggtagcagtgcagctagttccgtcacatccgccagcagcagtctgtccagcagcccctccccgccatccgtggccgtttctgcggctgcccttgtgagtgggggagtggcccaagctgcaggcagtggaggcctcgggggacctgtccgtcccgtcttggtggcacccgctgtcagtggatcaggaggaggggctgtctcaaccggcctgagtcggcactcctgtgcagctcggccaagcgcgggtgtgggcggaagctcatcctcactcggctccggcagtcgcaagcggccactcctggcacccctgtgtaacggcctgattaattcttacgaagacaagagtaacgactttgtgtgtcctatatgtttcgatatgattgaagaggcatatatgacaaaatgcggtcactccttttgttataaatgcatccaccaaagccttgaggataataatcggtgccctaagtgtaactatgtcgtcgataacatcgatcatctttaccctaactttctcgttaacgagctaatcttaaagcagaagcagcgcttcgaagaaaagcggtttaagctggatcattccgtatcttccactaatggtcatcgctggcagatatttcaagactggcttgggactgatcaggacaacttagatctggctaacgtgaatttaatgctcgagctgcttgtccagaagaataagaaaaagaaaaagaaaaagaaatag

SEQ ID NO: 286123 - DNA, 1027 bp, Artificial Sequence
  derived and/or modified sequence
gggaccgcggtggcggcggcggcctcgacagcggtagtgccttctactccgcttttttagtttcctccgccccctcccgtgggacgctgttgtgtggctgccttaaaaaaaaacgcaactttattgttcctcagccccacctccggctcggcgggcgtcctcaggatgcactgaggctgaggggaggggaggcggcggagggtcgaggtcgcggtccctctcctccgagcgcccggctggaggggagggagtcacgatgtctggtagccgccaggccgggtcgggctccgctgggacaagccccgggtcctcggcggcctcctcggtgacttccgcctcctcgtctttatcctcttccccgtcgccgccttccgtggcggtttcggcggcagcgctggtgtccggcggggtggcccaggccgccggctcgggcggcctcgggggcccggtgcggcctgtgttggtggcgcccgccgtatcgggtagcggcggcggggcggtgtccacgggcctgtcccggcacagctgcgcggccaggcccagcgccggcgtaggaggcagcagctccagcctaggcagcggcagcaggaagcgacctctcctcgcccccctctgcaacgggctcatcaactcctacgaggacaaaagcaacgacttcgtatgccccatctgctttgatatgattgaagaagcatacatgacaaaatgtggccacagcttttgctacaagtgtattcatcagagtttggaggacaataatagatgtcccaagtgtaactatgttgtggacaatattgaccatctgtatcctaatttcttggtgaatgaactcattcttaaacagaagcaaagatttgaggaaaagaggttcaaattggaccactcagtgagtagcaccaatggccacaggtggcagatatttcaagattggttgggaactgaccaagataaccttgatttggccaatgtcaatcttatgttggagttactagtgcagaagaataaaaaaaaaaaaaaaaaaaaaaaa

SEQ ID NO: 286124 - DNA, 774 bp, Artificial Sequence
  derived and/or modified sequence
atgagcggcagcagacaggccggcagcggcagcgccggcaccagccccggcagcagcgccgccagcagcgtgaccagcgccagcagcagcctgagcagcagccccagcccccccagcgtggccgtgagcgccgccgccctggtgagcggcggcgtggcccaggccgccggcagcggcggcctgggcggccccgtgagacccgtgctggtggcccccgccgtgagcggcagcggcggcggcgccgtgagcaccggcctgagcagacacagctgcgccgccagacccagcgccggcgtgggcggcagcagcagcagcctgggcagcggcagcagaaagagacccctgctggcccccctgtgcaacggcctgatcaacagctacgaggacaagagcaacgacttcgtgtgccccatctgcttcgacatgatcgaggaggcctacatgaccaagtgcggccacagcttctgctacaagtgcatccaccagagcctggaggacaacaacagatgccccaagtgcaactacgtggtggacaacatcgaccacctgtaccccaacttcctggtgaacgagctgatcctgaagcagaagcagagattcgaggagaagagattcaagctggaccacagcgtgagcagcaccaacggccacagatggcagatcttccaggactggctgggcaccgaccaggacaacctggacctggccaacgtgaacctgatgctggagctgctggtgcagaagaacaagaagaagaagaagaagaagaagtag

SEQ ID NO: 286125 - DNA, 1458 bp, Artificial Sequence
  derived and/or modified sequence
atggacaacaacaagcactgcaagcaggacaactgcctgctgacccccaattcggggcaggaggacgctgacaacgatggtgtgggagaccaatgtgacgacgatgccgacggggacggtatcaaaaacgtagaggataactgccgactgttccccaataaggatcaacagaactctgataccgacagtttcggtgacgcctgcgacaactgtccaaacgtgcctaataacgaccaaaaggacaccgacggtaacggtgagggcgacgcctgtgataatgacgtggatggggacggcatccccaatggcctcgataattgcccaaaggtgccaaacccattgcagaccgaccgggacgaggatggtgtgggagatgcctgtgattcctgtcccgagatgtcaaaccctacacagaccgacgccgacagcgatctcgtaggggacgtgtgcgacactaacgaggacagcgatggcgatgggcatcaggatactaaagacaattgtccacagctgcccaacagtagtcagctggattcggataatgatggccttggtgacgagtgcgacggcgacgatgataatgatggtattccagactatgtccctcctggaccagacaactgccgtctagtccctaaccctaaccagaaagactctgacggaaatggggtgggcgacgtgtgcgaagacgactttgataatgatgccgtggttgatccactggacgtgtgtcctgaaagcgccgaagttacactgaccgatttcagggcctatcagacggttgtactcgacccggagggtgacgcccagatagacccgaattgggtggttctgaatcaggggatggaaatcgtgcaaacaatgaattcagaccctggactggcagtcggctataccgcattcaacggcgtggactttgagggcacgtttcatgttaatactgtaaccgacgatgactatgctggctttctcttcagttaccaagactctggacggttttacgttgttatgtggaaacaaacagaacagacctactggcaggcaactccctttcgggctgtggctcagccaggcctgcagttgaaggcggtaacaagcgtctctgggccaggagaacatctgcgcaatgccctgtggcacactgggcacaccccagatcaggtgcgtctcctgtggaccgatccaaggaacgtgggatggagagacaagacctcctatcggtggcagctattacaccgcccacaagtagggtatatccgtgtcaaattgtatgagggaccacagctggtagccgactctggggtgattattgatacttctatgcggggcggccgccttggagtgttttgtttctcgcaggagaatataatctggagcaatctccagtatagatgcaatgacacagtccctgaagactttgaaccctttagaagacagcttctccagggacgggtctag

SEQ ID NO: 286126 - DNA, 1458 bp, Artificial Sequence
  derived and/or modified sequence
atggataacaataagcactgtaagcaggacaactgcctgttgactccaaattcagggcaggaggacgccgataatgacggcgttggtgatcagtgcgacgatgacgcggatggcgatggcatcaagaacgtggaggataattgcagactctttccaaataaggaccagcagaatagcgatacagacagttttggggacgcctgtgataattgccctaacgtcccaaataatgatcagaaggataccgacggcaatggggagggagacgcctgtgataacgacgtggatggcgatggcatccccaatggacttgacaactgccccaaggtgcccaatccattacagacagacagggacgaagatggcgtgggagatgcatgtgatagttgtcccgagatgtcaaacccaacccaaaccgacgccgattcggacttggttggtgatgtctgcgataccaacgaggacagtgatggagatggtcaccaggatacaaaggacaattgtcctcaactgcctaactctagccagctcgactccgataacgacggacttggggatgaatgtgacggtgacgatgataatgacgggatcccagactacgtcccccctggaccggacaattgccgtttagttcctaaccccaatcagaaggattccgatgggaatggggtgggcgatgtttgcgaggatgacttcgataacgatgctgtggtggaccccctcgacgtctgtccagaaagcgccgaggtgacactgaccgatttcagggcttaccagacagtcgtgctagacccagaaggtgacgcgcagattgacccaaattgggtggtcctgaaccagggtatggagatcgtacaaacgatgaatagcgatccaggactcgctgtcggctacaccgcatttaacggcgttgatttcgagggcacctttcacgtcaacactgtcactgacgatgactacgctggttttctgttctcatatcaagactccggcagattctacgtggtgatgtggaagcaaaccgagcaaacttactggcaggctactccattccgtgccgtggcccagccagggcttcagctgaaggccgtcaccagcgtctctggcccaggtgagcatcttcgcaatgcgctgtggcacacgggccacacccccgatcaggtgagactcctgtggactgatccgaggaatgtgggatggcgcgacaaaacctcgtacagatggcaactcctgcaccgaccccaggttgggtatatccgggtaaagttgtacgaaggccctcaattggtggcagactccggtgtgatcatcgataccagcatgcgcggtggaaggctgggggtattttgtttctcccaggagaacatcatttggagcaacttacagtatcgttgtaacgacaccgtgccagaggacttcgagccctttcgccgacaactgctccagggccgagtgtag

SEQ ID NO: 286127 - DNA, 1458 bp, Artificial Sequence
  derived and/or modified sequence
atggacaataacaagcattgtaagcaagataattgtctgttaacccccaactcaggccaagaagacgccgataatgacggcgttggggaccagtgtgatgacgatgcagatggagacggaattaaaaatgtggaggacaattgcaggctgtttccaaataaggatcagcagaattccgacacagattcatttggcgatgcgtgcgataactgccctaacgtaccaaacaacgaccagaaggatacggatggcaatggtgaaggggatgcatgcgataatgacgtcgatggggacggcatccctaacggactcgacaattgcccaaaggttccaaacccactacagaccgatagagacgaagacggggtcggcgatgcctgcgatagttgccctgagatgagcaatcctacccaaacggatgctgactccgatcttgttggagatgtctgtgatactaacgaggactccgatggtgacggtcaccaggataccaaggataattgcccccagctgccaaattcttcccagctcgatagcgataatgatggactcggcgacgaatgtgacggcgacgacgacaacgacggcataccggactatgtcccccctggtccagataattgcaggcttgtcccaaaccctaaccagaaagattcagatggcaatggcgtcggcgacgtgtgcgaagatgattttgacaacgacgccgtggttgatcctttagacgtttgtccggagagtgccgaggttaccttaactgatttcagagcataccagaccgtggtgttggaccctgaaggcgacgcacagattgatcccaactgggtcgtgctgaaccagggcatggaaatcgtgcagacaatgaattcagatcccggcctggccgtgggctacacggcctttaatggagttgacttcgagggaacatttcacgtgaacacagtgaccgatgacgactacgccggtttcctgttctcctaccaggactcgggacgcttttatgtggtgatgtggaaacagacagaacagacttattggcaggcaacgcccttccgagctgtagctcaacccggactacagcttaaggctgtgacctccgtgtccggacccggggagcaccttcggaacgccttatggcacacaggacatacacccgaccaggtccgactcttgtggacagatcctaggaatgtagggtggcgggacaagacatcctaccgatggcagctgttgcacagaccgcaggtcggatacatccgagttaaactgtatgaagggccacagctcgtggcggatagcggtgtgatcatcgacactagcatgcgcggcgggaggctgggagtattctgctttagccaggaaaacatcatctggtctaacctccagtaccgttgcaacgatacagtgcctgaagacttcgaaccgttccgtcgccaacttttgcagggacgggtatag

SEQ ID NO: 286128 - DNA, 1458 bp, Artificial Sequence
  derived and/or modified sequence
atggacaacaataaacactgtaagcaggataattgtctgttaacgccgaatagcggccaggaggacgcagacaatgatggagtcggagatcaatgtgacgatgacgcagatggagacggaatcaagaatgtggaagataattgccggctctttcctaacaaggaccagcagaacagcgataccgatagtttcggcgatgcctgtgacaactgtcctaatgtgcccaacaatgaccaaaaagataccgacggcaacggtgaaggagatgcctgcgacaatgatgtggatggagatggaattcctaatggattggataactgtcccaaagttccaaacccactgcagaccgaccgagacgaggatggtgtaggggatgcttgtgactcctgtcccgagatgtcaaaccccacccagaccgacgccgattctgacttagtgggcgacgtatgtgatacgaacgaagatagcgatggagacggacaccaggacactaaagacaactgcccccagctgccaaactcctctcagcttgatagcgacaatgacggccttggagatgagtgtgatggcgacgatgacaatgatggaatccctgactacgtaccccccggccccgataactgccgcttggttccaaatcccaaccagaaagacagcgatggcaatggagtgggcgacgtatgtgaggacgactttgacaatgacgctgtggtggatccgctcgacgtttgtccggaaagcgccgaggtgacactaactgacttcagggcataccaaactgtggtgctcgacccagaaggcgacgcccagatcgatcccaactgggtggtcttgaaccagggcatggaaatagtgcagacaatgaacagtgatcctggcttagccgtcggttataccgctttcaatggagtggacttcgagggtacttttcacgttaacaccgtaacagacgacgattatgcaggttttctcttctcttatcaggactcagggagattttatgttgtgatgtggaagcagaccgaacagacatattggcaggcaaccccattcagagcagtagcccagcctggcctgcaactgaaggctgttacttccgtcagcggacccggcgagcatctgcggaatgctctctggcacacagggcacactcccgatcaggtacgactgctgtggactgatccacgcaacgtgggctggagggacaagacaagttatagatggcagctgctgcataggccacaggtgggttacatacgggtcaaactttatgagggacctcaactcgttgccgattccggagttataattgacacatctatgagaggtggaagattgggagtgttctgtttctcgcaggagaacatcatttggtctaatttgcaatatcggtgcaatgataccgttcccgaagatttcgagccattcagaaggcagctcttgcagggacgggtctag

SEQ ID NO: 286129 - DNA, 1878 bp, Artificial Sequence
  derived and/or modified sequence
aatggtggctgtgacccaaactccatctgcaccaacactgtgggctctttcaagtgtggtccctgccgcctgggtttcctgggcaaccagagccagggctgcctcccagcccggacctgccacagcccagcccacagcccctgccacatccatgctcactgtctctttgaacgcaatggtgcagtgtcctgccaggacaactgccttttgacacccaactctgggcaggaagatgctgataatgatggtgtgggggaccagtgtgatgatgatgctgatggggatgggatcaagaatgttgaggacaactgccggctgttccccaacaaagaccagcagaactcagatacagattcatttggtgatgcctgtgacaattgccccaacgttcccaacaatgaccagaaggacacagatggcaatggggaaggagatgcctgtgacaacgacgtggatggggatggcatccccaatggattggacaattgccctaaagtccccaacccactacagacagacagggatgaggacggggtgggagatgcttgcgacagctgccctgaaatgagcaatcctacccagacagatgcagacagcgacctggtgggggatgtctgtgatactaatgaagacagcgatggggatgggcatcaggacaccaaggacaactgcccacagctgccaaatagctcccagctggactctgataacgatggacttggagatgagtgtgatggggatgatgacaatgatggcatcccagattatgtgcctcctggtcccgataactgccgcctggtacccaatcccaatcagaaggactcagatggcaatggcgttggtgatgtgtgtgaggatgactttgacaatgatgctgtggtcgaccccctggatgtgtgtcctgaaagtgcagaggtaacgcttacggattttcgggcctatcagaccgtcgtcctggatcctgagggtgatgctcagattgacccaaactgggttgtgctcaaccagggcatggaaatcgttcagaccatgaacagtgaccctggcttggcagttggatacacggccttcaatggtgtggactttgaaggcaccttccatgtgaacacagtgactgatgatgactacgcaggctttctcttcagttatcaagacagtggccgcttctacgtagtcatgtggaagcagaccgagcagacctactggcaggctacacccttccgggcggttgcccagcccgggctgcagctcaaggcagtgacatcagtgtctggcccaggtgagcacctccgaaatgccctgtggcatactggccacacccctgatcaggtacgactgctgtggacagacccacgaaatgtgggctggcgggacaagacctcctatcgctggcagcttctgcaccggcctcaagttggctacattcgggtgaagctctatgagggaccccagcttgtggcggattctggggtgatcattgacacatccatgcgaggggggcgtcttggtgtattctgcttctcccaagaaaacataatttggtccaatctccagtatcgatgcaatgacacagtgcctgaggactttgagccattccggaggcagctgctccagggaagggtgtgaggaggaggccaccagattcagaattcagaattttagaccctttggccttggggtccatcctggagaccctgaggtctaagctacagcccctcagccaaccacagacccttctctggctcccaaaaggagttcagtcccagaggggtggtcaccccacccttcaggggatgagaagttttcaaggggtattactcaggcactaaccccaggaaagatgacagcacattgccataaagttttggttgttttcta

SEQ ID NO: 286130 - DNA, 2928 bp, Artificial Sequence
  derived and/or modified sequence
gggtagtgagccggctgagaggcatggagacgcaggaacttcggggggccctggctcttctcctcctttgctttttcacatctgccagtcaggatctgcaggtaattgacctgctgactgtgggcgagtctcggcagatggtagctgtggcagagaagatccggacagccttgctcactgctggggacatctacctcttatccaccttccgcctgccccccaagcagggtggtgtcctctttggcctctattctcgccaagacaacactcgatggctggaggcctctgttgtaggcaagatcaacaaaggtgactgtactggtgcgataccagcgggaggatggcaaagtccacgccgtgaacctacagcaagcgggcctggctgatgggcgcacacacacagttctcctgcgactccgaggtccctccagacccagccctgccctacatctctacgtggactgcaaactgggtgaccaacatgcaggccttccagcactggcccccattcctccagcggaggtcgatgggctggagattaggactggacagaaggcgtatttgaggatgcagtgaccaatgcactgcactccattctaggggagcagaccaaggcgctggtcacccaactcaccctcttcaaccagatcctggtggagctgcgggatgatatacgagaccaggtgaaggaaatgtccctgatccgaaacaccattatggagtgtcaggtgtgcggcttccatgagcagcgttcccactgcagccccaatccctgcttccgaggtgtggactgcatggaagtgtacgagtacccaggctaccgctgtgggccctgcccccctggcctgcagggcaacggcacccactgcagtgacatcaatgagtgtgctcacgctgacccctgtttcccgggctccagctgcatcaacaccatgcccggcttccactgtgaggcctgtcctcgagggtacaagggcacacaggtgtctggtgtgggcattgactatgcccgggccagcaaacagataaggccataccagtgtcctctgctgtatctgaggagacccaccataggtctggttccacccaaagtctgccccttcaggtctgcaatgacatcgatgaatgcaacgatggcaacaatggtggctgtgacccaaactccatctgcaccaacactgtgggctctttcaagtgtggtccctgccgcctgggtttcctgggcaaccagagccagggctgcctcccagcccggacctgccacagcccagcccacagcccctgccacatccatgctcactgtctctttgaacgcaatggtgcagtgtcctgccagtgtaacgtgggctgggctgggaatgggaacgtgtgtgggactgacacagacatcgatggctacccagaccaagcactgccctgcatggacaacaacaaacactgcaaacaggacaactgccttttgacacccaactctgggcaggaagatgctgataatgatggtgtgggggaccagtgtgatgatgatgctgatggggatgggatcaagaatgttgaggacaactgccggctgttccccaacaaagaccagcagaactcagatacagattcatttggtgatgcctgtgacaattgccccaacgttcccaacaatgaccagaaggacacagatggcaatggggaaggagatgcctgtgacaacgacgtggatggggatggcatccccaatggattggacaattgccctaaagtccccaacccactacagacagacagggatgaggacggggtgggagatgcttgcgacagctgccctgaaatgagcaatcctacccagacagatgcagacagcgacctggtgggggatgtctgtgatactaatgaagacagcgatggggatgggcatcaggacaccaaggacaactgcccacagctgccaaatagctcccagctggactctgataacgatggacttggagatgagtgtgatggggatgatgacaatgatggcatcccagattatgtgcctcctggtcccgataactgccgcctggtacccaatcccaatcagaaggactcagatggcaatggcgttggtgatgtgtgtgaggatgactttgacaatgatgctgtggtcgaccccctggatgtgtgtcctgaaagtgcagaggtaacgcttacggattttcgggcctatcagaccgtcgtcctggatcctgagggtgatgctcagattgacccaaactgggttgtgctcaaccagggcatggaaatcgttcagaccatgaacagtgaccctggcttggcagttggatacacggccttcaatggtgtggactttgaaggcaccttccatgtgaacacagtgactgatgatgactacgcaggctttctcttcagttatcaagacagtggccgcttctacgtagtcatgtggaagcagaccgagcagacctactggcaggctacacccttccgggcggttgcccagcccgggctgcagctcaaggcagtgacatcagtgtctggcccaggtgagcacctccgaaatgccctgtggcatactggccacacccctgatcaggtacgactgctgtggacagacccacgaaatgtgggctggcgggacaagacctcctatcgctggcagcttctgcaccggcctcaagttggctacattcgggtgaagctctatgagggaccccagcttgtggcggattctggggtgatcattgacacatccatgcgaggggggcgtcttggtgtattctgcttctcccaagaaaacataatttggtccaatctccagtatcgatgcaatgacacagtgcctgaggactttgagccattccggaggcagctgctccagggaagggtgtgaggaggaggccaccagattcagaattcagaattttagaccctttggccttg

SEQ ID NO: 286131 - DNA, 1458 bp, Artificial Sequence
  derived and/or modified sequence
atggacaacaacaagcactgcaagcaggacaactgcctgctgacccccaacagcggccaggaggacgccgacaacgacggcgtgggcgaccagtgcgacgacgacgccgacggcgacggcatcaagaacgtggaggacaactgcagactgttccccaacaaggaccagcagaacagcgacaccgacagcttcggcgacgcctgcgacaactgccccaacgtgcccaacaacgaccagaaggacaccgacggcaacggcgagggcgacgcctgcgacaacgacgtggacggcgacggcatccccaacggcctggacaactgccccaaggtgcccaaccccctgcagaccgacagagacgaggacggcgtgggcgacgcctgcgacagctgccccgagatgagcaaccccacccagaccgacgccgacagcgacctggtgggcgacgtgtgcgacaccaacgaggacagcgacggcgacggccaccaggacaccaaggacaactgcccccagctgcccaacagcagccagctggacagcgacaacgacggcctgggcgacgagtgcgacggcgacgacgacaacgacggcatccccgactacgtgccccccggccccgacaactgcagactggtgcccaaccccaaccagaaggacagcgacggcaacggcgtgggcgacgtgtgcgaggacgacttcgacaacgacgccgtggtggaccccctggacgtgtgccccgagagcgccgaggtgaccctgaccgacttcagagcctaccagaccgtggtgctggaccccgagggcgacgcccagatcgaccccaactgggtggtgctgaaccagggcatggagatcgtgcagaccatgaacagcgaccccggcctggccgtgggctacaccgccttcaacggcgtggacttcgagggcaccttccacgtgaacaccgtgaccgacgacgactacgccggcttcctgttcagctaccaggacagcggcagattctacgtggtgatgtggaagcagaccgagcagacctactggcaggccacccccttcagagccgtggcccagcccggcctgcagctgaaggccgtgaccagcgtgagcggccccggcgagcacctgagaaacgccctgtggcacaccggccacacccccgaccaggtgagactgctgtggaccgaccccagaaacgtgggctggagagacaagaccagctacagatggcagctgctgcacagaccccaggtgggctacatcagagtgaagctgtacgagggcccccagctggtggccgacagcggcgtgatcatcgacaccagcatgagaggcggcagactgggcgtgttctgcttcagccaggagaacatcatctggagcaacctgcagtacagatgcaacgacaccgtgcccgaggacttcgagcccttcagaagacagctgctgcagggcagagtgtag

SEQ ID NO: 286132 - DNA, 1458 bp, Artificial Sequence
  derived and/or modified sequence
atggataacaataagcactgcaaacaggacaactgtctgttaacaccaaattccggacaggaagatgccgacaacgacggggtcggcgaccagtgtgatgatgatgccgacggcgacgggatcaaaaacgtggaagataattgccggttgttccctaataaggaccagcagaatagtgataccgatagcttcggtgacgcctgcgacaattgcccaaacgttcccaacaacgatcagaaagataccgatggaaacggcgagggcgacgcgtgcgacaacgatgtagacggagatgggattcccaatggtctcgataattgtccgaaagtacccaatccactccagacagaccgagatgaggatggggttggtgatgcctgcgacagctgtcccgagatgagtaaccctacacaaactgatgccgactcagatctggtcggagacgtgtgcgacacaaatgaggactccgacggggatgggcatcaagacaccaaggacaattgtccccagctccccaattcatcccagcttgactcagacaacgatggactcggagatgaatgcgatggtgacgacgataatgacggaatccccgactacgttccacccggccctgataattgccgcctggtgccaaatcctaaccagaaagactccgacggaaacggcgtaggtgacgtatgtgaagacgactttgataacgatgctgtggtggacccgcttgacgtgtgtccagaatccgctgaagtgaccctgacagatttcagggcctatcagacagttgtgcttgatcccgaaggggatgctcagatcgacccgaactgggttgtcctgaatcagggaatggagatagttcagactatgaattctgacccaggactcgccgttggctatactgccttcaatggggtcgattttgaaggcactttccatgtgaacaccgtaaccgacgacgactatgcaggttttctattctcataccaagactccgggcggttctatgttgtgatgtggaagcagaccgaacagacctattggcaggccaccccgtttcgcgctgttgcacagccagggctccagctgaaggcagtgacttcagtgagcggtccaggcgaacaccttcggaacgctctttggcacactgggcataccccagatcaagtaagactactgtggaccgatccacgcaacgtgggatggcgcgataagacgtcttaccgatggcagctactgcaccgtcctcaagtaggatacattcgtgtcaaactgtacgaaggtccccagctcgtcgccgattccggagtcatcatagatacatcaatgaggggaggccggttgggagttttctgtttctcacaagaaaatatcatctggtccaacctccagtaccggtgtaacgacactgtccctgaggatttcgaaccatttcgacggcagctgttacaggggcgggtctag

SEQ ID NO: 286133 - DNA, 1458 bp, Artificial Sequence
  derived and/or modified sequence
atggacaacaacaagcactgcaagcaggacaactgcctgctgacccccaacagcggccaggaggatgctgacaatgatggagtgggggaccagtgtgatgatgatgctgatggagatggcatcaagaatgtggaggacaactgccgcctcttccccaacaaggaccagcagaacagcgacacagacagctttggagatgcctgtgacaactgccccaacgtgcccaacaatgaccagaaggacacagatggaaatggagaaggagatgcctgtgacaatgatgtggatggagatggcatccccaacggcctggacaactgccccaaggtgcccaaccccctgcagacagacagagatgaagatggagtgggagatgcctgtgacagctgcccagagatgagcaaccccacccagacagatgctgacagcgacctggtgggagatgtgtgtgacaccaatgaagattctgatggagatggccaccaggacaccaaggacaactgcccccagctgcccaacagcagccagctggacagcgacaatgatggcctgggagatgaatgtgatggagatgatgacaatgatggcatcccagactatgtgcccccaggccctgacaactgccgcctggtgcccaaccccaaccagaaggacagtgatggaaatggagtgggagatgtgtgtgaagatgactttgacaatgatgctgtggtggaccccctggatgtgtgcccagagagcgctgaggtgaccctgacagacttccgggcctaccagacagtggtgctggaccctgaaggagatgcccagattgaccccaactgggtggtgctgaaccagggcatggagatcgtgcagaccatgaacagcgaccccggcctggccgtgggctacacagccttcaacggggtggactttgagggcaccttccacgtgaacacagtgacagatgatgattatgccggcttcctgttctcctaccaggacagcggccgcttctacgtggtgatgtggaagcagacagagcagacctactggcaggccacccccttccgggctgtggcccagcccggcctgcagctgaaggctgtgacctctgtgtctggccctggagagcacctgagaaatgccctgtggcacacaggccacaccccagaccaggtgcggctgctgtggacagaccccagaaatgtgggctggagggacaagaccagctaccgctggcagctgctgcaccggccccaggtgggctacatccgggtgaagctgtatgagggcccccagctggtggccgacagcggggtcatcatcgacacctccatgagaggaggccgcctgggcgtcttctgcttcagccaggagaacatcatctggagcaacctgcagtaccgctgcaatgacacagtgcctgaagattttgagcccttccggcggcagctgctgcagggccgggtgtag

SEQ ID NO: 286134 - RNA, 1458 nt, Artificial Sequence
  derived and/or modified sequence
auggacaauaacaagcauuguaagcaagauaauugucuguuaacccccaacucaggccaagaagacgccgauaaugacggcguuggggaccagugugaugacgaugcagauggagacggaauuaaaaauguggaggacaauugcaggcuguuuccaaauaaggaucagcagaauuccgacacagauucauuuggcgaugcgugcgauaacugcccuaacguaccaaacaacgaccagaaggauacggauggcaauggugaaggggaugcaugcgauaaugacgucgauggggacggcaucccuaacggacucgacaauugcccaaagguuccaaacccacuacagaccgauagagacgaagacggggucggcgaugccugcgauaguugcccugagaugagcaauccuacccaaacggaugcugacuccgaucuuguuggagaugucugugauacuaacgaggacuccgauggugacggucaccaggauaccaaggauaauugcccccagcugccaaauucuucccagcucgauagcgauaaugauggacucggcgacgaaugugacggcgacgacgacaacgacggcauaccggacuauguccccccugguccagauaauugcaggcuugucccaaacccuaaccagaaagauucagauggcaauggcgucggcgacgugugcgaagaugauuuugacaacgacgccgugguugauccuuuagacguuuguccggagagugccgagguuaccuuaacugauuucagagcauaccagaccgugguguuggacccugaaggcgacgcacagauugaucccaacugggucgugcugaaccagggcauggaaaucgugcagacaaugaauucagaucccggccuggccgugggcuacacggccuuuaauggaguugacuucgagggaacauuucacgugaacacagugaccgaugacgacuacgccgguuuccuguucuccuaccaggacucgggacgcuuuuauguggugauguggaaacagacagaacagacuuauuggcaggcaacgcccuuccgagcuguagcucaacccggacuacagcuuaaggcugugaccuccguguccggacccggggagcaccuucggaacgccuuauggcacacaggacauacacccgaccagguccgacucuuguggacagauccuaggaauguaggguggcgggacaagacauccuaccgauggcagcuguugcacagaccgcaggucggauacauccgaguuaaacuguaugaagggccacagcucguggcggauagcggugugaucaucgacacuagcaugcgcggcgggaggcugggaguauucugcuuuagccaggaaaacaucaucuggucuaaccuccaguaccguugcaacgauacagugccugaagacuucgaaccguuccgucgccaacuuuugcagggacggguauag

SEQ ID NO: 286135 - RNA, 1458 nt, Artificial Sequence
  derived and/or modified sequence
auggacaacaauaaacacuguaagcaggauaauugucuguuaacgccgaauagcggccaggaggacgcagacaaugauggagucggagaucaaugugacgaugacgcagauggagacggaaucaagaauguggaagauaauugccggcucuuuccuaacaaggaccagcagaacagcgauaccgauaguuucggcgaugccugugacaacuguccuaaugugcccaacaaugaccaaaaagauaccgacggcaacggugaaggagaugccugcgacaaugauguggauggagauggaauuccuaauggauuggauaacugucccaaaguuccaaacccacugcagaccgaccgagacgaggaugguguaggggaugcuugugacuccugucccgagaugucaaaccccacccagaccgacgccgauucugacuuagugggcgacguaugugauacgaacgaagauagcgauggagacggacaccaggacacuaaagacaacugcccccagcugccaaacuccucucagcuugauagcgacaaugacggccuuggagaugagugugauggcgacgaugacaaugauggaaucccugacuacguaccccccggccccgauaacugccgcuugguuccaaaucccaaccagaaagacagcgauggcaauggagugggcgacguaugugaggacgacuuugacaaugacgcugugguggauccgcucgacguuuguccggaaagcgccgaggugacacuaacugacuucagggcauaccaaacuguggugcucgacccagaaggcgacgcccagaucgaucccaacuggguggucuugaaccagggcauggaaauagugcagacaaugaacagugauccuggcuuagccgucgguuauaccgcuuucaauggaguggacuucgaggguacuuuucacguuaacaccguaacagacgacgauuaugcagguuuucucuucucuuaucaggacucagggagauuuuauguugugauguggaagcagaccgaacagacauauuggcaggcaaccccauucagagcaguagcccagccuggccugcaacugaaggcuguuacuuccgucagcggacccggcgagcaucugcggaaugcucucuggcacacagggcacacucccgaucagguacgacugcuguggacugauccacgcaacgugggcuggagggacaagacaaguuauagauggcagcugcugcauaggccacagguggguuacauacgggucaaacuuuaugagggaccucaacucguugccgauuccggaguuauaauugacacaucuaugagagguggaagauugggaguguucuguuucucgcaggagaacaucauuuggucuaauuugcaauaucggugcaaugauaccguucccgaagauuucgagccauucagaaggcagcucuugcagggacgggucuag

SEQ ID NO: 286136 - protein, 858 aa, Artificial Sequence [sequence omitted]

SEQ ID NO: 286137 - protein, 21 aa, Artificial Sequence
  derived and/or modified sequence
MGDHLDLLLGVVLMAGPVFGI

SEQ ID NO: 286138 - DNA, 2577 bp, Artificial Sequence
  derived and/or modified sequence
atgggcgaccacctggacctgctgctgggcgtggtgctgatggccggccccgtgttcggcatccccagctgcagcttcgacggcagaatcgccttctacagattctgcaacctgacccaggtgccccaggtgctgaacaccaccgagagactgctgctgagcttcaactacatcagaaccgtgaccgccagcagcttccccttcctggagcagctgcagctgctggagctgggcagccagtacacccccctgaccatcgacaaggaggccttcagaaacctgcccaacctgagaatcctggacctgggcagcagcaagatctacttcctgcaccccgacgccttccagggcctgttccacctgttcgagctgagactgtacttctgcggcctgagcgacgccgtgctgaaggacggctacttcagaaacctgaaggccctgaccagactggacctgagcaagaaccagatcagaagcctgtacctgcaccccagcttcggcaagctgaacagcctgaagagcatcgacttcagcagcaaccagatcttcctggtgtgcgagcacgagctggagcccctgcagggcaagaccctgagcttcttcagcctggccgccaacagcctgtacagcagagtgagcgtggactggggcaagtgcatgaaccccttcagaaacatggtgctggagatcctggacgtgagcggcaacggctggaccgtggacatcaccggcaacttcagcaacgccatcagcaagagccaggccttcagcctgatcctggcccaccacatcatgggcgccggcttcggcttccacaacatcaaggaccccgaccagaacaccttcgccggcctggccagaagcagcgtgagacacctggacctgagccacggcttcgtgttcagcctgaacagcagagtgttcgagaccctgaaggacctgaaggtgctgaacctggcctacaacaagatcaacaagatcgccgacgaggccttctacggcctggacaacctgcaggtgctgaacctgagctacaacctgctgggcgagctgtacagcagcaacttctacggcctgcccaaggtggcctacatcgacctgcagaagaaccacatcgccatcatccaggaccagaccttcaagttcctggagaagctgcagaccctggacctgagagacaacgccctgaccaccatccacttcatccccagcatccccgacatcttcctgagcggcaacaagctggtgaccctgcccaagatcaacctgaccgccaacctgatccacctgagcgagaacagactggagaacctggacatcctgtacttcctgctgagagtgccccacctgcagatcctgatcctgaaccagaacagattcagcagctgcagcggcgaccagacccccagcgagaaccccagcctggagcagctgttcctgggcgagaacatgctgcagctggcctgggagaccgagctgtgctgggacgtgttcgagggcctgagccacctgcaggtgctgtacctgaaccacaactacctgaacagcctgccccccggcgtgttcagccacctgaccgccctgagaggcctgagcctgaacagcaacagactgaccgtgctgagccacaacgacctgcccgccaacctggagatcctggacatcagcagaaaccagctgctggcccccaaccccgacgtgttcgtgagcctgagcgtgctggacatcacccacaacaagttcatctgcgagtgcgagctgagcaccttcatcaactggctgaaccacaccaacgtgaccatcgccggcccccccgccgacatctactgcgtgtaccccgacagcttcagcggcgtgagcctgttcagcctgagcaccgagggctgcgacgaggaggaggtgctgaagagcctgaagttcagcctgttcatcgtgtgcaccgtgaccctgaccctgttcctgatgaccatcctgaccgtgaccaagttcagaggcttctgcttcatctgctacaagaccgcccagagactggtgttcaaggaccacccccagggcaccgagcccgacatgtacaagtacgacgcctacctgtgcttcagcagcaaggacttcacctgggtgcagaacgccctgctgaagcacctggacacccagtacagcgaccagaacagattcaacctgtgcttcgaggagagagacttcgtgcccggcgagaacagaatcgccaacatccaggacgccatctggaacagcagaaagatcgtgtgcctggtgagcagacacttcctgagagacggctggtgcctggaggccttcagctacgcccagggcagatgcctgagcgacctgaacagcgccctgatcatggtggtggtgggcagcctgagccagtaccagctgatgaagcaccagagcatcagaggcttcgtgcagaagcagcagtacctgagatggcccgaggacttccaggacgtgggctggttcctgcacaagctgagccagcagatcctgaagaaggagaaggagaagaagaaggacaacaacatccccctgcagaccgtggccaccatcagctag

SEQ ID NO: 286139 - DNA, 2577 bp, Artificial Sequence
  derived and/or modified sequence
atgggcgaccaccttgacttacttcttggcgtcgtattgatggccggacccgtattcggaattccttcctgctctttcgatgggagaatcgcattttaccggttctgcaacctgacacaagtgcctcaggtactgaatacaaccgaacggttgctgttgtcctttaattacatccgcactgtcactgcctccagttttccgtttttggaacagctgcagctgctggagctcggctcccagtacacccctctgactatcgataaagaggcgtttcggaatctgcccaacttgcgaattcttgatctgggcagctccaagatctattttttacatcccgatgcgtttcaagggctttttcatctcttcgaactgcgactctacttttgcgggctgagtgatgcggttctgaaggacggttattttcgcaacctgaaggcactgactcgactggatctgtctaaaaaccaaattcggtctctatacctgcacccctcattcgggaaactgaacagcctgaaatctattgacttttccagcaatcaaattttcctggtgtgcgagcatgaactcgagccactccagggaaagacattgtctttcttcagtctggccgccaactcactctactccagggtaagtgtcgattggggaaagtgtatgaatccgtttcgcaatatggtgctggaaattttagacgtctccgggaatgggtggactgtcgatataaccggaaactttagtaatgccattagcaagtctcaagcgttcagtctgatccttgcgcaccacattatgggcgctgggtttggttttcataacattaaggatccagaccagaacacttttgctggtcttgctaggagctctgtaaggcacctcgacctttcacacgggtttgtcttcagcttgaatagtcgcgtctttgaaaccctgaaggacttaaaggtgctaaacctggcttataataaaataaacaagatcgcagatgaagctttctatggtcttgacaatcttcaggttttaaacctgagctataacctgctgggcgagctgtactcctccaatttctatgggctgcctaaggtggcctatatagatctgcagaagaatcacatcgcaataatccaggaccagacatttaaattcctggaaaagcttcaaacactggacctcagagataacgctctgaccactattcacttcatccctagtattcccgatatcttcctgtctggtaacaagcttgtgaccttgcctaagattaacctgactgccaacctgatacacctgtctgaaaatcgactggaaaatctggatatcctctatttcctgctgcgcgtcccccatctgcagatcttgattttgaaccaaaatagatttagttcctgctcaggggaccagaccccctccgagaatccatcccttgaacaactgtttctcggtgaaaacatgctgcaactggcatgggaaaccgagctttgttgggatgtttttgagggactgagccatcttcaggttttgtacctaaatcataattatctcaattcacttccccccggggtgttctcacacctaaccgcgctgaggggactgagtctgaacagtaaccggctgacagtattgtcgcacaacgatctcccagccaacttagaaatactagacatttcgaggaaccagctgctcgcgccaaaccccgacgtattcgtgtccctttctgtgcttgacatcactcacaacaaatttatctgcgaatgcgagcttagtacatttatcaactggctgaatcatactaacgtgacaatcgccgggccgcccgctgatatctactgtgtgtaccccgacagctttagtggcgtctctctgttctcgctatctaccgaaggatgcgacgaggaggaggtgctcaaatcccttaagttctccttatttatcgtctgcacagtcacactgaccctgtttttgatgaccatcctaacagtcaccaaattccggggattctgttttatttgttataaaacagctcagcgtctcgtttttaaagatcacccacaggggactgagcccgacatgtataagtatgatgcttacctctgcttttcgtcaaaggattttacctgggtccagaatgctctgctgaaacaccttgatactcaatatagcgaccaaaaccggttcaacctgtgctttgaggagagggacttcgtgcctggtgagaaccgcattgcaaacatacaggatgccatttggaacagcaggaagattgtgtgtttggtttccagacattttctcagggacggttggtgtctggaagcatttagctatgctcagggcagatgcctgagcgacctgaactctgccctaattatggtagtagtggggagtctgtcgcagtatcagttgatgaagcatcagtctattagaggatttgtccaaaagcagcaatacttacgctggccagaggactttcaggacgtgggatggttcctgcataagttgagccagcagatcttaaagaaagaaaaagaaaaaaaaaaagataacaatattcccttgcagacagtggctacgatcagttag

SEQ ID NO: 286140 - DNA, 2577 bp, Artificial Sequence
  derived and/or modified sequence
atgggcgatcatctcgatctgctgttaggcgttgtcctgatggccggaccagttttcgggattccatcttgctcttttgatgggagaattgcattctatcgcttctgtaacctcactcaggtcccgcaggtgttaaacacaacagagcgcctactgctgtcctttaattacattagaacagttaccgcctcatcattccccttcttggagcaactgcagctgctagagttaggctctcagtacactcctctgacaatcgataaggaggccttcaggaacctccccaatttgaggatcctcgatcttggatcatcgaagatttatttccttcatcccgatgccttccaggggctatttcatctgtttgaactgcgactctatttctgcggcctgtctgacgccgtgctcaaggacggttacttcaggaacttgaaggctctgacccggctggatttgagcaagaaccaaatcagaagtctgtacctgcaccccagtttcggaaagctgaattccctcaagagcatcgacttcagctccaatcagattttcttagtttgtgagcacgagttggagccacttcagggaaagaccctgtccttttttagcctggcagcaaatagcctgtattctagagtgtccgttgactgggggaaatgtatgaatccatttaggaatatggttctggagattctcgatgtgtcgggaaatggttggacagtagatataactggaaatttttcaaatgccatctccaaatcccaggctttcagtctgatactcgcacatcatataatgggcgccggatttgggtttcataatattaaagaccccgaccaaaacacttttgccggactggctcgctcatccgtccggcatctggacctgagtcacggcttcgtttttagcctcaatagcagagtgttcgagacactcaaggacctgaaggtgctgaacctcgcctacaataaaataaacaagatcgccgatgaggcgttctatggcctggataaccttcaggtcctcaatcttagctataacctcttgggcgaactttactccagtaacttctacggcctgcctaaggttgcatatatcgatctgcagaagaaccacatcgccatcatacaggaccagacctttaagtttcttgagaagctgcagacactggacttgagagataatgcgctcactacaattcattttatcccatctatccccgacattttcctgtcaggtaacaaactggtgactctgcccaagatcaatctcactgcgaacctgattcacctttccgagaataggttagaaaatctcgatatcctgtatttcctcctcagggtcccacacctccagattctgattttgaaccagaaccggtttagtagctgctcaggcgaccagaccccatcagagaatccatctctcgaacaactgtttctcggggaaaatatgctgcagctggcctgggaaactgagctgtgctgggacgtgttcgaggggttgtcacatctgcaggtgctctatctgaatcataattatctgaatagcctgcctccaggcgtcttttcccatctgacagctctcagaggcttgtctctcaatagcaatagacttactgtactgtcccacaacgacctgccagccaatcttgaaattctggatatctcccggaaccagctgctggcgcccaaccctgatgtgtttgtgagcttatcagtcctggacatcacccacaacaaatttatatgcgaatgtgagttaagcacttttatcaattggctgaatcacactaatgtcactatagctggaccacctgctgacatatactgcgtgtatccagacagcttctctggagtgtccctcttttctctgagtaccgaaggctgcgatgaagaagaggtactgaagagcctcaagttttctctgttcatcgtatgcacagttaccctgacactttttctgatgaccatcctgacagtcacaaaatttcgggggttttgcttcatctgttataaaacggcgcagagactggtgtttaaggaccacccccaggggaccgagccagacatgtataaatacgatgcttacttgtgtttctcctccaaggacttcacatgggtccagaatgccctgttgaaacacctcgacacccagtactccgatcagaacaggttcaatttgtgttttgaggaaagggatttcgtacccggcgaaaaccgaatcgccaacattcaggatgcaatttggaactctaggaaaatagtgtgtctggtgagccggcacttccttcgagatgggtggtgtctggaggcattttcatacgcacaagggcgatgcctctctgacctcaattccgctctaatcatggtcgtggtaggttccctttcacagtaccagttgatgaaacaccagagtattcgcggcttcgtccagaaacaacagtatttgcgttggcccgaggacttccaggatgtcgggtggtttctccacaagttaagccaacagatcttgaagaaggagaaagaaaagaaaaaggacaacaacatccccctgcagactgttgctaccatctcgtag

SEQ ID NO: 286141 - DNA, 2577 bp, Artificial Sequence
  derived and/or modified sequence
atgggcgaccacttggacctccttctgggagttgtactgatggctggccctgtatttggcataccaagctgttctttcgatgggcggatcgccttttatcgcttttgcaacctgacacaggtgccacaagtactcaatacaactgagaggctgctgctctcctttaattacattcgtacagtaacagccagttcgttccctttcttagagcagctgcagctgctggagctggggagccagtacacacccctgacgatagataaagaggctttcagaaatctgcccaacctacggatcttagaccttggaagcagtaaaatatacttcttgcatcccgacgcctttcaaggcttgttccacctgttcgagctgaggctctatttctgcggactgagtgatgctgtattgaaggacggatacttccgcaacctgaaagctttaacccggctcgatctgagcaaaaatcagatccggtccttgtacctacacccaagttttggaaaactgaattccctgaagtcgatagatttcagttcaaaccagattttcctcgtttgtgagcacgagctcgagcctctccaaggaaaaaccctgtctttttttagccttgcggctaactccctctatagccgggtgagcgtggactgggggaagtgtatgaaccccttcagaaacatggtgctagaaatcctcgatgtctccggaaacgggtggacagtggatatcacgggaaacttttctaatgccatttctaaatctcaggcatttagcctgattctagcacaccatatcatgggcgctggcttcggctttcacaatatcaaggaccccgaccagaatacttttgccgggttagctcggagctccgtgcggcacttggacttatcacacggatttgttttttctctaaacagcagggtttttgagaccctgaaggatcttaaagtgctgaatctggcctacaacaaaattaataagatagcagacgaggcattctatggccttgataatctgcaagttttaaacttgtcttacaatttgctgggggaactgtacagttctaatttctatggcctacctaaggttgcatacattgacctacagaagaatcacattgccataattcaagatcaaacatttaaattcctggagaaactgcagaccctggacctgcgcgacaatgccctgacgacgatccacttcatccctagcatacccgatattttcttatccggaaacaaattggttactctgccaaaaatcaaccttacagccaacctgatccacctgtctgagaacagactggagaacctggacatactttacttcctgctaagagtaccacatcttcagatcctgattctgaaccagaaccgattctcgtcctgctccggcgatcagaccccaagcgaaaacccctctctggagcagctctttctcggagagaacatgttgcaactcgcatgggagaccgaactgtgttgggatgtgtttgagggtctttctcatctgcaagtcttgtacctgaatcacaactatctgaattctttacctcctggcgtattctcgcatctgacagcactcagaggcctcagcctgaattctaacaggctgactgtgctcagtcacaacgatctcccggcaaacttagagatactggacatcagccggaaccagctgctcgcacccaatccagacgtgtttgtgagcctatcagttctggatatcactcataataagttcatttgcgagtgcgagctgagcaccttcattaattggctaaaccacactaatgtcacgatcgccgggccaccagcagatatatattgcgtgtatccggacagctttagcggtgtgagcctgttctctctgagtacagaggggtgtgatgaggaggaagtcttgaagagtctgaagttttccctctttatcgtttgcaccgttaccctgaccctctttttgatgactatcctgaccgttaccaagttcagagggttctgtttcatttgttataagacagcgcaacggctcgtgtttaaggaccatcctcagggaacagaacccgatatgtataagtatgatgcatatctttgcttttcttctaaggactttacctgggtccaaaatgcactccttaagcatcttgacactcagtacagtgaccaaaaccgcttcaacttatgtttcgaagagagagattttgtgcctggcgaaaatcgcattgcaaatatacaggacgctatttggaattcccgcaaaatagtatgtctagtatctcgacatttcttgcgagacggctggtgtctggaggcctttagctatgcccagggacggtgcctgtcagacctgaacagcgcgttgattatggtcgttgtggggtctctctcacaataccagctgatgaaacaccaaagtattcgaggattcgtccagaaacagcagtatctcagatggcctgaagacttccaggatgttggttggttcttacacaagctttctcagcaaatcttgaagaaggaaaaagagaaaaaaaaagataataacatccccttgcagaccgtcgccacaatctcctag

SEQ ID NO: 286142 - DNA, 2577 bp, Artificial Sequence
  derived and/or modified sequence
atgggagaccacctggacctgctgctgggcgtggtgctgatggccggccctgtgtttggcatccccagctgcagctttgatggccgcatcgccttctaccgcttctgcaacctgacccaggtgccccaggtgctgaacaccacagagcggctgctgctgtccttcaactacatcagaacagtgacagccagcagcttccccttcctggagcagctgcagctgctggagctgggcagccagtacacccccctgaccatcgacaaggaggccttcaggaacctgcccaacctgcgcatcctggacctgggcagcagcaagatctacttcctgcacccagatgccttccagggcctcttccacctgtttgagctgcggctgtacttctgtggcctgagtgatgctgtgctgaaggatggctacttcaggaacctgaaggccctgacccggctggacctgagcaagaaccagatccgcagcctgtacctgcaccccagctttgggaagctgaacagcctgaagagcattgacttcagcagcaaccagatcttcctggtgtgtgagcacgagctggagcccctgcagggcaagaccctgtccttcttcagcctggccgccaacagcctgtacagccgggtgtctgtggactggggcaagtgcatgaaccccttcaggaacatggtgctggagatcctggatgtgtctggaaatggctggacagtggacatcactggaaacttcagcaatgccatcagcaagagccaggccttcagcctcatcctggcccaccacatcatgggcgccggcttcggcttccacaacatcaaggaccctgaccagaacacctttgctggcctggcccggagctctgtgcgccacctggacctgagccacggctttgtgttcagcctgaacagccgggtgtttgagaccctgaaggacctgaaggtgctgaacctggcctacaacaagatcaacaagattgctgatgaggccttctacggcctggacaacctgcaggtgctgaacctgagctacaacctgctgggggagctgtacagcagcaacttctacggcctgcccaaggtggcctacatcgacctgcagaagaaccacatcgccatcatccaggaccagaccttcaagttcctggagaagctgcagaccctggacctgcgggacaatgccctgaccaccatccacttcatccccagcatcccagacatcttcctgagcggcaacaagctggtgaccctgcccaagatcaacctgacagccaacctgatccacctgtctgagaaccggctggagaacctggacatcctgtacttcctgctgcgggtgccccacctgcagatcctgatcctgaaccagaaccgcttcagcagctgcagcggggaccagacccccagcgagaaccccagcctggagcagctgttcctgggggagaacatgctgcagctggcctgggagacagagctgtgctgggatgtgtttgagggcctgagccacctgcaggtgctgtacctgaaccacaactacctgaacagcctgcccccaggagtcttcagccacctgacagccctgcggggcctgagcctgaacagcaaccggctgactgtgctgagccacaatgacctgcctgccaacctggagatcctggacatcagcaggaaccagctgctggcccccaacccagatgtgtttgtgtccctgtctgtgctggacatcacccacaacaagttcatctgtgaatgtgagctgagcaccttcatcaactggctgaaccacaccaacgtgaccatcgccggccccccagctgacatctactgtgtgtacccagacagcttctctggagtgtccctcttcagcctgagcacagagggctgtgatgaggaggaggtgctgaagagcctgaagttcagcctcttcatcgtgtgcaccgtgaccctgaccctcttcctgatgaccatcctgactgtgaccaagttccggggcttctgcttcatctgctacaagacagcccagaggctggtgttcaaggaccacccccagggcacagagccagacatgtacaagtatgatgcctacctgtgcttcagcagcaaggacttcacctgggtgcagaatgccctgctgaagcacctggacacccagtacagcgaccagaaccgcttcaacctgtgctttgaggagcgggactttgtgcctggagagaacagaattgccaacatccaggatgccatctggaacagcaggaagatcgtgtgcctggtgagccgccacttcctgagagatggctggtgcctggaggccttctcctatgcccagggccgctgcctgagtgacctgaacagcgccctgatcatggtggtggtgggcagcctgagccagtaccagctgatgaagcaccagagcatccggggctttgtgcagaagcagcagtacctgcgctggccagaggacttccaggatgtgggctggttcctgcacaagctgagccagcagatcctgaagaaggagaaggagaagaagaaggacaacaacatccccctgcagacagtggccaccatctcctag

SEQ ID NO: 286143 - DNA, 2577 bp, Artificial Sequence
  derived and/or modified sequence
atgggcgaccacctggacctgctgctgggcgtggtgctgatggccggccccgtgttcggcattccttcgtgtagcttcgacggcaggattgcgttctacagattctgcaacctcactcaagtaccgcaggtcctgaatacaacggaacggctgctgttgtcttttaactacatccggacggtgacagcaagtagttttcctttcttggaacagctccagctgctagagcttggcagccaatacacaccactaacaatcgacaaagaagcttttcgcaatctgcctaacctgagaatcctcgatctgggctccagcaaaatttattttcttcatcctgacgccttccaggggttattccacctgtttgagctacgactgtatttctgtggactgtcagatgcggtgcttaaagacggctacttccgcaatttgaaagctctgactcggttggacctgtcaaagaaccagatcaggagcctatacctgcacccatcctttggaaagcttaattccttaaaatccatagacttttcctccaaccagattttcttggtctgtgagcacgagctggaacccctgcaggggaagaccctatcatttttcagtctggctgccaactcactatacagcagggtctccgtcgactggggcaaatgcatgaaccctttccgcaatatggtccttgaaattctcgatgtctctggcaacgggtggaccgtagacatcacgggcaacttcagcaacgccatttcaaagtctcaggctttcagcttgatcctggcacaccatattatgggggccggcttcggcttccataatatcaaggatccggatcagaacacattcgcaggcctggcacggtcaagtgtgcggcacttggatctgtcacacggctttgtattctctctcaactcaagggtatttgagaccctgaaagacctgaaggtcttaaatctagcatataataagattaataaaattgcggatgaggctttttatggcctggacaacctgcaagtccttaatcttagctacaatctgctgggagaactgtattcctcaaacttttacggtttgcccaaggtggcgtatatagatcttcagaaaaatcacattgccatcatacaggatcaaacttttaagttcctagagaaactgcagactttggacttacgcgataacgccctgactacaattcacttcatccccagcatccccgacatatttctgtcaggcaacaaactggtcactttgccgaagattaacctgactgcgaacttgattcacctgagtgagaacagactagagaacctggacatcctttactttttgctaagggtcccccacctgcagattttgattctgaatcagaatagatttagcagctgttccggtgatcagacgccttctgaaaatccttccctagagcagctttttttgggcgagaacatgctgcagctggcgtgggaaacagaactgtgctgggatgtatttgaagggctctcgcacctgcaggtcttgtacctgaaccataactatctgaatagtttgccaccaggagtgtttagtcaccttactgccctaagaggtctgtcactgaactctaataggctgactgtgttgtcccacaatgatctcccagctaatctcgagatcctcgacatatctagaaaccagttactggcccccaatcctgatgtcttcgtgagcctatccgtgctggacatcactcataataagtttatatgcgagtgcgaactgagcacattcattaattggttgaaccacactaacgtgaccattgccggcccgccagcagacatttactgcgtgtatccggatagcttcagcggagttagcttgttcagcttgagcacagaaggctgcgacgaggaagaggtactgaaatcccttaaattctccctattcatcgtatgcaccgtcaccctgacactgttccttatgaccattctgaccgtcacaaaattcagaggcttctgcttcatctgttacaaaactgcccagagactcgttttcaaggaccatccacagggaactgaacccgatatgtacaagtatgatgcatacctgtgtttctcctccaaggatttcacttgggtgcagaacgccttgctgaaacatctcgatactcagtactcagatcaaaatcgatttaatttatgtttcgaagagcgagactttgtgcctggcgaaaatcggattgcgaacatccaagacgccatctggaactcgcggaaaattgtttgtttagtgtcgcgtcacttcctccgagacggatggtgcttggaggcatttagctatgcccaaggacggtgccttagtgatctgaactcggccttaataatggtggtggtaggatcgctgagccagtaccaactgatgaagcaccagagcattcgaggattcgtgcagaagcagcagtacctgcgatggcccgaagacttccaagatgtgggatggtttctgcacaaacttagtcagcagatccttaagaaagaaaaggagaagaagaaagacaacaacattccgttacagaccgttgctacgatctcgtag

SEQ ID NO: 286144 - DNA, 2577 bp, Artificial Sequence
  derived and/or modified sequence
atgggcgaccacctggacctgctgctgggcgtggtgctgatggccggacctgtttttggcatcccttcatgtagtttcgacggaaggatcgctttctataggttttgcaatctgactcaagttcctcaggttctgaacaccacagaaaggctcctgctgtcgttcaactacatcagaactgtaaccgcatccagcttcccctttctggagcaactacagttactcgaattgggctcccagtacacccccctcaccatcgacaaagaggcctttagaaacttgccgaatttgcgaattctggatcttggaagcagcaagatttacttcctgcacccggatgcctttcagggccttttccacctcttcgagctgcgtctgtacttttgcggactgtccgacgccgtcctgaaagatggatacttccggaatctgaaggctcttacgaggttggacttatctaaaaatcagattaggtccctgtatctgcacccaagttttggcaaactgaatagcctcaaatcaattgacttttctagcaatcaaatcttcttagtgtgtgagcatgaactcgaacctctccaaggcaagaccctgagcttctttagcctggctgctaattctctttactcaagggtcagcgtcgattgggggaaatgtatgaacccatttaggaatatggttttggaaatcctggacgtctctggcaacgggtggactgttgatattacagggaacttttcaaatgccatctcaaagtcacaagccttttcccttatcctcgctcaccatattatgggcgccgggttcggattccataatatcaaggacccggatcagaacacatttgccggcttggcccgtagcagcgttagacatctcgacttgagtcacggctttgttttctcacttaacagcagggtgttcgagaccctcaaagacctgaaagtgctgaacctcgcctacaataagatcaataagatagccgacgaagcattctatggtctggacaacttgcaggtcttgaatttatcatacaacctgctgggggaattgtactcctccaacttctacggactcccaaaagtggcttacatcgacttgcagaagaatcatattgcgattatccaggaccagacgttcaagtttttagagaaactacagaccctcgatctgcgcgataacgccttgaccacgatacattttattccttctatccccgatattttcctgtctggcaacaaactggtgacactgcctaagatcaacctgactgcaaacctgatccatctctctgagaatcgcctggagaatctggatattctctattttcttctgcgggtgcctcacctccaaatcttgatccttaatcagaaccggttctccagctgcagtggggaccagacccccagcgagaacccctctctcgagcagttgttccttggagaaaacatgttgcaattagcatgggagacagaattgtgctgggacgtattcgagggactttctcacctccaggtgctgtatctaaatcacaattatttgaacagccttcctcctggtgtgttctctcatttaacagcccttcgagggctttcccttaattctaatcggctcacggttttgtcacacaacgacctgccagctaatctcgagatcctggatattagtaggaatcaactgcttgcccctaatcctgatgttttcgtttccctctctgtgctcgatataacccacaacaagtttatctgcgaatgcgagctttctacttttataaattggctcaatcatactaatgtcaccattgctgggcctcccgccgacatctactgcgtttaccctgacagtttttcaggcgtctcacttttctctctgtctacggaaggatgtgatgaggaggaagttcttaagagtttgaaattcagtctattcatcgtgtgcacagtgacactgactctgtttctcatgactattttaaccgtcactaagttccgggggttttgtttcatttgctacaagactgcccagcgcctcgtctttaaggaccatccacagggtaccgagcccgatatgtacaaatacgacgcgtacctttgcttctcaagcaaagacttcacttgggttcaaaatgcactgctaaaacatctggacacacagtacagtgaccagaatcggttcaatttgtgcttcgaggaacgggatttcgtgccgggagaaaatagaatcgccaatattcaggacgccatttggaacagcaggaagattgtctgcctggtgagccgccacttcctgagagatggctggtgtctggaggcattctcctacgcccaggggaggtgcctgagcgacctgaacagcgcgttgatcatggtggtggtcggctctctcagtcagtatcaattgatgaagcaccagagtatcaggggcttcgtgcaaaagcagcagtacctcaggtggcccgaagactttcaggatgttggatggtttttgcataagctaagtcaacagatccttaaaaaagagaaagaaaaaaagaaggacaataacattccactgcagaccgttgcaaccattagctag

SEQ ID NO: 286145 - DNA, 2577 bp, Artificial Sequence
  derived and/or modified sequence
atgggcgaccacctggacctgctgctgggcgtggtgctgatggccggtcccgtgttcggcataccttcatgcagcttcgacggtcgaatcgccttttaccgattttgtaaccttactcaggtgccccaggtgctaaatacaacggagaggttgctgttgtccttcaactacattagaacagtgaccgccagcagcttcccatttctcgagcagctccagctgttggaactgggtagccaatatactcctctcaccattgacaaagaagccttccgcaatctaccaaatctgcggatcctcgacctcggcagctccaaaatttacttcctccacccagatgcatttcaggggctgtttcatctgtttgagcttcgcctctacttctgcggtctgagcgatgctgtacttaaagacgggtactttcggaatctaaaggctttgactagactcgatctctctaagaatcagatccgtagcctgtacttgcaccctagcttcggcaaactcaatagccttaaaagcatcgacttctccagcaatcagattttcctggtgtgtgagcacgagttggaacccctgcagggaaagacactgtcctttttttccttggcagctaacagtctgtatagtcgcgtctctgtggactggggcaaatgcatgaaccctttccgaaatatggttctggagatattggatgtgagcggcaatggctggaccgttgacatcaccggcaacttctccaacgctatttccaagagccaagcatttagcctgatactggctcaccacatcatgggcgcgggctttggctttcacaatattaaggacccagatcaaaacacttttgccgggttggcgaggagttccgtgaggcatcttgatctgtcacacggttttgtcttttccctgaactcaagagtctttgaaaccttaaaggacctcaaggtgctgaaccttgcttataacaagatcaataagatagccgacgaggccttctacggcttggacaatctccaagtcttaaacctctcctacaacctccttggagagctgtattcttcaaacttttacggactgcctaaagtcgcttatatcgatttgcaaaagaatcacatcgccatcatccaggatcaaaccttcaaatttctcgagaaactgcagacgttggacctgcgggacaacgccctgacgacaattcacttcatcccctccatccccgatatcttcttgtctggcaataagctggttaccctgccaaagatcaacctaacggcaaacctgatacacctcagtgagaaccggctggagaaccttgatattctttatttcctgctccgggtaccacacctgcaaatccttatcttaaatcagaatcggtttagcagttgtagcggggaccagaccccttcagagaatccatccctggagcagctgttcctgggcgaaaatatgctgcagcttgcatgggagacggaactctgctgggatgtgtttgagggcttaagtcaccttcaggtcttatatctcaatcataactatcttaatagcttgccccccggagtgtttagccacctcaccgcccttaggggcctttccctgaactctaaccgccttactgtcctgtcccacaatgatttacccgccaatctcgagatcttagatattagtcggaaccagctgttagcaccaaaccccgatgtctttgtttctttgagtgtcctggacatcacacataacaaatttatctgcgagtgcgagctttctacattcatcaattggcttaatcacactaacgtaactatcgctggaccaccggcagacatttattgtgtctaccctgactcctttagtggagtgagcctattcagtctgtcaaccgagggatgcgacgaggaagaggtacttaagtctctcaaattctccctgtttatcgtgtgtaccgtgaccctcactttgttcctgatgactatattgaccgtcaccaaattcagggggttctgtttcatctgttataagacagctcaaaggttggtgtttaaagaccacccacaaggtactgagccagatatgtataagtatgatgcttatttgtgcttctcctctaaagattttacctgggtccagaatgctctgttgaagcacctggatacccagtattcagaccagaatcgcttcaatctttgctttgaagaacgcgacttcgtgcccggggagaataggattgccaacattcaggatgctatatggaactctaggaagatcgtttgcctggtgtctcgccacttcctcagagatggatggtgtctggaagcgttctcctacgctcaaggtcggtgtttatcagacctcaattctgccctcatcatggttgtagtcggaagcttgtcacagtaccagctgatgaagcaccagagcattcgaggctttgtgcaaaagcaacagtacctgcgctggcccgaagatttccaggacgtggggtggttcctgcacaaactgtctcagcagatcctgaaaaaagagaaagaaaagaaaaaagataataacatccctctgcaaacagtggcgaccatctcctag

SEQ ID NO: 286146 - DNA, 2577 bp, Artificial Sequence
  derived and/or modified sequence
atgggcgaccacctggatctgctactcggagtcgtccttatggctgggcctgtctttggtataccttcttgttccttcgacgggcgtattgccttttaccgcttctgcaacttaacccaagtgccacaggtcttgaacaccacagaacgactcttgttgagtttcaactacatcaggacagtaaccgcatcttctttccctttcttagagcagttgcaactgctggagcttggaagccagtacacaccactgacgattgacaaagaagcatttagaaatcttccgaatctgagaatacttgatttagggtcgtcaaaaatttattttttgcatcctgacgcattccaggggttgtttcatctttttgaattgaggctctacttctgcgggctgagcgatgccgttctgaaggatggctatttcaggaatcttaaagctctcactcgactcgatttgtctaaaaaccaaatccgctcactatatcttcatcctagctttggcaaactgaatagtctcaaaagcatagacttttcatctaaccagattttcttagtatgtgagcacgaactggagcctctgcagggcaagacactctctttcttttcccttgcggcaaatagtctgtattctcgggtgtctgtcgattggggcaaatgtatgaaccctttccgaaacatggtcctggaaatcctcgacgtgtctggtaatggctggacagttgatataacagggaatttcagcaatgctatctcgaagagccaggcgtttagccttatcctagcccatcacattatgggagctggcttcggcttccacaacattaaggaccctgaccagaacacttttgccggtctagcccgaagttctgttcgtcacttggatttgtcccacggctttgtcttctccctgaactcccgggtgttcgagacgctcaaagacctcaaagtcctgaacctcgcttataataaaatcaacaagatcgcagacgaagctttctacggcctggataacctgcaggtgttaaatctttcctacaaccttctgggtgaactgtactcaagcaatttctatggactccctaaagtcgcttacatcgacctgcagaaaaaccacatcgctatcatccaggaccagaccttcaagttcttggaaaagctgcaaacgctcgacctcagagacaatgccctcaccacaatccactttatcccaagtatccccgacatttttctgagcggcaataagctggtgacgctgccgaaaataaatctgaccgcaaacttgatccacctcagtgaaaatcgcttggaaaacctggatatcctatacttcctgctgagagttccacacctgcaaattctcatcctgaaccagaatagatttagctcatgcagtggggaccagacaccaagcgagaacccttcgctggaacagctgtttctgggggagaacatgctgcagctcgcttgggagactgaactctgttgggacgtgttcgaaggcctgtcacatttacaggtgttgtaccttaatcataactacctgaactctctcccacccggtgttttttctcatttaacagccctccgaggactgtctcttaactccaaccggcttactgtcctttcgcataatgatctccccgctaatctcgagatattggatatctcccgaaaccagcttctcgctcccaaccctgatgtttttgtctccttatctgtcctggacattacacacaacaagttcatatgcgagtgcgaactcagtacctttattaactggctaaatcacactaatgttacaattgcagggcctccagctgatatctactgcgtttacccagattcttttagtggtgtgagcctgttctccctcagcaccgagggatgtgatgaggaagaagtgttgaaatctctgaaattttcactgttcattgtgtgcacagttacccttacactttttctgatgactatcttgacggtcaccaagtttagaggattctgttttatttgttacaagaccgctcagagactcgtttttaaagaccacccgcaaggcacggaacccgatatgtacaaatatgatgcgtacttgtgtttctcctccaaggactttacgtgggtacagaacgcccttctgaaacacctcgacacacagtactccgaccagaatcgcttcaatctgtgtttcgaagaacgtgactttgtccctggagaaaacagaatcgccaacattcaagatgcaatctggaatagtcgtaaaatagtttgtctcgtcagccgccacttcttgagagacggctggtgtttagaggcctttagctatgcgcaaggacgctgcttgtccgatctgaactccgcattgattatggttgtggtggggtcgctgtctcagtaccagcttatgaagcatcagtctattcggggttttgttcagaagcagcagtaccttcggtggcctgaggacttccaggatgtgggctggtttctccataagctgtctcagcaaattttgaaaaaagagaaagaaaagaagaaggacaacaacattccactgcagactgttgcaactatcagctag

SEQ ID NO: 286147 - DNA, 2577 bp, Artificial Sequence
  derived and/or modified sequence
atgggcgatcacctagaccttctgctaggggtggtgcttatggctggaccggtgtttggaattccatcatgttcattcgacggacgtatcgccttctacagattttgtaacctgacccaagtgcctcaggttctgaatactactgaaaggttactgctgagcttcaattatattagaaccgtgaccgcatcaagcttccctttcctagaacagttacagctcctggagctgggttcacagtacacccctctgacaatagacaaagaagccttccggaatctgccgaatctgcgcatcttggatctgggatcatctaagatttattttctccaccccgatgcttttcagggcctgttccatctttttgaactgcggctttatttttgtggcctatcagacgccgtgctcaaagatggctacttcaggaatcttaaagcattgacaagacttgacctgtctaagaaccaaataagaagcctgtacctgcatccatcatttggtaaacttaattcactgaaaagtatcgacttttcaagcaatcagatatttcttgtctgcgagcacgaactcgagcctctccaaggaaagaccctttccttcttttcactggcggctaactctctgtattctcgcgtctctgttgattggggcaaatgcatgaaccccttccgcaatatggtgctggagattctcgatgttagtgggaacggctggaccgtcgatattaccgggaatttttccaacgccatcagtaagagccaggccttctctctgatcctagcacaccacattatgggggcaggattcggctttcacaacataaaagaccccgaccaaaacacctttgctggcttggccagaagttcggtgagacacctggacctgtctcatggctttgttttttccctgaacagcagggttttcgagactctgaaggacctgaaggttctcaacctggcctacaacaaaatcaacaaaattgccgacgaggccttttacggcctggacaatctgcaagtgctgaacctgagctataatcttctgggagaactctactcctcaaacttttacggcctgccgaaggtcgcctacattgatcttcagaagaaccatatcgcgattatccaggatcaaacttttaaatttctggaaaagctgcagacactggatctgagggataacgcactgaccaccattcatttcatcccctctatcccagacatttttctaagcggcaacaaactggtcactctccctaagatcaacctgaccgctaacctcatccatctgagcgagaacagacttgagaacctggacattctctactttctccttagagtgccccatctgcaaatacttattttgaatcagaataggttctctagttgcagtggcgaccaaacaccttccgaaaaccctagtctggagcagctcttcctcggcgaaaacatgctgcagctcgcctgggagactgagctgtgttgggacgtgtttgaaggactgagccacctgcaggttctgtatctcaatcacaactacctcaatagcctccccccaggcgtcttttctcaccttactgcactgcgcggactgtctttgaatagcaataggcttaccgtgttgtcacacaacgatctgcccgcaaacctcgaaatattggacatatccagaaaccagctgctcgcacccaacccagacgtgtttgttagcttgagcgtactggacattactcacaacaagtttatttgcgaatgcgagttaagcacattcatcaactggctgaatcatacaaatgtaaccatcgctggtccaccagcggacatctactgtgtttatcctgacagtttttccggcgtatctttattttcgctgagcaccgagggctgtgatgaagaggaagtgttgaagtccctaaagttcagtctctttattgtctgtacggtcaccctcactttatttctgatgacaatcttaactgtaaccaagttcagaggattctgctttatatgctataaaactgcgcagagactcgtctttaaggaccatcctcaaggcacggagccagacatgtacaaatacgacgcctatctgtgtttcagctctaaagactttacatgggtccagaacgcacttttgaaacatttggatacgcagtactcggatcagaatcgattcaacctctgctttgaagaacgcgacttcgtccccggtgaaaataggatagctaacatccaggacgcgatctggaacagcagaaaaatagtgtgcttagtcagccggcactttcttagggatggctggtgcctagaagcctttagctacgctcagggtcgatgtctgagtgatctaaactccgctttgatcatggttgtagtgggctcactgtcgcaatatcaactaatgaaacaccagtctatcagaggattcgttcagaaacagcaatacctccgctggccagaggactttcaagatgtcggctggttcctgcacaaactgtctcagcagatcctaaagaaagagaaggaaaaaaaaaaggataacaatattcctctacagactgtggctacaatcagctag

SEQ ID NO: 286148 - DNA, 2577 bp, Artificial Sequence
  derived and/or modified sequence
atgggagatcacctggatctgctccttggggtggtcctgatggcgggacccgtgttcggaattccatcctgttcatttgatggcaggatcgctttctaccggttctgcaatttgactcaggttcctcaagtactgaacacaaccgaacggctgctcctcagtttcaactacataaggacagtcactgcttccagcttccctttcctggagcagctccagctcctcgagctgggctcacagtatactccgctgacgatagacaaagaggcttttcgcaatttgcctaatctacggattctggacctaggatcaagcaaaatatactttcttcaccctgatgctttccaagggttgtttcacctgttcgagctgcggttgtacttttgcggcctcagcgatgccgtgttaaaagacggctattttaggaacttaaaagctctcacgcgtctggatttatcaaagaaccaaatccgatctttgtacctccacccgtcatttgggaagttgaacagtctgaaatcaatcgacttttcctcgaaccagatctttctcgtgtgtgagcatgagctggagccactgcaaggaaaaacactctcttttttctctctggcggctaattcactctatagccgagtcagtgtcgactggggcaaatgcatgaatcctttccggaatatggtccttgaaatcctagacgtcagcggcaatggatggaccgtagacatcacaggaaatttctcaaacgccatcagtaaatcccaggcctttagcttgattttagcccatcatattatgggtgctgggttcggatttcataacattaaagatcccgatcagaacacattcgcagggctcgctagaagctcagttaggcaccttgacctgagccatggcttcgtattcagtctgaactccagagtttttgagacactcaaagacttgaaggtgttgaacctggcttacaacaagatcaataagattgcagatgaagctttctacgggctggacaacctgcaggtactgaatctgtcctataacctcttaggggagctatacagctcaaacttttatggattacccaaggtcgcctacatagatctccagaaaaaccatattgcgattatacaagaccagacctttaagttcttagaaaagcttcagaccctggatcttcgggacaacgctctaactacgatacacttcataccctctatccctgatatattcctttccggtaacaagctcgtaactttgccgaagatcaatttaactgccaacttaatacacctgtccgagaaccgcctggaaaatcttgatattttgtacttcctgcttcgcgtgccccacctccagattctaatcctcaaccagaatcggttctccagttgcagcggcgaccagacgccatccgagaacccgtcgcttgaacagcttttcctgggcgagaacatgctgcagctcgcctgggagacagaactttgctgggacgtgtttgaaggcctgtcacatctgcaggtactgtacctcaaccacaattacctcaattcgctgccccctggcgtcttttcccatttgaccgcgctgcgcggattaagcctcaacagcaataggcttaccgttctgtcgcacaacgatctgcccgctaacctagaaatcttggacattagcagaaatcaattattagcccctaatcctgatgtgtttgtgagtctgtctgttctcgatattactcataacaagtttatttgtgaatgcgagcttagcacatttatcaattggcttaaccacaccaacgtcaccatagcagggcctccagccgacatttactgcgtgtatccagactcctttagcggggttagcctattctccctgtccacagaagggtgcgatgaagaggaagttcttaagtcactcaaattctcgctctttattgtttgcactgtgactttgaccctgttcctgatgaccatccttacagttactaaattccggggattttgctttatctgctataagaccgcccaaaggctggtgtttaaggaccatccccagggcactgagccagacatgtataagtacgatgcttacctctgcttcagttccaaagatttcacctgggtgcagaatgctttacttaagcatctggacactcaatattcagaccagaacaggttcaatctgtgctttgaagagcgcgatttcgttcccggagagaaccggattgccaatatccaagatgccatatggaattcaagaaaaattgtgtgtttggtttcacgacactttctccgcgatgggtggtgcctcgaagccttctcttatgcccagggcaggtgcctctcagaccttaacagcgctctgatcatggttgtagtgggaagcctcagtcagtatcagttgatgaaacatcagagcatacggggatttgtccagaaacagcagtacctaagatggcctgaagacttccaagacgtaggctggttcctgcataagctctctcaacagatattgaagaaagaaaaggaaaagaaaaaagacaacaatatccccctccaaacagtcgcaaccatctcttag

SEQ ID NO: 286149 - DNA, 3005 bp, Artificial Sequence
  derived and/or modified sequence
tccagggaagatgtcggagcctcagatgttaattttctaattgagaatgttggcgctgtccgaacctggagacagagtatcagcgcctttgcttgctgctgtttttgctgttttttgatgctgggaaccaccacctaaagatagtaaagaaaacacaggaagctttccggaaaacaaaaagtcctttctcctgattcaccaaaaaataaaatactgactaccatcactgtgatgagattcctatagtctcaggaactgaagtctttaaacaaccagggaccctctgcccctagaataagaacatactagaagtcccttctgctaggacaacgaggatcatgggagaccacctggaccttctcctaggagtggtgctcatggccggtcctgtgtttggaattccttcctgctcctttgatggccgaatagccttttatcgtttctgcaacctcacccaggtcccccaggtcctcaacaccactgagaggctcctgctgagcttcaactatatcaggacagtcactgcttcatccttcccctttctggaacagctgcagctgctggagctcgggagccagtatacccccttgactattgacaaggaggccttcagaaacctgcccaaccttagaatcttggacctgggaagtagtaagatatacttcttgcatccagatgcttttcagggactgttccatctgtttgaacttagactgtatttctgtggtctctctgatgctgtattgaaagatggttatttcagaaatttaaaggctttaactcgcttggatctatccaaaaatcagattcgtagcctttaccttcatccttcatttgggaagttgaattccttaaagtccatagatttttcctccaaccaaatattccttgtatgtgaacatgagctcgagcccctacaagggaaaacgctctccttttttagcctcgcagctaatagcttgtatagcagagtctcagtggactggggaaaatgtatgaacccattcagaaacatggtgctggagatactagatgtttctggaaatggctggacagtggacatcacaggaaactttagcaatgccatcagcaaaagccaggccttctctttgattcttgcccaccacatcatgggtgccgggtttggcttccataacatcaaagatcctgaccagaacacatttgctggcctggccagaagttcagtgagacacctggatctttcacatgggtttgtcttctccctgaactcacgagtctttgagacactcaaggatttgaaggttctgaaccttgcctacaacaagataaataagattgcagatgaagcattttacggacttgacaacctccaagttctcaatttgtcatataaccttctgggggaactttacagttcgaatttctatggactacctaaggtagcctacattgatttgcaaaagaatcacattgcaataattcaagaccaaacattcaaattcctggaaaaattacagaccttggatctccgagacaatgctcttacaaccattcattttattccaagcatacccgatatcttcttgagtggcaataaactagtgactttgccaaagatcaaccttacagcgaacctcatccacttatcagaaaacaggctagaaaatctagatattctctactttctcctacgggtacctcatctccagattctcattttaaatcaaaatcgcttctcctcctgtagtggagatcaaaccccttcagagaatcccagcttagaacagcttttccttggagaaaatatgttgcaacttgcctgggaaactgagctctgttgggatgtttttgagggactttctcatcttcaagttctgtatttgaatcataactatcttaattcccttccaccaggagtatttagccatctgactgcattaaggggactaagcctcaactccaacaggctgacagttctttctcacaatgatttacctgctaatttagagatcctggacatatccaggaaccagctcctagctcctaatcctgatgtatttgtatcacttagtgtcttggatataactcataacaagttcatttgtgaatgtgaacttagcacttttatcaattggcttaatcacaccaatgtcactatagctgggcctcctgcagacatatattgtgtgtaccctgactcgttctctggggtttccctcttctctctttccacggaaggttgtgatgaagaggaagtcttaaagtccctaaagttctcccttttcattgtatgcactgtcactctgactctgttcctcatgaccatcctcacagtcacaaagttccggggcttctgttttatctgttataagacagcccagagactggtgttcaaggaccatccccagggcacagaacctgatatgtacaaatatgatgcctatttgtgcttcagcagcaaagacttcacatgggtgcagaatgctttgctcaaacacctggacactcaatacagtgaccaaaacagattcaacctgtgctttgaagaaagagactttgtcccaggagaaaaccgcattgccaatatccaggatgccatctggaacagtagaaagatcgtttgtcttgtgagcagacacttccttagagatggctggtgccttgaagccttcagttatgcccagggcaggtgcttatctgaccttaacagtgctctcatcatggtggtggttgggtccttgtcccagtaccagttgatgaaacatcaatccatcagaggctttgtacagaaacagcagtatttgaggtggcctgaggatttccaggatgttggctggtttcttcataaactctctcaacagatactaaagaaagaaaaagaaaagaagaaagacaataacattccgttgcaaactgtagcaaccatctcctaatcaaaggagcaatttccaacttatctcaagccacaaataactcttcactttgtatttgcaccaagttatcattttggggtcctctctgga

SEQ ID NO: 286150 - DNA, 3368 bp, Artificial Sequence
  derived and/or modified sequence
ggttttcaggagcccgagcgagggcgccgcttttgcgtccgggaggagccaaccgtggcgcaggcggcgcggggaggcgtcccagagtctcactctgccgcccaggctggactgcagtgacacaatctcggctgactgcaaccactgcctccagggttcaagcgattctcttgcctcagcctcccaagtagctgggattacagattgatgttcatgttcctgacactactacaagattcatactcctgatgctactgacaacgtggcttctccacagtcaccaaaccagggatgctatactggacttccctactctcatctgctccagccccctgaccttatagttgcccagctttcctggcaattgactttgcccatcaatacacaggatttagcatccagggaagatgtcggagcctcagatgttaattttctaattgagaatgttggcgctgtccgaacctggagacaggaaaacaaaaagtcctttctcctgattcaccaaaaaataaaatactgactaccatcactgtgatgagattcctatagtctcaggaactgaagtctttaaacaaccagggaccctctgcccctagaataagaacatactagaagtcccttctgctaggacaacgaggatcatgggagaccacctggaccttctcctaggagtggtgctcatggccggtcctgtgtttggaattccttcctgctcctttgatggccgaatagccttttatcgtttctgcaacctcacccaggtcccccaggtcctcaacaccactgagaggctcctgctgagcttcaactatatcaggacagtcactgcttcatccttcccctttctggaacagctgcagctgctggagctcgggagccagtatacccccttgactattgacaaggaggccttcagaaacctgcccaaccttagaatcttggacctgggaagtagtaagatatacttcttgcatccagatgcttttcagggactgttccatctgtttgaacttagactgtatttctgtggtctctctgatgctgtattgaaagatggttatttcagaaatttaaaggctttaactcgcttggatctatccaaaaatcagattcgtagcctttaccttcatccttcatttgggaagttgaattccttaaagtccatagatttttcctccaaccaaatattccttgtatgtgaacatgagctcgagcccctacaagggaaaacgctctccttttttagcctcgcagctaatagcttgtatagcagagtctcagtggactggggaaaatgtatgaacccattcagaaacatggtgctggagatactagatgtttctggaaatggctggacagtggacatcacaggaaactttagcaatgccatcagcaaaagccaggccttctctttgattcttgcccaccacatcatgggtgccgggtttggcttccataacatcaaagatcctgaccagaacacatttgctggcctggccagaagttcagtgagacacctggatctttcacatgggtttgtcttctccctgaactcacgagtctttgagacactcaaggatttgaaggttctgaaccttgcctacaacaagataaataagattgcagatgaagcattttacggacttgacaacctccaagttctcaatttgtcatataaccttctgggggaactttacagttcgaatttctatggactacctaaggtagcctacattgatttgcaaaagaatcacattgcaataattcaagaccaaacattcaaattcctggaaaaattacagaccttggatctccgagacaatgctcttacaaccattcattttattccaagcatacccgatatcttcttgagtggcaataaactagtgactttgccaaagatcaaccttacagcgaacctcatccacttatcagaaaacaggctagaaaatctagatattctctactttctcctacgggtacctcatctccagattctcattttaaatcaaaatcgcttctcctcctgtagtggagatcaaaccccttcagagaatcccagcttagaacagcttttccttggagaaaatatgttgcaacttgcctgggaaactgagctctgttgggatgtttttgagggactttctcatcttcaagttctgtatttgaatcataactatcttaattcccttccaccaggagtatttagccatctgactgcattaaggggactaagcctcaactccaacaggctgacagttctttctcacaatgatttacctgctaatttagagatcctggacatatccaggaaccagctcctagctcctaatcctgatgtatttgtatcacttagtgtcttggatataactcataacaagttcatttgtgaatgtgaacttagcacttttatcaattggcttaatcacaccaatgtcactatagctgggcctcctgcagacatatattgtgtgtaccctgactcgttctctggggtttccctcttctctctttccacggaaggttgtgatgaagaggaagtcttaaagtccctaaagttctcccttttcattgtatgcactgtcactctgactctgttcctcatgaccatcctcacagtcacaaagttccggggcttctgttttatctgttataagacagcccagagactggtgttcaaggaccatccccagggcacagaacctgatatgtacaaatatgatgcctatttgtgcttcagcagcaaagacttcacatgggtgcagaatgctttgctcaaacacctggacactcaatacagtgaccaaaacagattcaacctgtgctttgaagaaagagactttgtcccaggagaaaaccgcattgccaatatccaggatgccatctggaacagtagaaagatcgtttgtcttgtgagcagacacttccttagagatggctggtgccttgaagccttcagttatgcccagggcaggtgcttatctgaccttaacagtgctctcatcatggtggtggttgggtccttgtcccagtaccagttgatgaaacatcaatccatcagaggctttgtacagaaacagcagtatttgaggtggcctgaggatttccaggatgttggctggtttcttcataaactctctcaacagatactaaagaaagaaaaagaaaagaagaaagacaataacattccgttgcaaactgtagcaaccatctcctaatcaaaggagcaatttccaacttatctcaagccacaaataactcttcactttgtatttgcaccaagttatcattttggggtcctctctggaggttttttttttctttttgctactatgaaaacaacataaatctctcaattttcgtatcaa

SEQ ID NO: 286151 - DNA, 4088 bp, Artificial Sequence
  derived and/or modified sequence
aagtaagtttgtattttaccatagattgatgttcatgttcctgacactactacaagattcatactcctgatgctactgacaacgtggcttctccacagtcaccaaaccagggatgctatactggacttccctactctcatctgctccagccccctgaccttatagttgcccagctttcctggcaattgactttgcccatcaatacacaggatttagcatccagggaagatgtcggagcctcagatgttaattttctaattgagaatgttggcgctgtccgaacctggagacaggaaaacaaaaagtcctttctcctgattcaccaaaaaataaaatactgactaccatcactgtgatgagattcctatagtctcaggaactgaagtctttaaacaaccagggaccctctgcccctagaataagaacatactagaagtcccttctgctaggacaacgaggatcatgggagaccacctggaccttctcctaggagtggtgctcatggccggtcctgtgtttggaattccttcctgctcctttgatggccgaatagccttttatcgtttctgcaacctcacccaggtcccccaggtcctcaacaccactgagaggctcctgctgagcttcaactatatcaggacagtcactgcttcatccttcccctttctggaacagctgcagctgctggagctcgggagccagtatacccccttgactattgacaaggaggccttcagaaacctgcccaaccttagaatcttggacctgggaagtagtaagatatacttcttgcatccagatgcttttcagggactgttccatctgtttgaacttagactgtatttctgtggtctctctgatgctgtattgaaagatggttatttcagaaatttaaaggctttaactcgcttggatctatccaaaaatcagattcgtagcctttaccttcatccttcatttgggaagttgaattccttaaagtccatagatttttcctccaaccaaatattccttgtatgtgaacatgagctcgagcccctacaagggaaaacgctctccttttttagcctcgcagctaatagcttgtatagcagagtctcagtggactggggaaaatgtatgaacccattcagaaacatggtgctggagatactagatgtttctggaaatggctggacagtggacatcacaggaaactttagcaatgccatcagcaaaagccaggccttctctttgattcttgcccaccacatcatgggtgccgggtttggcttccataacatcaaagatcctgaccagaacacatttgctggcctggccagaagttcagtgagacacctggatctttcacatgggtttgtcttctccctgaactcacgagtctttgagacactcaaggatttgaaggttctgaaccttgcctacaacaagataaataagattgcagatgaagcattttacggacttgacaacctccaagttctcaatttgtcatataaccttctgggggaactttacagttcgaatttctatggactacctaaggtagcctacattgatttgcaaaagaatcacattgcaataattcaagaccaaacattcaaattcctggaaaaattacagaccttggatctccgagacaatgctcttacaaccattcattttattccaagcatacccgatatcttcttgagtggcaataaactagtgactttgccaaagatcaaccttacagcgaacctcatccacttatcagaaaacaggctagaaaatctagatattctctactttctcctacgggtacctcatctccagattctcattttaaatcaaaatcgcttctcctcctgtagtggagatcaaaccccttcagagaatcccagcttagaacagcttttccttggagaaaatatgttgcaacttgcctgggaaactgagctctgttgggatgtttttgagggactttctcatcttcaagttctgtatttgaatcataactatcttaattcccttccaccaggagtatttagccatctgactgcattaaggggactaagcctcaactccaacaggctgacagttctttctcacaatgatttacctgctaatttagagatcctggacatatccaggaaccagctcctagctcctaatcctgatgtatttgtatcacttagtgtcttggatataactcataacaagttcatttgtgaatgtgaacttagcacttttatcaattggcttaatcacaccaatgtcactatagctgggcctcctgcagacatatattgtgtgtaccctgactcgttctctggggtttccctcttctctctttccacggaaggttgtgatgaagaggaagtcttaaagtccctaaagttctcccttttcattgtatgcactgtcactctgactctgttcctcatgaccatcctcacagtcacaaagttccggggcttctgttttatctgttataagacagcccagagactggtgttcaaggaccatccccagggcacagaacctgatatgtacaaatatgatgcctatttgtgcttcagcagcaaagacttcacatgggtgcagaatgctttgctcaaacacctggacactcaatacagtgaccaaaacagattcaacctgtgctttgaagaaagagactttgtcccaggagaaaaccgcattgccaatatccaggatgccatctggaacagtagaaagatcgtttgtcttgtgagcagacacttccttagagatggctggtgccttgaagccttcagttatgcccagggcaggtgcttatctgaccttaacagtgctctcatcatggtggtggttgggtccttgtcccagtaccagttgatgaaacatcaatccatcagaggctttgtacagaaacagcagtatttgaggtggcctgaggatttccaggatgttggctggtttcttcataaactctctcaacagatactaaagaaagaaaaagaaaagaagaaagacaataacattccgttgcaaactgtagcaaccatctcctaatcaaaggagcaatttccaacttatctcaagccacaaataactcttcactttgtatttgcaccaagttatcattttggggtcctctctggaggttttttttttctttttgctactatgaaaacaacataaatctctcaattttcgtatcaacaccatgttctgtctcactaacctccaaatggaaaataatagatctagaaaattgcaactgcccttagaggtttccagtctccattgattttctttcagatccaataataccgttctgtcctgctgtgttgattatggaatgtatcctaatcatgggaagggcaccttgggagaagttgcagatggctgacgtgctttctctagcattcagctaaaaaatgggatggtccatgattctgcgttctctgtgttctgcaaaacaacattaagtagaaaacaaacagaagcagaggcacatttccttcttttgccacagaaacaatgccactgttgagtgcaagtcacactttgtctcatagataagaggtggccccaaagaagctgggatgaatgagtcactacctgtcttgtgactgtactgcacttcatgttcttaccttcggcttctccaggtctcgccctagtgagccaagaactttctctcacatgctgcctttatttaagcctggccttcaagaccttccatgatttatcaccaacctaccttttcagctttgtttcctagcacacctcattgatcagctgctcaggctgttgcatgaagaacatggactttgcacacagatcctgggttgagttctgagtcagctgtgtattagccatgtaaccttggccttggtatgcccttgctggacctacattttctcacgtaacagcatctatgtcatagaattcctgtgaaaattaaattggccaaggatgtcagggcttctcagatcttttccttcgttgccctaatgaccacaagagaacacatacactgaaggcctcctggggggcagttgcaatttcactgaagttgtatttttttatcttaaatgaaatctatgtgtattttc

SEQ ID NO: 286152 - protein, 285 aa, Artificial Sequence
  derived and/or modified sequence
MMEAIKKKMQMLKLDKENALDRAEQAEAEQKQAEERSKQLEDELAAMQKKLKGTEDELDKYSEALKDAQEKLELAEKKAADAEAEVASLNRRIQLVEEELDRAQERLATALQKLEEAEKAADESERGMKVIENRALKDEEKMELQEIQLKEAKHIAEEADRKYEEVARKLVIIEGDLERTEERAELAESRCREMDEQIRLMDQNLKCLSAAEEKYSQKEDKYEEEIKILTDKLKEAETRAEFAERSVAKLEKTIDDLEDKLKCTKEEHLCTQRMLDQTLLDLNEM

SEQ ID NO: 286153 - DNA, 858 bp, Artificial Sequence
  derived and/or modified sequence
atgatggaggccatcaagaagaagatgcagatgctgaagctggacaaggagaacgccctggacagagccgagcaggccgaggccgagcagaagcaggccgaggagagaagcaagcagctggaggacgagctggccgccatgcagaagaagctgaagggcaccgaggacgagctggacaagtacagcgaggccctgaaggacgcccaggagaagctggagctggccgagaagaaggccgccgacgccgaggccgaggtggccagcctgaacagaagaatccagctggtggaggaggagctggacagagcccaggagagactggccaccgccctgcagaagctggaggaggccgagaaggccgccgacgagagcgagagaggcatgaaggtgatcgagaacagagccctgaaggacgaggagaagatggagctgcaggagatccagctgaaggaggccaagcacatcgccgaggaggccgacagaaagtacgaggaggtggccagaaagctggtgatcatcgagggcgacctggagagaaccgaggagagagccgagctggccgagagcagatgcagagagatggacgagcagatcagactgatggaccagaacctgaagtgcctgagcgccgccgaggagaagtacagccagaaggaggacaagtacgaggaggagatcaagatcctgaccgacaagctgaaggaggccgagaccagagccgagttcgccgagagaagcgtggccaagctggagaagaccatcgacgacctggaggacaagctgaagtgcaccaaggaggagcacctgtgcacccagagaatgctggaccagaccctgctggacctgaacgagatgtag

SEQ ID NO: 286154 - DNA, 858 bp, Artificial Sequence
  derived and/or modified sequence
atgatggaagccatcaaaaagaagatgcagatgttgaagcttgataaggaaaatgcactggacagagcagagcaggccgaagcagaacaaaagcaagccgaagagcgaagcaagcagctcgaggacgaactcgccgcaatgcagaaaaagctaaagggcactgaggacgaactcgacaaatattccgaggccctgaaagatgcgcaggagaagttagaattggccgaaaagaaagccgccgacgcggaggctgaagtggcctccttgaatcgccgcatccaacttgtagaggaagaacttgatagagcacaagagagactggctaccgctctacagaagttagaggaggcagagaaggcagcggatgaatccgagcgcgggatgaaggtgatcgaaaacagagccctcaaggacgaggaaaagatggaactgcaggagatccagttgaaagaagccaaacacatagctgaagaggcagaccgcaagtatgaggaggtggctcggaaattggtgattatagagggtgatctcgagaggactgaggaacgggcagagcttgccgaaagtaggtgtcgagaaatggacgaacaaatccgactcatggatcagaacctcaagtgcctgagtgcggctgaggagaaatactctcaaaaggaggacaagtatgaagaagagattaagatactgactgacaaacttaaagaggccgagactagggctgagtttgccgagagatcagtggccaaactggaaaagaccatcgatgacttagaggataagctgaagtgtacgaaagaggagcacctgtgtactcagagaatgctggatcaaactctgctggatctgaacgaaatgtag

SEQ ID NO: 286155 - DNA, 858 bp, Artificial Sequence
  derived and/or modified sequence
atgatggaggccatcaagaagaagatgcagatgctgaagctggacaaggaaaatgccctggacagagctgagcaggccgaggccgagcagaagcaggccgaggagaggagcaagcagctggaggatgagctggccgccatgcagaagaagctgaagggcacagaagatgagctggacaagtacagcgaggccctgaaggatgcccaggagaagctggagctggccgagaagaaggccgcagatgctgaggccgaggtggccagcctgaacagacgcatccagctggtggaggaggagctggaccgggcccaggagcggctggccacagccctgcagaagctggaggaggccgagaaggctgctgatgagagcgagcggggcatgaaggtgattgagaacagagccctgaaggatgaggagaagatggagctgcaggagatccagctgaaggaggccaagcacatcgccgaggaggccgacagaaaatatgaggaggtggccaggaagctggtgatcattgaaggagacctggagaggacagaggagcgggcagagctggccgagagccgctgccgggagatggatgagcagatccggctgatggaccagaacctgaagtgcctgtctgctgctgaggagaagtacagccagaaggaggacaagtatgaggaggagatcaagatcctgacagacaagctgaaggaggccgagaccagggctgagtttgctgagaggtctgtggccaagctggagaagaccattgatgacctggaggacaagctgaagtgcaccaaggaggagcacctgtgcacccagaggatgctggaccagaccctgctggacctgaatgagatgtag

SEQ ID NO: 286156 - DNA, 858 bp, Artificial Sequence
  derived and/or modified sequence
atgatggaggccatcaagaagaagatgcagatgctgaagctggacaaagagaatgctctagatcgggccgagcaggccgaggccgaacagaagcaggccgaggagagatccaagcagctggaagacgagctggccgcaatgcaaaaaaagctcaagggaaccgaagacgagttggacaagtattccgaggcacttaaggatgcccaggaaaaactggagctagccgagaaaaaagccgcagacgctgaggccgaagtggcctcactaaatagacgtattcagctggtagaagaggaattggaccgagcacaagaacgtctagcaacagccctgcagaagttggaagaggcagagaaggcggccgatgagagcgagcgcggaatgaaggtcattgaaaatcgcgccctgaaagacgaagagaaaatggagcttcaggaaatccaacttaaagaggccaaacacattgctgaggaggccgatcggaagtacgaagaggttgcaaggaagctggtgatcattgagggagacctggaacgcaccgaagagagagctgagcttgcagagagccggtgccgcgagatggatgagcagattcggttgatggatcagaacctgaagtgcctcagcgccgctgaagaaaagtacagccagaaggaggacaaatatgaggaagagatcaaaattctcacagacaagcttaaggaggcagagaccagggcagagttcgcagagcgaagcgtcgctaagttagaaaagactatcgacgatttggaggataaacttaagtgtacaaaggaggagcacttatgcacccaacggatgcttgaccaaacactgctcgatttgaatgagatgtag

SEQ ID NO: 286157 - DNA, 858 bp, Artificial Sequence
  derived and/or modified sequence
atgatggaagctataaagaaaaaaatgcagatgctaaaactggataaggagaatgctctcgatagggccgagcaagcagaggcagagcagaagcaggcggaagagcgttctaagcagctcgaagacgagctggcggcaatgcagaagaagctcaagggcactgaagacgagttggataagtacagtgaggccctgaaagatgcccaggaaaagcttgagctggccgaaaaaaaggcggcagatgccgaggctgaggtggcctcactgaatcgcagaatccaacttgtggaagaggagctggacagggcccaggaacggctcgccactgcgcttcagaagctagaagaagctgaaaaggcggctgacgaaagcgagcgcggtatgaaagtcattgagaaccgggctcttaaggacgaggaaaaaatggagttgcaggaaattcagctaaaggaggcaaagcacatcgcggaagaggcagaccgcaagtatgaggaggtggcgcgaaagctggttattattgaaggggatctggaaagaaccgaggaacgggcagagctagcagagtcgcgatgtcgcgaaatggacgagcagatcaggctcatggatcagaacctaaagtgtctctcagctgccgaagagaaatatagtcaaaaggaggataagtacgaggaagagatcaagatcctgaccgataaattaaaggaggccgagacacgcgctgaattcgcagaacgatctgtcgctaagttagagaaaacgattgatgacctagaggacaagctgaaatgcactaaggaggagcatctgtgtacgcagcggatgctcgaccaaacattgttggacttgaatgaaatgtag

SEQ ID NO: 286158 - DNA, 1219 bp, Artificial Sequence
  derived and/or modified sequence
ctccagtgttcacaggtgagcctaccaacagccactgctcatgatggaggccatcaagaaaaagatgcagatgctgaagttagacaaggagaatgctctggatcgggcagagcaagctgaagctgagcagaagcaggcagaagaaagaagtaaacagctggaggatgagctggcagccatgcagaagaagctgaaagggacagaggatgagctggacaagtattctgaagctttgaaggatgcccaggagaagctggaactggcagagaagaaggctgctgatgctgaggctgaggtggcctccttgaaccgtaggatccagctggttgaagaagagctggaccgtgctcaggagcgcctggccactgccctgcaaaagctggaagaagctgaaaaagctgctgatgagagtgagagaggtatgaaggttattgaaaaccgggccttaaaagatgaagaaaagatggaactccaggaaatccaactcaaagaagctaagcacattgcagaagaggcagataggaagtatgaagaggtggctcgtaagttggtgatcattgaaggagacttggaacgcacagaggaacgagctgagctggcagagtcccgttgccgagagatggatgagcagattagactgatggaccagaacctgaagtgtctgagtgctgctgaagaaaagtactctcaaaaagaagataaatatgaggaagaaatcaagattcttactgataaactcaaggaggcagagacccgtgctgagtttgctgagagatcggtagccaagctggaaaagacaattgatgacctggaagataaactgaaatgcaccaaagaggagcacctctgtacacaaaggatgctggaccagaccctgcttgacctgaatgagatgtagaacgccccagtcccaccctgctgctgctcctccctctgacccagactccgcctgaggccagcctgcgggaagctgacctttaactgagggctgatctttaactggaaggctgctttctcctttcaccaccccctccttccctgtgtctttttcgccaaactgtctctgcctcttcccggagaatccagctgggctagaggctgagcacctttggaaacaacatttaagggaatgtgagcacaatgcataatgtctttaaaaagcatgttgtgatgtacacattttgtaattaccttttttgttgttttgtagcaaccattt

SEQ ID NO: 286159 - DNA, 228 bp, Artificial Sequence
  derived and/or modified sequence
atgatggaggccatcaagaagaagatgcagatgctgaagctggacaaggagaacgccctggacagagccgagcaggccgaggccgagcagaagcaggccgaggagagaagcaagcagctggaggacgagctggccgccatgcagaagaagctgaagggcaccgaggacgagctggacaagtacagcgaggccctgaaggacgcccaggagaagctggagctggcctag

SEQ ID NO: 286160 - DNA, 228 bp, Artificial Sequence
  derived and/or modified sequence
atgatggaggcaatcaagaaaaagatgcagatgttaaagctcgacaaagagaatgccctggatcgtgcagaacaagctgaggctgagcagaaacaggcggaagagcggtccaagcagttggaagatgagctggccgctatgcaaaagaagcttaaggggactgaagacgagttagataagtactctgaagctttgaaagatgcccaggagaaactcgagttggcttag

SEQ ID NO: 286161 - DNA, 228 bp, Artificial Sequence
  derived and/or modified sequence
atgatggaggccatcaagaagaagatgcagatgctgaagctggacaaggaaaatgccctggacagagctgagcaggccgaggccgagcagaagcaggccgaggagaggagcaagcagctggaggatgagctggccgccatgcagaagaagctgaagggcacagaagatgagctggacaagtacagcgaggccctgaaggatgcccaggagaagctggagctggcctag

SEQ ID NO: 286162 - DNA, 228 bp, Artificial Sequence
  derived and/or modified sequence
atgatggaggccatcaagaagaagatgcagatgctgaagctggacaaggagaatgcccttgaccgcgccgaacaagccgaagctgagcagaaacaggcagaggaaagaagcaagcagcttgaagatgagttagccgctatgcagaagaagctgaaaggcaccgaggacgagctggacaagtacagcgaggccttaaaagatgcccaggaaaagttagaactggcctag

SEQ ID NO: 286163 - DNA, 228 bp, Artificial Sequence
  derived and/or modified sequence
atgatggaggccatcaagaagaagatgcagatgctaaaactcgacaaggagaacgcactggacagggctgagcaggccgaagccgaacagaagcaagccgaggaacgctcaaaacaactggaagacgaactggccgcaatgcagaagaaactcaaaggaacggaggatgagctggacaagtatagcgaggctctaaaggatgcccaggaaaaactggagcttgcctag

SEQ ID NO: 286164 - DNA, 587 bp, Artificial Sequence
  derived and/or modified sequence
gagaaatttcccatgtgggaatccggctggatccctgtgagggaagacccttggagaacgcagcctggagttctggtaaaaagccctagaagaggagaggactcctgtggactgcaggctgcttcctggcagaagtttcctctcttaccctcagtctaaagccttagtttcaattctgccaggcaaggtggggaactataagtcttctcttctggagcccacgatggagcctgccagggagacaagttattcttctgttctggacatccaagggtgactttaaggaggatgcctggaggacatggggagaagtctccagttctccagtgttcacaggtgagcctaccaacagccactgctcatgatggaggccatcaagaaaaagatgcagatgctgaagttagacaaggagaatgctctggatcgggcagagcaagctgaagctgagcagaagcaggcagaagaaagaagtaaacagctggaggatgagctggcagccatgcagaagaagctgaaagggacagaggatgagctggacaagtattctgaagctttgaaggatgcccaggagaagctggaactggcag

SEQ ID NO: 286165 - DNA, 609 bp, Artificial Sequence
  derived and/or modified sequence
atgctgctgtggagcctgctggtgatcttcgagagagtgagagagaacctggacagcctgaccctggtggcccccagcagcgtgttcgagggcgacagcatcgtgctgaagtgccagggcgagcagaactggaagatccagaagatggcctaccacaaggacaacaaggagctgagcgtgttcaagaagttcagcgacttcctgatccagagcgccgtgctgagcgacagcggcaactacttctgcagcaccaagggccagctgttcctgtgggacaagaccagcaacatcgtgaagatcaaggtgcagggccccgacggctacagaagagacctgatgaccgccggcgtgctgtggggcctgttcggcgtgctgggcttcaccggcgtggccctgctgctgtacgccctgttccacaagatcagcggcgagagcagcgccaccaacgagcccagaggcgccagcagacccaacccccaggagttcacctacagcagccccacccccgacatggaggagctgcagcccgtgtacgtgaacgccaacatcagaaccctgctggagaacaaggacagccaggtgatctacagcagcgtgaagaagagctag

SEQ ID NO: 286166 - DNA, 609 bp, Artificial Sequence
  derived and/or modified sequence
atgctgctgtggagcctgctggtgatcttcgacgccgtgaccgagcaggccgacagcctgaccctggtggcccccagcagcgtgttcgagggcgacagcatcgtgctgaagtgccagggcgagcagaactggaagatccagaagatggcctaccacaaggacaacaaggagctgagcgtgttcaagaagttcagcgacttcctgatccagagcgccgtgctgagcgacagcggcaactacttctgcagcaccaagggccagctgttcctgtgggacaagaccagcaacatcgtgaagatcaaggtgcagggccccgacggctacagaagagacctgatgaccgccggcgtgctgtggggcctgttcggcgtgctgggcttcaccggcgtggccctgctgctgtacgccctgttccacaagatcagcggcgagagcagcgccaccaacgagcccagaggcgccagcagacccaacccccaggagttcacctacagcagccccacccccgacatggaggagctgcagcccgtgtacgtgaacgccaacatcagaaccctgctggagaacaaggacagccaggtgatctacagcagcgtgaagaagagctag

SEQ ID NO: 286167 - DNA, 1673 bp, Artificial Sequence
  derived and/or modified sequence
agagtctccagttggtgaccaagagtacatctcttttcaaatagctggattaggtcctcatgctgctgtggtcattgctggtcatctttgaaagagtaagagagaacttagattcgctgacccttgtggcgccctcttctgtcttcgaaggagacagcatcgttctgaaatgccagggagaacagaactggaaaattcagaagatggcttaccataaggataacaaagagttatctgttttcaaaaaattctcagatttccttatccaaagtgcagttttaagtgacagtggtaactatttctgtagtaccaaaggacaactctttctctgggataaaacttcaaatatagtaaagataaaagtccaaggacctgatggctatagaagagacctcatgacagctggagttctctggggactgtttggtgtccttggtttcactggtgttgctttgctgttgtatgccttgttccacaagatatcaggagaaagttctgccactaatgaacccagaggggcttccaggccaaatcctcaagagttcacctattcaagcccaaccccagacatggaggagctgcagccagtgtatgtcaatgcaaacatcaggacacttctggagaacaaggactcccaagtcatctactcttctgtgaagaaatcataacacttggaggaatcagaagggaagatcaacagcaaggatggggcatcattaagacttgctataaaaccttatgaaaatgcttgaggcttatcacctgccacagccagaacgtgcctcaggaggcacctcctgtcatttttgtcctgatgatgtttcttctccaatatcttcttttacctatcaatattcattgaactgctgctacatccagacactgtgcaaataaattatttctgctaccttctcttaagcaatcagtgtgtaaagatttgagggaagaatgaataagagatacaaggtctcaccttcatctactgtgaagtgatgagaacaggacttgatagtggtgtattaacttatttatgtgctgctggatacagtttgctaatattttgttgagaatttttgcaaatatgttcattgggaatattggcctgaaattttcttttccactgtgtctctgccagaatgtttgtatcaggctgatgctggcttcatagaatgagttaggcaggagcccttcctccttgattttttggcatagtttcagcaggattggtaccagttattctttctgcatcttgtagaattcagctatgaatccatctggtctagggcttttgtgttggttggtaagttttttattactaattcaacttcagcgcttgatattggtctaggaggggtttctgtctcttcctggttcaatcttgggagattgtgtgtttccaggaatttagccgtttcctccagattttcttctttatgtgcatcgacttgagtgtaaacataacttatatgcactgggaaaccaaaaaatctgtgtgacttgctttattgcagcatttgttttattttggtagtctggaactgaacctgcaatatcaccaaagtatgcatatagttgcaaaaatgtgatttttgacatagtaaatatgagtatttgcaataaactatgatattacttttgtaagtatatagaataaaatgtaaataatctataga

SEQ ID NO: 286168 - DNA, 1669 bp, Artificial Sequence
  derived and/or modified sequence
agagtctccagttggtgaccaagagtacatctcttttcaaatagctggattaggtcctcatgctgctgtggtcattgctggtcatctttgatgcagtcactgaacaggcagattcgctgacccttgtggcgccctcttctgtcttcgaaggagacagcatcgttctgaaatgccagggagaacagaactggaaaattcagaagatggcttaccataaggataacaaagagttatctgttttcaaaaaattctcagatttccttatccaaagtgcagttttaagtgacagtggtaactatttctgtagtaccaaaggacaactctttctctgggataaaacttcaaatatagtaaagataaaagtccaaggacctgatggctatagaagagacctcatgacagctggagttctctggggactgtttggtgtccttggtttcactggtgttgctttgctgttgtatgccttgttccacaagatatcaggagaaagttctgccactaatgaacccagaggggcttccaggccaaatcctcaagagttcacctattcaagcccaaccccagacatggaggagctgcagccagtgtatgtcaatgcaaacatcaggacacttctggagaacaaggactcccaagtcatctactcttctgtgaagaaatcataacacttggaggaatcagaagggaagatcaacagcaaggatggggcatcattaagacttgctataaaaccttatgaaaatgcttgaggcttatcacctgccacagccagaacgtgcctcaggaggcacctcctgtcatttttgtcctgatgatgtttcttctccaatatcttcttttacctatcaatattcattgaactgctgctacatccagacactgtgcaaataaattatttctgctaccttctcttaagcaatcagtgtgtaaagatttgagggaagaatgaataagagatacaaggtctcaccttcatctactgtgaagtgatgagaacaggacttgatagtggtgtattaacttatttatgtgctgctggatacagtttgctaatattttgttgagaatttttgcaaatatgttcattgggaatattggcctgaaattttcttttccactgtgtctctgccagaatgtttgtatcaggctgatgctggcttcatagaatgagttaggcaggagcccttcctccttgattttttggcatagtttcagcaggattggtaccagttattctttctgcatcttgtagaattcagctatgaatccatctggtctagggcttttgtgttggttggtaagttttttattactaattcaacttcagcgcttgatattggtctaggaggggtttctgtctcttcctggttcaatcttgggagattgtgtgtttccaggaatttagccgtttcctccagattttcttctttatgtgcatcgacttgagtgtaaacataacttatatgcactgggaaaccaaaaaatctgtgtgacttgctttattgcagcatttgttttattttggtagtctggaactgaacctgcaatatcaccaaagtatgcatatagttgcaaaaatgtgatttttgacatagtaaatatgagtatttgcaataaactatgatattacttttgtaagtatatagaataaaatgtaaataatcta

SEQ ID NO: 286169 - DNA, 609 bp, Artificial Sequence
  derived and/or modified sequence
atgttactgtggtcgcttctggtgatcttcgagagggttagggagaatctagatagcctaactctggttgcaccgagctctgtgttcgagggagattctatcgtgctgaagtgccagggggaacagaattggaagattcagaaaatggcataccacaaagacaacaaggaactcagtgtgttcaagaagtttagtgattttttgattcagagcgcagtcttatccgattctggtaattatttctgctccaccaagggccagctgttcttgtgggacaaaacctctaacatcgtgaaaataaaggtgcagggtcctgatgggtaccgcagggatcttatgactgccggtgttctttggggcctgttcggcgtactgggatttacaggcgtagccttattgctgtacgccttgttccacaagataagcggagaatcgtccgccaccaacgagccccgcggggctagcaggcctaacccccaagagttcacttacagcagtcctacccctgacatggaggagctgcagccggtatacgtaaatgcaaatataaggactctgctcgagaataaggactctcaggtgatttattcttccgtcaagaaatcctag

SEQ ID NO: 286170 - DNA, 609 bp, Artificial Sequence
  derived and/or modified sequence
atgttactgtggtcgctcttagtcatttttgacgccgttacagagcaagcggatagcctgaccctcgtggccccatcctctgtgtttgaaggagacagcattgtgcttaagtgccaaggtgagcagaattggaaaatccagaagatggcatatcataaagacaacaaggagctttccgtttttaagaaattcagcgactttctaatccagtcagcagttttgtcagactccggtaattatttttgcagcacaaaggggcagctgtttctgtgggataagaccagtaatatagttaaaatcaaagtgcaaggccccgatggctaccgtcgcgacctgatgactgcgggggtcctgtggggactgttcggggtactcggctttacaggagtggccttgctgctgtacgcgctttttcacaaaattagcggcgaatcctctgcaactaacgagccccgaggagcatcacgccccaatccccaggaatttacgtactccagccccaccccagatatggaagaacttcagcccgtctatgtcaacgcaaatattaggacactcctggagaacaaggactcacaagtaatctactcctccgtgaaaaaatcatag

SEQ ID NO: 286171 - DNA, 609 bp, Artificial Sequence
  derived and/or modified sequence
atgctgctgtggagcctgctggtgatctttgagcgggtgcgggagaacctggacagcctgaccctggtggcccccagctctgtgtttgaaggagacagcatcgtgctgaagtgccagggcgagcagaactggaagatccagaagatggcctaccacaaggacaacaaggagctgtctgtgttcaagaagttcagtgacttcctgatccagagcgctgtgctgagtgacagcggcaactacttctgcagcaccaagggccagctgttcctgtgggacaagaccagcaacatcgtgaagatcaaggtgcagggcccagatggctacagaagagacctgatgacagctggggtgctgtggggcctgtttggagtgctgggcttcaccggggtggccctgctgctgtatgccctcttccacaagatcagcggggagagcagcgccaccaatgagcccaggggggccagccggcccaacccccaggagttcacctacagcagccccaccccagacatggaggagctgcagcctgtgtatgtgaatgccaacatccgcaccctgctggagaacaaggacagccaggtgatctacagctctgtgaagaagagctag

SEQ ID NO: 286172 - DNA, 609 bp, Artificial Sequence
  derived and/or modified sequence
atgctgctgtggagcctgctggtgatctttgatgctgtgacagagcaggccgacagcctgaccctggtggcccccagctctgtgtttgaaggagacagcatcgtgctgaagtgccagggcgagcagaactggaagatccagaagatggcctaccacaaggacaacaaggagctgtctgtgttcaagaagttcagtgacttcctgatccagagcgctgtgctgagtgacagcggcaactacttctgcagcaccaagggccagctgttcctgtgggacaagaccagcaacatcgtgaagatcaaggtgcagggcccagatggctacagaagagacctgatgacagctggggtgctgtggggcctgtttggagtgctgggcttcaccggggtggccctgctgctgtatgccctcttccacaagatcagcggggagagcagcgccaccaatgagcccaggggggccagccggcccaacccccaggagttcacctacagcagccccaccccagacatggaggagctgcagcctgtgtatgtgaatgccaacatccgcaccctgctggagaacaaggacagccaggtgatctacagctctgtgaagaagagctag

SEQ ID NO: 286173 - DNA, 609 bp, Artificial Sequence
  derived and/or modified sequence
atgctgctgtggagcctgctggtgatcttcgagcgggtgcgggagaatttagacagcctcactctcgtggcaccttcatctgtctttgagggagactcaattgttctgaagtgtcagggcgaacaaaattggaaaatccagaagatggcttaccacaaggataacaaagagctgagcgtcttcaagaaattcagcgatttccttatacagtctgcggtgctttctgactccggcaattatttttgctccacaaaaggccaactgtttttatgggacaaaacttcaaacatcgttaagataaaggtacaggggcccgatggatataggagggatctgatgactgcaggcgtattgtgggggttgtttggggtacttggttttaccggggtcgcactgcttctgtatgcgctgttccacaaaattagcggagaaagttccgccactaatgagcctagaggagctagtcgtccaaacccacaggagtttacctacagttccccaacccctgacatggaagagctacagccagtatatgtcaatgctaatatccgcaccttacttgagaataaggattcccaggttatctacagtagtgtcaaaaagtcctag

SEQ ID NO: 286174 - DNA, 609 bp, Artificial Sequence
  derived and/or modified sequence
atgctgctgtggagcctgctggtgatcttcgacgccgtgaccgagcaggctgattccctgaccctggtcgcaccatctagcgtattcgagggagatagcatcgtactcaaatgccaaggagagcaaaactggaaaatccagaaaatggcgtaccacaaggataataaggaattgtcagtcttcaaaaagttctctgacttcctgattcagtccgcagtgctgagcgactccggtaactatttttgtagcactaagggccaactctttctctgggataaaacatctaacatcgtcaagatcaaggtgcagggcccagacggttacaggagagatcttatgactgccggcgttctgtggggcctgtttggtgtgttgggcttcaccggcgtcgcccttcttttgtacgccctgtttcacaagataagcggcgaatctagcgcaactaatgagccccgcggtgcatctcgtcctaacccccaggagtttacctactcatcaccaaccccagacatggaggagctccagcctgtgtacgtaaacgccaatatccggacactgctggagaataaggactcacaagtgatctactcgtccgtgaaaaaatcatag

SEQ ID NO: 286175 - DNA, 609 bp, Artificial Sequence
  derived and/or modified sequence
atgttgctctggtctttattggtaattttcgaaagagtgagggagaaccttgactcgttaaccttagtggctccgtctagtgtctttgaaggcgactctatcgtactcaagtgtcagggcgagcagaactggaaaatccagaagatggcctatcataaggataataaggaactgtccgtgtttaagaagttttccgatttcctgatccagtcagcagtgctgtccgactctgggaactatttctgttccaccaaaggtcaactattcctgtgggacaagacttccaacatcgtcaaaattaaggtccaaggccctgacggatacagaagagatctgatgaccgctggagttctctggggcctattcggagtcctgggctttaccggggtcgctctcctcctgtacgctttgttccacaaaatatccggggaatcctctgcaactaacgagccacgcggtgcctcacggccaaatccacaagaatttacctacagcagccctacgcccgatatggaggaactacagccagtgtacgttaatgccaatatccgaacactgcttgagaataaggactcccaggttatctattctagtgtgaagaaaagctag

SEQ ID NO: 286176 - DNA, 609 bp, Artificial Sequence
  derived and/or modified sequence
atgctcctgtggagccttctggtgatcttcgacgctgtgactgaacaggccgactccctgactctggtcgccccttcgtccgttttcgaaggtgattctatagtgctcaagtgccaaggcgaacagaattggaagatccagaaaatggcctatcacaaggacaataaggagctaagcgtgttcaagaagttcagcgacttcctcatacagagtgcagtgctgtctgactcaggtaattacttctgctctactaagggacagctctttctgtgggacaagacatctaacatcgtcaagataaaagtgcagggtccagacggataccgaagggacctgatgaccgctggggtcttgtggggtctgtttggcgtgctcggatttactggggtcgctttgctgttgtatgcactatttcacaagatttctggtgagagttccgctaccaacgagccgcgaggcgcatcaagacctaatcctcaggagttcacatactcctcccctaccccagacatggaagagcttcaacctgtttacgtcaatgcaaacattaggacactgctggaaaacaaggacagccaggtgatttactcatcagtgaagaagtcttag

SEQ ID NO: 286177 - protein, 316 aa, Artificial Sequence
  derived and/or modified sequence
MADVLSVLRQYNIQKKEIVVKGDEVIFGEFSWPKNVKTNYVVWGTGKEGQPREYYTLDSILFLLNNVHLSHPVYVRRAATENIPVVRRPDRKDLLGYLNGEASTSASIDRSAPLEIGLQRSTQVKRAADEVLAEAKKPRIEDEECVRLDKERLAARLEGHKEGIVQTEQIRSLSEAMSVEKIAAIKAKIMAKKRSTIKTDLDDDITALKQRSFVDAEVDVTRDIVSRERVWRTRTTILQSTGKNFSKNIFAILQSVKAREEGRAPEQRPAPNAAPVDPTLRTKQPIPAAYNRYDQERISNTHYHNSCSYHLFNNHA

SEQ ID NO: 286178 - DNA, 951 bp, Artificial Sequence
  derived and/or modified sequence
atggccgacgtgctgagcgtgctgagacagtacaacatccagaagaaggagatcgtggtgaagggcgacgaggtgatcttcggcgagttcagctggcccaagaacgtgaagaccaactacgtggtgtggggcaccggcaaggagggccagcccagagagtactacaccctggacagcatcctgttcctgctgaacaacgtgcacctgagccaccccgtgtacgtgagaagagccgccaccgagaacatccccgtggtgagaagacccgacagaaaggacctgctgggctacctgaacggcgaggccagcaccagcgccagcatcgacagaagcgcccccctggagatcggcctgcagagaagcacccaggtgaagagagccgccgacgaggtgctggccgaggccaagaagcccagaatcgaggacgaggagtgcgtgagactggacaaggagagactggccgccagactggagggccacaaggagggcatcgtgcagaccgagcagatcagaagcctgagcgaggccatgagcgtggagaagatcgccgccatcaaggccaagatcatggccaagaagagaagcaccatcaagaccgacctggacgacgacatcaccgccctgaagcagagaagcttcgtggacgccgaggtggacgtgaccagagacatcgtgagcagagagagagtgtggagaaccagaaccaccatcctgcagagcaccggcaagaacttcagcaagaacatcttcgccatcctgcagagcgtgaaggccagagaggagggcagagcccccgagcagagacccgcccccaacgccgcccccgtggaccccaccctgagaaccaagcagcccatccccgccgcctacaacagatacgaccaggagagaatcagcaacacccactaccacaacagctgcagctaccacctgttcaacaaccacgcctag

SEQ ID NO: 286179 - DNA, 951 bp, Artificial Sequence
  derived and/or modified sequence
atggccgatgtcttgtctgtactcagacaatataatatccagaagaaagagattgtcgtgaaaggggatgaggtgatcttcggcgagttctcttggccaaaaaatgttaaaaccaactatgtggtgtggggtacaggcaaggagggccaaccaagagaatactatactctcgactccattctatttcttttgaacaacgtccacctctctcatccggtgtacgtcagacgggcggccacagaaaatatcccggttgtgagaaggcccgatcgcaaagatctcctgggatatctaaatggtgaggcttctactagcgcctccatcgacagatcagccccattggagataggactccagagatccactcaggttaaaagggctgctgacgaagtgctggctgaggcaaagaaacctagaatcgaagacgaagaatgcgtaagactagataaagagcgcctggcagccagactcgagggtcacaaagaaggtatagtgcagaccgagcagataaggagcctatccgaggcaatgagcgtagaaaagatagcagccatcaaggctaagatcatggctaaaaagaggtctaccatcaaaacagacctcgacgacgatatcactgccctcaagcagcggtctttcgtggatgccgaggtggacgtcaccagagatatcgtgagtcgcgaacgcgtgtggcgcactcgcacgacaatcttacagagcaccgggaagaattttagtaaaaatatcttcgcaatcctgcagagtgtgaaggctagggaagaaggacgggctccagaacagcgaccagcaccaaacgcagcgcctgttgaccccacactccgcactaagcaaccaatccctgccgcttataacagatacgatcaggagcgcatcagtaatacccattatcacaattcttgcagctaccacctctttaataatcatgcctag

SEQ ID NO: 286180 - DNA, 951 bp, Artificial Sequence
  derived and/or modified sequence
atggctgatgtgctgtctgtgctgcggcagtacaacatccagaagaaggagatcgtggtgaagggagatgaagtcatctttggagagttctcctggcccaagaatgtgaagaccaactacgtggtgtggggcaccgggaaggagggccagccccgggagtactacaccctggacagcatcctcttcctgctgaacaacgtgcacctgagccaccctgtgtatgtgcggcgggccgccacagagaacatccctgtggtgagaagaccagacaggaaggacctgctgggctacctgaatggagaggccagcaccagcgccagcattgacagaagtgcccccctggagatcggcctgcagaggagcacccaggtgaagagagctgctgatgaggtgctggccgaggccaagaagcccagaattgaagatgaggagtgtgtgcggctggacaaggagcggctggccgcccggctggagggccacaaggagggcatcgtgcagacagagcagatccgcagcctgtctgaggccatgtctgtggagaagattgctgccatcaaggccaagatcatggccaagaagaggagcaccatcaagacagacctggatgatgacatcacagccctgaagcagaggagctttgtggatgctgaggtggatgtgacccgggacatcgtgtcccgggagcgggtgtggaggaccaggaccaccatcctgcagagcacaggcaagaacttcagcaagaacatctttgccatcctgcagagcgtgaaggcccgggaggagggccgggcccctgagcagaggcctgccccaaatgctgcccctgtggaccccaccctgcggaccaagcagcccatcccagctgcctacaacagatatgaccaggagcgcatcagcaacacccactaccacaacagctgcagctaccacctgttcaacaaccacgcctag

SEQ ID NO: 286181 - DNA, 951 bp, Artificial Sequence
  derived and/or modified sequence
atggccgacgtgctgagcgtgctgcggcagtacaacatccagaagaaggaaatagttgtcaagggggatgaagtgatctttggagagttctcttggcctaaaaacgtcaagacaaactatgtagtgtggggcaccggcaaggaggggcagccccgggaatactataccttagattccatcctgttcctgcttaataacgttcatctctctcacccagtttatgtgagaagagccgctacagagaacataccagtcgttaggcggccagacagaaaagacttgcttggttatctgaatggggaggcatctacatcagcgagcatcgatcggagcgcccctctcgagattgggctccagagaagtacccaggtgaaacgcgcagccgatgaagtgttggccgaggctaagaagccccgaattgaggatgaggaatgcgtgcggctcgacaaagagaggctggctgccaggctggagggacataaggaaggtattgtgcagaccgaacagatcaggtccctttccgaagctatgagtgtcgaaaagatcgctgctataaaagctaagattatggccaaaaagcgaagtaccatcaagacagacctggacgatgacattactgcgctgaaacaaagaagttttgtggatgcggaggtcgatgtgactcgggacattgtgagccgcgagagagtgtggcgcacccgcacaacgatcttgcaatccaccgggaagaacttctccaagaatattttcgctattcttcaaagcgtcaaggctagggaagagggcagagccccggaacagaggcccgccccgaacgccgctcccgttgacccaacattgcgtaccaagcagccaattcccgccgcctataaccgatacgatcaggagagaatttcaaacacacattatcacaatagttgcagttatcatctgttcaataatcatgcctag

SEQ ID NO: 286182 - DNA, 951 bp, Artificial Sequence
  derived and/or modified sequence
atggccgacgtgctgtctgtactgaggcagtacaacatccagaagaaggaaatcgtggtgaaaggggacgaagtcattttcggtgagttttcgtggccaaaaaatgtaaagactaactatgtagtctgggggaccgggaaggagggacaacccagagagtactacactttagattcaattctgtttctcctcaacaacgtgcacctatcacaccctgtgtacgtccggagagctgctactgagaacatcccagtggtgcgcaggccggataggaaggaccttctgggctacctgaacggagaggccagcacatcagcttccatcgaccggtccgcacctctcgaaatcggcctgcagagatcgacacaggtgaagagggctgctgacgaagttttagccgaggctaaaaagccacgaattgaagacgaagagtgcgtcaggctcgacaaggaaaggctggccgctcggctggagggtcacaaagaaggcatcgtccagaccgagcaaattcggagtttaagtgaggccatgagcgtggagaaaattgccgctataaaagctaaaatcatggccaagaagaggagcacaatcaaaaccgacttggatgatgacatcaccgccctgaagcaacgctccttcgtggatgccgaagtggacgtgaccagggatattgtgagcagggaaagagtctggaggactcgcactactatcctgcagtctactgggaagaacttctccaaaaatatatttgccattctgcagtctgtgaaagcgagagaagaggggagggccccagagcagagacccgcacccaacgccgcacctgttgatcccacgctccgcactaaacaacctattccagctgcatataaccgctacgatcaggaacgcatcagcaacacacactatcataatagctgctcctaccacttgtttaacaatcacgcctag

SEQ ID NO: 286183 - DNA, 1157 bp, Artificial Sequence
  derived and/or modified sequence
ggcgaaggaggaggaggaagagggcgaggcgacaagagaagaaggaggcaggcgcggcggcagcggcggcgccccgagccggcggaggcgaggggggggaagatggcggacgtgcttagcgtcctgcgacagtacaacatccagaagaaggagattgtggtgaagggagacgaagtgatcttcggggagttctcctggcccaagaatgtgaagaccaactatgttgtttgggggactggaaaggaaggccaacccagagagtactacacattggattccattttatttctacttaataacgtgcacctttctcatcctgtttatgtccgacgtgcagctactgaaaatattcctgtggttagaagacctgatcgaaaagatctacttggatatctcaatggtgaagcgtcaacatcggcaagtatagacagaagcgctcccttagaaataggtcttcagcgatctactcaagtcaaacgagctgcagatgaagttttagcagaagcaaagaaaccacgaattgaggatgaagagtgtgtgcgccttgataaagagagattggctgcccgtttggagggtcacaaagaagggattgtacagactgaacagattaggtctttgtctgaagctatgtcagtggaaaaaattgctgcaatcaaagccaaaattatggctaagaaaagatctactatcaagactgatctagatgatgacataactgcccttaaacagaggagttttgtggatgctgaggtagatgtgacccgagatattgtcagcagagagagagtatggaggacacgaacaactatcttacaaagcacaggaaagaatttttccaagaacatttttgcaattcttcaatctgtaaaagccagagaagaagggcgtgcacctgaacagcgacctgccccaaatgcagcacctgtggatcccactttgcgcaccaaacagcctatcccagctgcctataacagatacgatcaggaaaggatctcgaacacccattatcataattcctgcagctaccacctctttaataaccatgcttaatgcaaaagaccttctacaggacctgaaatttgtcccatcagatgaaaagaagaaacaaggttgtcaacgagaaaatgaaactctaatacaaagaagaaaagacc

SEQ ID NO: 286184 - protein, 156 aa, Artificial Sequence
  derived and/or modified sequence
LLQRCKWHEENDILFCALAVCKKIAYCISNSLATLFGIQLTEAHVPLQDYEASNSVTPKMVVLDAGRYQKLRVGSSGFSHFNSSNEEQRSNTPIGDYPSRAKISGQNSSVRGRGITRLLESISNSSSNIHKFSNCDTSLSPYMSQKDGYKSFSSLS

SEQ ID NO: 286185 - protein, 701 aa, Artificial Sequence
  derived and/or modified sequence
MGSAADVRFSLGTTTHAPPGVHRRYSALREESAKDWETSPLPGMLAPAAGPAFDSDPEISDVDEDEPGGLVGSADVVSPSGHSDAQTLAMMLQEQLDAINEEIRMIQEEKESTELRAEEIETRVTSGSMEALNLKQLRKRGSIPTSLTALSLASASPPLSGRSTPKLTSRSAAQDLDRMGVMTLPSDLRKHRRKLLSPVSREENREDKATIKCETSPPSSPRTLRLEKLGHPALSQEEGKSALEDQGSNPSSSNSSQDSLHKGAKRKGIKSSIGRLFGKKEKGRLIQLSRDGATGHVLLTDSEFSMQEPMVPAKLGTQAEKDRRLKKKHQLLEDARRKGMPFAQWDGPTVVSWLELWVGMPAWYVAACRANVKSGAIMSALSDTEIQREIGISNALHRLKLRLAIQEMVSLTSPSAPPTSRTSSGNVWVTHEEMETLETSTKTDSEEGSWAQTLAYGDMNHEWIGNEWLPSLGLPQYRSYFMECLVDARMLDHLTKKDLRVHLKMVDSFHRTSLQYGIMCLKRLNYDRKELEKRREESQHEIKDVLVWTNDQVVHWVQSIGLRDYAGNLHESGVHGALLALDENFDHNTLALILQIPTQNTQARQVMEREFNNLLALGTDRKLDDGDDKVFRRAPSWRKRFRPREHHGRGGMLSASAETLPAGFRVSTLGTLQPPPAPPKKIMPEAHSHYLYGHMLSAFRD

SEQ ID NO: 286186 - protein, 914 aa, Artificial Sequence
  derived and/or modified sequence
MEERITTLEKRYLAAQREATSIHDLNDKLENELANKESLHRQCEEKARHLQELLEVAEQKLQQTMRKAETLPEVEAELAQRIAALTKAEERHGNIEEHLRQLEGQLEEKNQELARVRQREKMNEDHNKRLSDTVDRLLSESNERLQLHLKERMAALEEKNTLIQELESSQRQIEEQHHHKGRLSEEIEKLRQEVDQLKGRGGPFVDGVHSRSHMGSAADVRFSLGTTTHAPPGVHRRYSALREESAKDWETSPLPGMLAPAAGPAFDSDPEISDVDEDEPGGLVGSADVVSPSGHSDAQTLAMMLQEQLDAINEEIRMIQEEKESTELRAEEIETRVTSGSMEALNLKQLRKRGSIPTSLTALSLASASPPLSGRSTPKLTSRSAAQDLDRMGVMTLPSDLRKHRRKLLSPVSREENREDKATIKCETSPPSSPRTLRLEKLGHPALSQEEGKSALEDQGSNPSSSNSSQDSLHKGAKRKGIKSSIGRLFGKKEKGRLIQLSRDGATGHVLLTDSEFSMQEPMVPAKLGTQAEKDRRLKKKHQLLEDARRKGMPFAQWDGPTVVSWLELWVGMPAWYVAACRANVKSGAIMSALSDTEIQREIGISNALHRLKLRLAIQEMVSLTSPSAPPTSRTSSGNVWVTHEEMETLETSTKTDSEEGSWAQTLAYGDMNHEWIGNEWLPSLGLPQYRSYFMECLVDARMLDHLTKKDLRVHLKMVDSFHRTSLQYGIMCLKRLNYDRKELEKRREESQHEIKDVLVWTNDQVVHWVQSIGLRDYAGNLHESGVHGALLALDENFDHNTLALILQIPTQNTQARQVMEREFNNLLALGTDRKLDDGDDKVFRRAPSWRKRFRPREHHGRGGMLSASAETLPAGFRVSTLGTLQPPPAPPKKIMPEAHSHYLYGHMLSAFRD

SEQ ID NO: 286187 - DNA, 2745 bp, Artificial Sequence
  derived and/or modified sequence
atggaggagagaatcaccaccctggagaagagatacctggccgcccagagagaggccaccagcatccacgacctgaacgacaagctggagaacgagctggccaacaaggagagcctgcacagacagtgcgaggagaaggccagacacctgcaggagctgctggaggtggccgagcagaagctgcagcagaccatgagaaaggccgagaccctgcccgaggtggaggccgagctggcccagagaatcgccgccctgaccaaggccgaggagagacacggcaacatcgaggagcacctgagacagctggagggccagctggaggagaagaaccaggagctggccagagtgagacagagagagaagatgaacgaggaccacaacaagagactgagcgacaccgtggacagactgctgagcgagagcaacgagagactgcagctgcacctgaaggagagaatggccgccctggaggagaagaacaccctgatccaggagctggagagcagccagagacagatcgaggagcagcaccaccacaagggcagactgagcgaggagatcgagaagctgagacaggaggtggaccagctgaagggcagaggcggccccttcgtggacggcgtgcacagcagaagccacatgggcagcgccgccgacgtgagattcagcctgggcaccaccacccacgccccccccggcgtgcacagaagatacagcgccctgagagaggagagcgccaaggactgggagaccagccccctgcccggcatgctggcccccgccgccggccccgccttcgacagcgaccccgagatcagcgacgtggacgaggacgagcccggcggcctggtgggcagcgccgacgtggtgagccccagcggccacagcgacgcccagaccctggccatgatgctgcaggagcagctggacgccatcaacgaggagatcagaatgatccaggaggagaaggagagcaccgagctgagagccgaggagatcgagaccagagtgaccagcggcagcatggaggccctgaacctgaagcagctgagaaagagaggcagcatccccaccagcctgaccgccctgagcctggccagcgccagcccccccctgagcggcagaagcacccccaagctgaccagcagaagcgccgcccaggacctggacagaatgggcgtgatgaccctgcccagcgacctgagaaagcacagaagaaagctgctgagccccgtgagcagagaggagaacagagaggacaaggccaccatcaagtgcgagaccagcccccccagcagccccagaaccctgagactggagaagctgggccaccccgccctgagccaggaggagggcaagagcgccctggaggaccagggcagcaaccccagcagcagcaacagcagccaggacagcctgcacaagggcgccaagagaaagggcatcaagagcagcatcggcagactgttcggcaagaaggagaagggcagactgatccagctgagcagagacggcgccaccggccacgtgctgctgaccgacagcgagttcagcatgcaggagcccatggtgcccgccaagctgggcacccaggccgagaaggacagaagactgaagaagaagcaccagctgctggaggacgccagaagaaagggcatgcccttcgcccagtgggacggccccaccgtggtgagctggctggagctgtgggtgggcatgcccgcctggtacgtggccgcctgcagagccaacgtgaagagcggcgccatcatgagcgccctgagcgacaccgagatccagagagagatcggcatcagcaacgccctgcacagactgaagctgagactggccatccaggagatggtgagcctgaccagccccagcgccccccccaccagcagaaccagcagcggcaacgtgtgggtgacccacgaggagatggagaccctggagaccagcaccaagaccgacagcgaggagggcagctgggcccagaccctggcctacggcgacatgaaccacgagtggatcggcaacgagtggctgcccagcctgggcctgccccagtacagaagctacttcatggagtgcctggtggacgccagaatgctggaccacctgaccaagaaggacctgagagtgcacctgaagatggtggacagcttccacagaaccagcctgcagtacggcatcatgtgcctgaagagactgaactacgacagaaaggagctggagaagagaagagaggagagccagcacgagatcaaggacgtgctggtgtggaccaacgaccaggtggtgcactgggtgcagagcatcggcctgagagactacgccggcaacctgcacgagagcggcgtgcacggcgccctgctggccctggacgagaacttcgaccacaacaccctggccctgatcctgcagatccccacccagaacacccaggccagacaggtgatggagagagagttcaacaacctgctggccctgggcaccgacagaaagctggacgacggcgacgacaaggtgttcagaagagcccccagctggagaaagagattcagacccagagagcaccacggcagaggcggcatgctgagcgccagcgccgagaccctgcccgccggcttcagagtgagcaccctgggcaccctgcagcccccccccgccccccccaagaagatcatgcccgaggcccacagccactacctgtacggccacatgctgagcgccttcagagactag

SEQ ID NO: 286188 - DNA, 2106 bp, Artificial Sequence
  derived and/or modified sequence
atggggtcagctgcggacgtccggttctctctgggtacaaccacccacgcgccacccggggtccataggaggtactccgcgcttcgcgaggaatcagccaaggattgggagaccagtccgctgccgggaatgttagccccagccgccggcccagccttcgattctgatcccgagatttctgacgtggatgaggacgaaccagggggactggtcggaagcgctgatgtggtgtctccttcgggacactctgacgctcagacactggccatgatgctgcaggagcagctggatgccattaatgaggagatccgcatgattcaggaggaaaaggagtccacggagctgagggccgaagaaatagaaacgcgggttacatccggtagcatggaagcgcttaacctgaaacagctgagaaagcgcggcagcatccctacatcgttaaccgcgctctcgctggcatcagccagccccccactgagcggaagaagcacacccaaactcacgtctaggagtgccgcacaggacttagatcgtatgggagttatgacactcccttcagacttgcgcaaacatagacgcaagctgttgtcacctgtgagcagggaggagaatagggaggataaagctactatcaaatgtgaaacttccccaccaagttctccacgaactctgagattagagaaactgggccatcccgccttgagtcaggaggagggaaagagcgcattggaggatcaggggtccaacccatccagttccaattctagccaggactccctgcacaagggcgccaaaaggaaagggatcaaaagcagtattggaagactgtttggcaaaaaagagaagggcagactcatccaactctccagggatggtgctactggccacgtgctcctcactgacagtgaatttagcatgcaagagcctatggtgcccgctaaactggggacccaggccgaaaaggataggcggcttaaaaaaaaacaccaactgctggaagacgcacgacggaagggtatgccctttgctcagtgggatggccccacagtggtgtcttggttagagttgtgggttggcatgcccgcttggtacgtggccgcctgcagagctaacgtaaagagtggggcgatcatgtcggcactctcggacaccgagatacagagagaaatagggatatccaacgcactgcaccgcctgaagttgaggctggccattcaggagatggtgtctttgacatcaccatccgccccccccacttctagaacctcaagtggcaatgtgtgggtgactcacgaagagatggaaacgctggaaacttcaactaagaccgactctgaggagggcagctgggcacagaccctggcgtacggggacatgaatcacgagtggatcggaaatgaatggcttccatccttggggcttccccagtacagaagctattttatggaatgtctagtggacgcccggatgctggaccacctcactaaaaaggacctcagggtacatctaaaaatggtcgactccttccacaggacatccctccaatatggcatcatgtgtctgaaaaggttaaactatgacaggaaagaactggagaagagacgtgaggagagccaacacgagatcaaggacgtgttggtgtggacgaatgaccaagtggtccattgggtccagagcatcggactgagagattacgccggaaatctgcacgagtctggtgtacacggagcactgctggcccttgacgagaacttcgatcataatacactcgccttgatcctgcaaattccgacgcagaacactcaggcgagacaggttatggagagagagttcaataacctactcgccctgggtaccgaccggaagctcgatgatggcgatgataaagtctttagaagagcgccttcatggagaaagaggtttaggccccgcgagcatcacggccgtgggggcatgctctccgcttctgcggagacccttccagccgggttcagggtctccacacttggaactctccaacccccccccgcgccacccaaaaaaattatgcctgaggcccatagtcattatttgtacgggcacatgctatctgcattccgagactag

SEQ ID NO: 286189 - DNA, 2745 bp, Artificial Sequence
  derived and/or modified sequence
atggaagaacgtattaccactctggagaaacggtacctggcagcacagcgcgaggcaacaagcatccacgatttgaacgacaaactggaaaacgagttagctaataaggagtcactccacaggcagtgcgaggagaaggcaagacacctgcaggaattgctcgaggtggccgaacagaagctgcagcagactatgcgtaaagccgaaacgctacccgaggttgaagcagaattagctcagaggatcgccgcattaacaaaggcggaagagcggcacggcaacattgaggagcacctgagacagctggaaggccaactggaggagaagaaccaggagctcgcacgtgtgaggcagcgggagaaaatgaacgaagaccataacaaacggctgtctgacacagttgacagacttctgtccgagagcaacgagagactgcaactccacctgaaggagaggatggccgccctggaggaaaaaaacaccctgatccaagagttggagtcgtctcagcggcagattgaggaacaacatcatcacaaagggcgtttatcagaggagattgagaaattaagacaagaggtggaccagctgaaggggcgcggaggaccgtttgtggacggagtacacagtcggagtcacatgggcagtgcggcagacgtcagattcagcctgggcaccaccacacatgcgccacccggtgtccaccgccggtattcagccttgagagaggagtcagcaaaggattgggagacttcccctctgccggggatgctggctccagctgctggcccagcttttgactctgatccggaaatcagcgacgtggacgaagacgagcccggtggactggtcggctccgcagacgtcgtcagcccctctggccatagtgacgctcaaacactggccatgatgcttcaggagcagttagatgcgatcaatgaggagatccgcatgatacaggaagaaaaagagtcaactgagctccgcgccgaagaaattgagacccgggttacctcagggtctatggaagccctgaacctcaaacagttgaggaaaaggggctctattccaaccagcctcacagcgttgagtctggcctcagcctcgccgcctctgagcggcaggagtacccccaagctcactagcaggtctgcagcccaagatcttgatcgaatgggcgtcatgaccctgcccagtgacctacgcaagcataggcgtaagctgttgtccccagtgagccgggaagaaaatcgcgaagataaggcaaccataaagtgtgagacctctcccccttcgtcacctaggacgctacgacttgagaagctgggccaccccgctttaagccaggaggagggcaagtccgccctagaggatcagggttctaatcctagctccagcaattcctctcaggattcccttcacaagggcgccaaaaggaagggcattaaatcttcaatcgggagactattcggcaagaaagagaagggacggctaatccaactttctcgagacggagccactgggcacgttctgttgaccgactcagagttctccatgcaggaaccgatggtccctgccaagttgggaacacaggccgagaaagatagaaggctcaagaagaagcaccaattgttggaagatgcacgtagaaagggtatgcctttcgcacaatgggacgggcccaccgtggtgagttggcttgaactatgggttggtatgcccgcctggtatgtggccgcttgtagggcaaacgttaaaagcggcgccattatgtcagctctttccgacactgaaattcagagggaaattggaatctctaacgcgttgcataggctcaagctaaggttggccatccaggagatggtttccctgacttcacccagtgcccccccgacgtcacgaacaagttcagggaacgtctgggtaacccacgaagagatggagaccttggaaacttcaacaaaaaccgattctgaagagggatcttgggcacagacattagcatatggcgacatgaaccatgaatggatagggaacgaatggctcccttcactgggccttccacagtacagaagttacttcatggagtgcctcgtggacgctcgcatgctcgaccacttgaccaagaaggacttacgagtgcatttgaaaatggttgacagcttccaccgaaccagcttgcaatatggcatcatgtgcctcaagcggctgaactatgaccggaaggaactcgaaaagcggcgcgaggagagccaacatgaaatcaaggacgtgctggtgtggactaacgaccaggtggtgcactgggtgcagagcattgggcttagagactacgctggaaatctacatgagtctggtgtccacggggcactgctggccttggatgagaattttgaccataacacactggccttgatactgcagatccctacccaaaatacacaggccaggcaagtcatggagcgagaatttaacaatctgcttgcgctcggtacagaccggaagcttgacgatggcgacgacaaggtcttccggcgggctccctcatggcggaagcgattccgccctcgcgagcatcacggcaggggcggcatgctaagcgcctcggccgagacccttcctgccgggttccgggtgtccaccctggggacattgcagccaccacctgccccgcccaaaaaaattatgccagaagcgcattcccattacctgtacggccacatgctctccgctttccgggattag

SEQ ID NO: 286190 - DNA, 2106 bp, Artificial Sequence
  derived and/or modified sequence
atgggcagcgctgctgatgtgcgcttcagcctgggcaccaccacccacgcccctcctggggtgcaccggcgctacagcgccctgcgggaggagagcgccaaggactgggagaccagccccctgcccggcatgctggccccagctgctggccctgcctttgacagcgaccctgagatcagtgatgtggatgaagatgagcccggcggcctggtgggcagcgcagatgtggtgagccccagcggccacagtgatgcccagaccctggccatgatgctgcaggagcagctggatgccatcaatgaggagatccgcatgatccaggaggagaaggagagcacagagctgcgggcagaggagattgagaccagggtgaccagcggctccatggaggccctgaacctgaagcagctgaggaagaggggcagcatccccaccagcctgacagccctgagcctggccagcgccagcccccccctgagcggccgcagcacccccaagctgaccagccgctctgctgcccaggacctggacaggatgggcgtgatgaccctgcccagcgacctgaggaagcacaggaggaagctgctgagccctgtgtcccgggaggagaaccgggaggacaaggccaccatcaagtgtgagaccagcccccccagcagccccaggaccctgcggctggagaagctgggccacccagccctgagccaggaggagggcaagagcgccctggaggaccagggcagcaaccccagcagcagcaacagcagccaggacagcctgcacaagggggccaagaggaagggcatcaagagcagcatcggccgcctgtttgggaagaaggagaagggccgcctcatccagctgagcagagatggagccaccggccacgtgctgctgacagacagcgagttctccatgcaggagcccatggtgcctgccaagctgggcacccaggccgagaaggaccggcggctgaagaagaagcaccagctgctggaggatgcccggaggaagggcatgccctttgcccagtgggatggccccaccgtggtgtcctggctggagctgtgggtgggcatgcctgcctggtacgtggccgcctgccgggccaacgtgaagagcggggccatcatgtctgccctgagtgacacagagatccagcgggagatcggcatcagcaatgccctgcaccggctgaagctgcggctggccatccaggagatggtgtccctgaccagccccagcgccccacccaccagcaggaccagcagtggaaatgtgtgggtgacccatgaggagatggagaccctggagaccagcaccaagacagattctgaggagggctcctgggcccagaccctggcctacggggacatgaaccacgagtggattggaaatgagtggctgcccagcctgggcctgccccagtaccgcagctacttcatggagtgcctggtggatgccaggatgctggaccacctgaccaagaaggacctgcgggtgcacctgaagatggtggacagcttccacaggaccagcctgcagtatggcatcatgtgcctgaagaggctgaactatgacaggaaggagctggagaagaggcgggaggagagccagcacgagatcaaggatgtgctggtgtggaccaatgaccaggtggtgcactgggtgcagagcatcggcctgcgggactatgccggcaacctgcacgagagcggcgtgcatggagccctgctggccctggatgaaaattttgaccacaacaccctggccctgatcctgcagatccccacccagaacacccaggcccggcaggtgatggagcgggagttcaacaacctgctggccctgggcacagacaggaagctggatgatggagatgacaaggtgttccggcgggcccccagctggaggaagcgcttccggccccgggagcaccacggccggggcggcatgctgagcgccagcgctgagaccctgcctgctggcttccgggtgtccaccctgggcaccctgcagcccccaccagccccacccaagaagatcatgcctgaggcccacagccactacctgtatggccacatgctgagcgccttccgggactag

SEQ ID NO: 286191 - DNA, 2745 bp, Artificial Sequence
  derived and/or modified sequence
atggaggagcgcatcaccaccctggagaagcgctacctggccgcccagcgggaggccaccagcatccatgacctgaatgacaagctggagaatgagctggccaacaaggagagcctgcaccggcagtgtgaggagaaggcccggcacctgcaggagctgctggaggtggccgagcagaagctgcagcagaccatgaggaaggccgagaccctgcctgaggtggaggccgagctggcccagagaattgctgccctgaccaaggccgaggagcggcacggcaacatcgaggagcacctgcggcagctggagggccagctggaggagaagaaccaggagctggcccgggtgcggcagcgggagaagatgaatgaagaccacaacaagaggctgagtgacacagtggaccggctgctgtctgagagcaatgaaaggctgcagctgcacctgaaggagaggatggccgccctggaggagaagaacaccctcatccaggagctggagagcagccagaggcagatcgaggagcagcaccaccacaagggccgcctgtctgaggagattgagaagctgcggcaggaggtggaccagctgaagggccggggcggcccctttgtggatggagtgcacagccgcagccacatgggcagcgctgctgatgtgcgcttcagcctgggcaccaccacccacgcccctcctggggtgcaccggcgctacagcgccctgcgggaggagagcgccaaggactgggagaccagccccctgcccggcatgctggccccagctgctggccctgcctttgacagcgaccctgagatcagtgatgtggatgaagatgagcccggcggcctggtgggcagcgcagatgtggtgagccccagcggccacagtgatgcccagaccctggccatgatgctgcaggagcagctggatgccatcaatgaggagatccgcatgatccaggaggagaaggagagcacagagctgcgggcagaggagattgagaccagggtgaccagcggctccatggaggccctgaacctgaagcagctgaggaagaggggcagcatccccaccagcctgacagccctgagcctggccagcgccagcccccccctgagcggccgcagcacccccaagctgaccagccgctctgctgcccaggacctggacaggatgggcgtgatgaccctgcccagcgacctgaggaagcacaggaggaagctgctgagccctgtgtcccgggaggagaaccgggaggacaaggccaccatcaagtgtgagaccagcccccccagcagccccaggaccctgcggctggagaagctgggccacccagccctgagccaggaggagggcaagagcgccctggaggaccagggcagcaaccccagcagcagcaacagcagccaggacagcctgcacaagggggccaagaggaagggcatcaagagcagcatcggccgcctgtttgggaagaaggagaagggccgcctcatccagctgagcagagatggagccactggacatgtgctgctgacagattctgagttctccatgcaggagcccatggtgcctgccaagctgggcacccaggccgagaaggaccggcggctgaagaagaagcaccagctgctggaggatgcccggaggaagggcatgccctttgcccagtgggatggccccaccgtggtgtcctggctggagctgtgggtgggcatgcctgcctggtacgtggccgcctgccgggccaacgtgaagagcggggccatcatgtctgccctgagtgacacagagatccagcgggagatcggcatcagcaatgccctgcaccggctgaagctgcggctggccatccaggagatggtgtccctgaccagccccagcgccccacccaccagcaggaccagcagtggaaatgtgtgggtgacccatgaggagatggagaccctggagaccagcaccaagacagacagcgaggagggctcctgggcccagaccctggcctatggagacatgaaccacgagtggattggaaatgagtggctgcccagcctgggcctgccccagtaccgcagctacttcatggagtgcctggtggatgccaggatgctggaccacctgaccaagaaggacctgcgggtgcacctgaagatggtggacagcttccacaggaccagcctgcagtatggcatcatgtgcctgaagaggctgaactatgacaggaaggagctggagaagagaagagaggagagccagcacgagatcaaggatgtgctggtgtggaccaatgaccaggtggtgcactgggtgcagagcatcggcctgcgggactatgccggcaacctgcatgaaagtggagtgcacggggccctgctggccctggatgagaactttgaccacaacaccctggccctgatcctgcagatccccacccagaacacccaggcccggcaggtgatggagcgggagttcaacaacctgctggccctgggcacagacaggaagctggatgatggagatgacaaggtgttcagaagagcccccagctggaggaagcgcttccggccccgggagcaccacggccggggcggcatgctgagcgccagcgctgagaccctgcctgctggcttccgggtgtccaccctgggcaccctgcagcccccaccagccccacccaagaagatcatgcctgaggcccacagccactacctgtatggccacatgctgagcgccttccgggactag

SEQ ID NO: 286192 - DNA, 2106 bp, Artificial Sequence
  derived and/or modified sequence
atgggcagcgccgccgacgtgcggttcagcctgggcaccaccacccacgcacctcctggcgttcacaggaggtattcggctctccgagaggaatctgccaaagactgggaaacgagtcccttaccaggcatgctggcacctgccgcggggcccgcgtttgactccgaccctgaaatatcagatgtggacgaagatgagcctggtggactcgtgggcagcgcagatgtggtgagcccatcaggtcactccgatgcacagacacttgccatgatgctgcaggagcagctcgatgcaatcaacgaagagatccgaatgatccaggaggagaaggaatccacagagctgcgagcagaggaaatcgagacccgcgtgacgagtgggtctatggaagcactaaacctcaagcagctcagaaaacgaggatctatccccacctctttaacggccctgtctctcgctagtgcctcaccccccctctcaggcaggagtactcccaagttaacttctcgaagtgccgcccaagacttggacaggatgggggttatgacgcttccaagcgatctcagaaaacatcgaagaaaactgctcagtcctgtgagcagagaagagaaccgagaggataaagcaaccataaagtgtgagacctcccccccatcaagtccgcgaacactgaggttggagaaattgggtcacccagctttatcccaagaggaaggcaaatcagctctggaagatcaaggatccaacccgtcctcctctaattcctcacaggatagcctgcacaagggcgctaaaagaaaaggaataaagagctctatcggtcgcctgttcgggaaaaaggagaagggccggctcatccaactgtcacgggatggcgccactggccacgtgcttctgaccgactcagagttttcaatgcaggagcccatggttcctgcaaagttgggaacacaggccgaaaaggaccggagactgaaaaaaaaacaccaactcctagaggacgctaggcgcaagggcatgccgtttgcccagtgggacgggccgacggtggttagttggttggagctctgggtgggaatgccagcctggtacgtggctgcctgtagggctaatgtgaaatccggggctatcatgtctgccctgtccgataccgagattcagcgcgagataggaatcagtaacgccttgcatcgtctgaagctgagattagctatacaggagatggtgagtctgacctcgccgagcgccccccctactagtcgcacttcatccggaaatgtctgggttacgcacgaggagatggagacactagagacgagcacgaagacagatagcgaggagggttcctgggcgcagaccttagcttacggagatatgaatcacgaatggatcgggaacgaatggttgccttccttagggctaccccaatatcggtcctacttcatggaatgcctcgtggacgctagaatgttggatcatctaactaaaaaggacctgagagtccacctgaagatggtagactccttccaccgaacgagcctgcagtacggcatcatgtgtctgaagcgcttgaactacgacaggaaagaactggaaaagaggcgagaggaatcacagcatgaaattaaagatgtcctagtttggaccaatgaccaagtggtgcactgggtgcagtcaatcggcctgagggattatgctggaaacctgcacgaaagtggggtacacggcgcactgctggcactcgatgagaatttcgaccacaacactcttgccctgatcctgcagatcccaacgcagaatacgcaggcccggcaagtaatggagagggagttcaataatcttcttgccctcgggactgatcggaagctggatgatggagatgacaaggtgttccggagggcaccctcttggcgaaagcgtttcaggccccgggagcaccatggtcggggcggaatgctgtctgcttccgctgagactcttccggccgggttccgcgtgagcacccttggaacgctgcagcctcccccagcaccacccaaaaaaattatgcccgaggcccattcccactacctttacggacacatgctttccgcctttagagactag

SEQ ID NO: 286193 - DNA, 2745 bp, Artificial Sequence
  derived and/or modified sequence
atggaggagcggatcaccaccctggagaagcggtacctggccgcccagcgcgaagctacttcaatccatgacctgaatgacaagctcgaaaatgagctggcgaacaaagaaagcctgcatcgccaatgtgaagagaaggcaaggcacctgcaagagctacttgaggtggcggagcagaagctgcagcaaacaatgcgaaaggccgagacactccccgaggtcgaggccgaactggcacagaggatcgccgctctgacaaaggccgaggaacgtcatggcaacatcgaagagcatctgcgacagctcgaggggcagctggaagaaaaaaatcaggagttggctcgtgtacgacagcgtgagaagatgaatgaggatcataataagagactgtccgacaccgtggaccgacttctaagcgagtccaatgagagactgcagttacacttgaaggagcgtatggcggcgttagaggagaaaaatactctcatccaggagctcgaatcttcccagagacaaattgaagagcagcatcaccacaaggggcgcctgtcagaggaaattgaaaagcttaggcaggaggtggaccagctgaaaggaagaggtggcccctttgtcgacggcgtgcattcgcggtcccatatgggatccgcggctgacgtccggttcagtttagggaccacgacacatgcccctcccggggttcatcgacgttatagtgcacttcgggaggagtcagctaaagattgggaaacaagtcctttgccagggatgcttgctcccgcggccggcccagcctttgattctgatccagaaataagcgatgtggatgaagacgaaccagggggacttgtggggtcagctgatgtggttagcccgtcaggccactccgacgcacagactctcgcaatgatgctgcaggagcagcttgacgccattaacgaggagattaggatgattcaggaggaaaaagaatccacggaactccgcgccgaggaaatcgagaccagagtgacctctggtagcatggaggccttgaacttaaagcagttgagaaaacgcgggtctattcccacctccctgacagcactgagcctagcttctgcttcccctccactttccggccgttccacacctaaactaactagccgaagcgctgcacaagatttagacaggatgggtgtgatgacactgcccagcgacttgaggaagcaccgcagaaagctcttatcacctgtgagtcgagaagaaaatagggaggacaaggccacaatcaaatgcgaaacctcacctccatccagccccagaacacttagactggagaagcttggtcaccctgcactgagtcaggaggaaggaaaatccgccctcgaggaccagggctctaacccctcaagttctaacagtagccaagacagtctgcacaaaggcgcgaaacgtaaaggcatcaagagtagcattggccggctcttcggcaagaaagagaagggacgcctgatacaattatctcgggacggagcaacaggtcatgtgctcctgaccgacagtgaatttagcatgcaagaaccaatggttcctgcgaagctcggcacgcaggcagagaaggataggcgtctgaaaaaaaaacatcagctcctcgaagacgcacgcagaaagggcatgcctttcgctcagtgggacgggcccacagtagttagctggttggaactttgggtcggaatgcctgcttggtacgtggcagcctgtagagccaacgtgaagtccggcgcaatcatgagtgcgttgagtgacactgagatacaaagagaaattggtatatccaatgccctacacaggctgaaacttcgtctggctatccaggagatggtcagtctcacctccccctccgccccccccaccagtcgcacctcaagcggaaatgtgtgggtgacgcacgaggaaatggaaactctcgaaacatcaaccaaaaccgactccgaagagggctcatgggcccagacactggcttatggcgacatgaaccatgagtggattggaaacgagtggctgcctagcctgggactcccacaataccgcagctatttcatggaatgtcttgtggacgccaggatgctcgaccatctgacaaagaaagacttacgcgtgcatttgaagatggtggacagctttcataggacatctctgcagtatggaattatgtgtctgaagcgcctgaattatgaccgaaaagagctggaaaagcgaagagaggaaagtcagcatgagataaaggatgtccttgtctggacaaacgaccaagtagtgcactgggtccagtccatcgggctgcgtgattatgccgggaacttacatgaaagcggagtacatggcgccctgctagccctggacgagaatttcgaccataacacactggcccttatacttcaaattccgacccagaacacccaagctaggcaagtcatggagcgagaattcaacaacctcttggcattgggaacggaccgtaagcttgacgacggtgacgataaagtgtttcggagggccccttcttggcggaaaagattccgtcctcgggagcatcatggacggggtggcatgttgtccgcttccgctgaaactctgcctgccggatttagggtgagcacgctgggaacccttcagccacccccagcccctcctaaaaagatcatgcctgaggcccatagccactatctgtatgggcacatgctgagcgcctttcgggattag

SEQ ID NO: 286194 - DNA, 2967 bp, Artificial Sequence
  derived and/or modified sequence
cgtgactgaactcgaggaggacctgggcacggcccgccgggacctcatcaagtcggaggagctgagcagcaagcatcagcgggacctccgggaggctctggcccagaaggaggacatggaagagcggattactacactggagaagcgctacctggctgctcagcgtgaggcaacatccatccatgacctcaatgacaagctggagaatgagctggccaacaaggagtccctgcaccgccagtgtgaggagaaggcccgacacctgcaggagctgctggaggtggcagagcagaagctgcagcagacgatgcgcaaggcagagacgctgccagaggtggaggctgagctggcccagagaattgcagccctcaccaaggctgaagaacggcatggcaacattgaggagcacctgcggcagctggagggacagctggaggagaagaaccaggagctggcacgggtgcgccagcgggaaaagatgaatgaggaccacaacaagcggctgtcggacacagtggaccggctgctcagcgagtccaacgagcgtctgcagctccacctgaaggagcgcatggctgccctggaggagaagaacacgttgatccaggagttggagagctcccagcggcagattgaggagcagcaccaccacaagggccgcctgtctgaagagattgagaagctgcgccaagaggtggaccagctgaagggccgaggggggccgtttgtggatggcgtccactccaggtcgcacatgggcagtgcagcagacgtgcggttctccctgggcacaaccacacacgcacccccaggcgtgcatcgccgctactcggcattgagggaagagtctgccaaggactgggagacttctccactgcctgggatgctggccccggcagctggccctgcctttgacagtgaccctgagatctccgacgtggatgaggatgagccagggggtctggtgggctctgcggatgttgtctcccccagcggccactcagatgcccagaccctggccatgatgctgcaggagcagctggatgccatcaatgaggaaatcaggatgattcaggaagagaaggagtccacggagctccgcgcggaggagattgagacgcgtgtaaccagtggcagcatggaagccctaaacctgaagcagctgcgcaagcgtggttccatccccacctctctgacggccctgtccctggccagcgcgtccccaccactcagcggccgctccacacctaagctcacctcccgcagtgctgcccaggacctggaccgaatgggggtcatgaccctgcccagtgacttaagaaagcataggaggaagctgctgtcgccagtgtctcgggaagagaaccgagaggataaagccaccataaaatgtgagacttctcctccttcctcacccaggacgctgcggctagagaagcttggccacccagccctgagccaggaagaaggcaagagtgccttggaggatcagggcagcaaccccagcagcagcaacagcagccaggactccctgcacaagggcgccaagcgcaagggcatcaagtcgtccattggccgcctgtttgggaagaaggagaagggcaggctgatccagctgagtcgggatggagccacaggccatgttctgctaacagactccgaattcagtatgcaggagcctatggtgcctgccaagctggggacccaggcagagaaggaccggcggctaaagaagaaacaccagctgcttgaagatgcccgcaggaaaggaatgccctttgcccagtgggatggtcctactgtggtctcctggttggagctctgggtggggatgcctgcctggtatgtggcagcctgccgggccaacgtcaagagtggtgccatcatgtccgctctgtcggacacagagatccagcgggagatcggcatcagcaatgccctgcaccggctcaagctccgcctggccattcaggagatggtgtcattgaccagcccctctgccccacccacctccaggacttcttctgggaatgtctgggtcacccatgaagagatggaaactctggaaacatctactaaaacagacagtgaggagggcagctgggctcagaccctggcctatggggacatgaaccatgagtggattgggaatgaatggctacccagcctggggctcccgcagtaccgcagctacttcatggagtgcctggtggacgcccgcatgctggaccacctcaccaagaaggacctgcgggtccacctgaagatggtggacagcttccatcgaaccagtcttcagtatggcatcatgtgtctgaagaggctgaattatgaccggaaggagctggagaagaggcgagaggagagccagcatgagatcaaggatgtgttagtctggaccaacgaccaggtggttcattgggtccagtctattgggctccgggactacgcaggaaacctgcatgagagtggtgtgcatggagccttgctggccctggacgagaacttcgaccacaacacactggccctgatcctccagatccccacacagaacacccaggcacgccaagtgatggaaagagagttcaataacctgttggccttgggcacagaccggaagctggatgacggggatgacaaggtgtttcgccgcgcgccctcctggaggaagcgcttccggccgcgggagcaccacggtcgcggcggcatgctcagcgcttccgcggagaccctcccggcgggcttccgtgtgtccaccctggggaccctgcagcccccaccggccccgccaaagaagatcatgcctgaagctcactcccactatctctacggacacatgctctccgccttccgggactagccatggcccccagggctggcttcctccttctgggtttcacaggctcctctggccctgacccctcttgctcgttccccttccttccgcagctcctagtctcgtccgtg

SEQ ID NO: 286195 - DNA, 2106 bp, Artificial Sequence
  derived and/or modified sequence
atgggctcggccgcagatgtgaggttctcccttgggacaaccacacacgcgcctcctggcgtccacaggcgctacagcgcactccgggaagagagtgccaaggattgggagacctcgccactgcccggaatgcttgcccctgcagcagggccagcttttgactcggatccagaaattagcgacgtggacgaagatgagcctggagggttggtcggcagcgcagacgttgtctccccctcgggccactccgatgctcagaccttagctatgatgctccaggagcagttagatgctatcaatgaggagattagaatgatccaggaggaaaaggagtctacagaactgagggctgaagaaattgagacacgggtaactagcggctccatggaggcgctcaatctgaagcagcttagaaagagaggttccatacctacatctctgactgcattatcactcgcttctgcatcgccaccactctctggacgttccacgcctaaactgaccagccggtccgctgctcaggacctggacagaatgggagttatgacgctgccgtcagatttgcggaaacaccgtagaaagctgctgtcaccagtctcccgggaggagaatagggaagataaagcaacaatcaagtgtgagacctcgcccccatcatcccctaggaccctgaggttggaaaagctggggcaccctgctctgtctcaagaggaagggaaaagcgctctggaggatcaggggtccaatcctagctcctctaactcctctcaagattcgctccacaaaggggctaaacggaaaggaatcaagtcttccataggtcgcctgtttggaaaaaaagagaaagggcgattaatccagttatccagggacggcgctaccgggcacgtacttctcactgacagtgagttctccatgcaggagcctatggtgcccgcaaaactgggaacgcaggctgagaaggatagacgcttaaaaaagaagcaccagttactggaagacgcacgcagaaagggtatgcccttcgctcagtgggacggacctacagtggtaagttggttggaactctgggtcgggatgcccgcatggtacgtggccgcatgtcgtgctaacgtaaaatcaggggctatcatgtctgccctgtccgacaccgaaattcagagagaaattgggattagcaatgctctgcacagattgaaacttcggttggccatacaggagatggtgtccctcacctcaccttccgcccctcctacatctaggacttcttccgggaatgtttgggtgacacacgaggagatggaaactctagagacctccactaaaaccgacagcgaagaaggtagttgggctcagacgctagcctatggggatatgaatcacgagtggataggaaatgagtggctgcccagcctgggtctgccccagtatcgatcctacttcatggaatgtcttgtggacgctcgcatgctggaccatctcaccaaaaaagatcttagggtccacctgaagatggtcgattcattccaccggacaagtctgcaatacggcataatgtgcttgaagcgcctgaattacgaccgaaaagagctggaaaagagacgggaagaatctcagcacgagattaaagacgtgctggtgtggaccaacgaccaagtggtgcactgggtccagtcgatcggcctcagagactacgctggtaacttacatgagtccggcgtgcatggtgcactgttggcactggacgagaactttgatcacaatactcttgcactcatcttgcagattcctacccagaatacacaagcgaggcaggttatggagagggagttcaataacttattagcgctcggaacggaccggaaactcgatgacggagatgataaggtgttcagacgagcaccttcgtggcgtaaacgttttagaccaagagaacatcatggtcggggaggaatgctgtccgcctctgccgaaacccttccagctggtttccgcgtttctaccttaggaactctccagcccccaccggcacctccaaaaaaaatcatgccggaagcacattcccattacctgtacggccacatgctcagcgcctttagagattag

SEQ ID NO: 286196 - DNA, 2745 bp, Artificial Sequence
  derived and/or modified sequence
atggaggagagaatcaccactctcgaaaagaggtatttagccgctcagcgagaggctaccagcatccatgatctgaacgacaaactcgagaatgagctcgcaaacaaagaaagtctccacaggcagtgcgaagaaaaggcccgacatctgcaggagctgctcgaggtcgcggagcagaaattacagcagacaatgaggaaagcagaaacattacctgaagtagaagccgagctcgcgcagagaatcgccgcacttaccaaggcagaagagaggcacgggaacattgaagaacatcttcgccagttggagggccagctcgaggagaagaaccaggaattggcccgagttcgccagagagaaaaaatgaatgaggaccataataaacgcctctccgatactgtggaccgcttgcttagcgagtccaacgagagactacagctacatttaaaagagcgcatggccgctctcgaagaaaaaaacaccctgatacaggagttagagagttcacagcggcaaatcgaggagcaacaccaccacaaaggcaggctatcagaggagatcgagaagctacgacaagaagtggatcagctaaagggaagagggggacccttcgttgacggagtccatagccgatcacacatgggttccgccgctgatgttcggttttctctcgggactacaacacatgccccaccaggcgtgcatcgcagatacagtgcccttcgagaagagagcgctaaggattgggagacgtcccccctaccgggaatgcttgcccctgctgctggtcctgcctttgactccgaccccgaaattagtgatgtggacgaggatgaacctggtggcctagtggggtctgctgatgtggtttcaccgtccgggcactcagacgcacaaactctggccatgatgctgcaggagcaactggatgccattaatgaagagattagaatgatccaagaagagaaagagtccacagagctccgggcagaagaaattgaaacccgagtaacttccgggtctatggaggctcttaatctgaagcagctcagaaagcgaggatcaattcctactagcctcacagccctcagtttggctagtgcatcacctcctcttagcggccgaagcacgcccaaactgacgtccagaagtgccgcacaggatttggaccgcatgggggttatgaccctcccctctgacctgcgaaagcaccgcaggaagttactctcaccagtgtcacgcgaggagaacagggaggacaaggccactattaaatgcgaaacatcaccaccctcctctccgagaacattgcgtttagaaaaactgggacatcccgctctgtctcaagaagaggggaaaagcgccctggaggaccaaggaagcaatccaagctccagcaactcttctcaggactctctgcacaagggagccaagagaaagggaattaagtcaagcataggtcgtttattcgggaagaaagagaaggggaggctaattcagctgtcacgggatggagccaccggccacgtgttactgacagattcagaattttccatgcaggaacccatggtgcccgcaaagcttggtacacaggcagagaaggaccggaggttgaaaaagaagcaccaattgctcgaggatgcccgaagaaagggtatgcccttcgctcagtgggatggccctaccgtggttagctggttggagctatgggtgggcatgcctgcatggtacgtagccgcatgtcgcgctaacgtgaaatcgggtgctatcatgtctgcactaagtgatactgagatacagagagagatagggataagtaacgcactccatcggcttaaactgcgcctggctattcaagaaatggtctctctgacatccccctcagcccctcctacgagtagaacaagtagtgggaacgtgtgggtaacccatgaggagatggagaccctcgagacaagcactaagaccgatagtgaggagggttcatgggctcagaccctggcctacggcgacatgaaccacgagtggatcggcaacgagtggctgccttcattgggtttgccccaataccgatcgtacttcatggaatgcctggtggacgcaaggatgctggatcatctgaccaaaaaggaccttcgggttcaccttaagatggtcgactcctttcaccgcacttccctacagtacggaatcatgtgcctcaaaagactgaactacgacaggaaagaactagagaagcggagggaagagtctcaacacgagataaaggacgtgctggtgtggacaaatgaccaagtggtccactgggttcagtccattggccttcgcgactacgctgggaacctgcatgaatccggggtccatggggctctccttgcattggacgaaaatttcgaccataatacgctggctctaatactccagatccctacacagaacactcaggccagacaggtgatggagcgggagttcaataacctgctggcccttggaaccgacagaaaacttgatgacggggatgacaaggttttcaggcgagcgccttcgtggcgcaagcgttttcgcccacgcgaacatcacgggagaggcggtatgctgtccgcctctgcagaaacactgcccgctgggtttcgagtcagcaccttgggaaccttgcaaccaccaccggctcctcctaagaaaatcatgcctgaagctcattcccattacctctatggacatatgctgtcagccttccgtgattag

SEQ ID NO: 286197 - DNA, 5045 bp, Artificial Sequence
  derived and/or modified sequence
attttctctggcttgtgtttctgacagtgttagggcctcctaaagcttcctaggcataggggtatgcctggcttgaattttaaccagggactcagtccagattatggggagacccgaggaaaagtgctgggtagaagaccaaaaaacaaagaccctcagagtgaaaagggcctctagacatcatcccttccaacatctcccagtgcctggagccctcctgcgccacgtgtgtcagatggccggagagcctctgctcgaatacctctttgatggggagctcaactttttaaaagccaccagttgcatcgtaagccaactcttgccattagaagatccttcttatgccagacggaaaaccgctctctggaactttctcccctggctcattctgacccctggagcaccagggcatacgtctgctctcttgcttacacggcagcccttcagacatttgtgacagctctgtgtcctgctaagatgtctcttctctgagctgaagatcccttgactctttgggcccactgggtgtgagctgggggtctcagtcctcagggcctgtcttttctctcccccatcaccgctcaaggtcgcacatgggcagtgcagcagacgtgcggttctccctgggcacaaccacacacgcacccccaggcgtgcatcgccgctactcggcattgagggaagagtctgccaaggactgggagacttctccactgcctgggatgctggccccggcagctggccctgcctttgacagtgaccctgagatctccgacgtggatgaggatgagccagggggtctggtgggctctgcggatgttgtctcccccagcggccactcagatgcccagaccctggccatgatgctgcaggagcagctggatgccatcaatgaggaaatcaggatgattcaggaagagaaggagtccacggagctccgcgcggaggagattgagacgcgtgtaaccagtggcagcatggaagccctaaacctgaagcagctgcgcaagcgtggttccatccccacctctctgacggccctgtccctggccagcgcgtccccaccactcagcggccgctccacacctaagctcacctcccgcagtgctgcccaggacctggaccgaatgggggtcatgaccctgcccagtgacttaagaaagcataggaggaagctgctgtcgccagtgtctcgggaagagaaccgagaggataaagccaccataaaatgtgagacttctcctccttcctcacccaggacgctgcggctagagaagcttggccacccagccctgagccaggaagaaggcaagagtgccttggaggatcagggcagcaaccccagcagcagcaacagcagccaggactccctgcacaagggcgccaagcgcaagggcatcaagtcgtccattggccgcctgtttgggaagaaggagaagggcaggctgatccagctgagtcgggatggagccacaggccatgttctgctaacagactccgaattcagtatgcaggagcctatggtgcctgccaagctggggacccaggcagagaaggaccggcggctaaagaagaaacaccagctgcttgaagatgcccgcaggaaaggaatgccctttgcccagtgggatggtcctactgtggtctcctggttggagctctgggtggggatgcctgcctggtatgtggcagcctgccgggccaacgtcaagagtggtgccatcatgtccgctctgtcggacacagagatccagcgggagatcggcatcagcaatgccctgcaccggctcaagctccgcctggccattcaggagatggtgtcattgaccagcccctctgccccacccacctccaggacttcttctgggaatgtctgggtcacccatgaagagatggaaactctggaaacatctactaaaacagacagtgaggagggcagctgggctcagaccctggcctatggggacatgaaccatgagtggattgggaatgaatggctacccagcctggggctcccgcagtaccgcagctacttcatggagtgcctggtggacgcccgcatgctggaccacctcaccaagaaggacctgcgggtccacctgaagatggtggacagcttccatcgaaccagtcttcagtatggcatcatgtgtctgaagaggctgaattatgaccggaaggagctggagaagaggcgagaggagagccagcatgagatcaaggatgtgttagtctggaccaacgaccaggtggttcattgggtccagtctattgggctccgggactacgcaggaaacctgcatgagagtggtgtgcatggagccttgctggccctggacgagaacttcgaccacaacacactggccctgatcctccagatccccacacagaacacccaggcacgccaagtgatggaaagagagttcaataacctgttggccttgggcacagaccggaagctggatgacggggatgacaaggtgtttcgccgcgcgccctcctggaggaagcgcttccggccgcgggagcaccacggtcgcggcggcatgctcagcgcttccgcggagaccctcccggcgggcttccgtgtgtccaccctggggaccctgcagcccccaccggccccgccaaagaagatcatgcctgaagctcactcccactatctctacggacacatgctctccgccttccgggactagccatggcccccagggctggcttcctccttctgggtttcacaggctcctctggccctgacccctcttgctcgttccccttccttccgcagctcctagtctcgtccgtgactttccggttgccctggatctcagaatatattcgtccaccccctcggcaccccattaccccgagtcccaccgtgtgtccgttgtaagtccggtggatgtggctggggtttcctggtattgtggaggcacccaggttgtccatgcttgggattctgggggaaggagagaagggcagctcagggtggatgtgaagccacccttcctcttctggacccagcctggtctgcactgcaacctccaccaggaccaggatcctgggccacaggctgggatggtccttccaagaaagggtcatttcagacgcagccctgcttgggctattcaatcttagggtgtctatccacgtctggctgtgccaaatggtctggcagctggttttggcatccccagcatcaccactctcccaacccatcaccgtgactgcagttcctgcccccattctcttggggtcagggaggggctgggaagggctactgaaggccccattctcccacaggatggtgaggctgggaggaggaagactgaggtagagattccaggccctggcataagctgaatcccaaatttgagtttgggaagaaccagagagaaatggatccctgagctctgagccaagggtgaggatggggaaactctaagctcccacctaataagaagcataggcagaccagccagagggagagccaatggcctctggtagccttaagcccaaagggcagtgggaatgtcccctgccccaaccatcgggtggagctcctgctgggctatggggaagggaggttgtgcggatcttgactctagggcagaacagatctaaccatgcattgctagctctgctcccagcatcccttccccttctctcctcctctgcctcacttctttagtaatcccaaccctataaaaatgaacctaatgggtggattgaatatacattgagcccaaagtcaagtttggggaaaaggcagactaaggcctcctttctctgacctcccaggaagaaaatagcttctcctacagtgattcatgtcccaggtccaggaaatccaatgttggtgaaggcagccactctcttgcttgtccccaaatcacctaaccctcatccagggctattttggtgggcagggactgcctcctcccggaattcctaagatccgcccagctgccaccattttcattgctttccccagcagcatgatgggaacccaagctgagggatacaggtcctgatttggtaggaatattattcccaagaaatacccgctcctcacctactccctcatcctaccaaggtgcctgaaaatgttcaagacttatgttcagggtgggatgatggaaccgagggcttcatcaaagtgagaggaaaggaaaagcatctggcatgtgtttcttggataggggccagtgcagtgccatcctacaggtggctggagcagctgctttgcaacctgatcaccttgagttctgagcagggactaggcttgcaggtgagataatgggccagggcacccagtccagaaggagcaatggcacctgggcagtgccagggcttaaagcccgctgctccttttcggtagaggagaggcccatcactggtgtggtggggtgggctctcccttaggcttgggcaaggcagccacctgcccttgctctcccttagtgttccctggcctccctgccatcaggttgctgggagtggagatggagggattattgagcagaaaatgagttggatggagataaacagctcccatccctgggtaatggatggtaagatgatggagattcctaagattggtggagttgggcaatgcatagccatctgactccttcagggtgctcttgatgggctggctgtaagggagactcagtcccagcctctcccctctacaactcctgccactgttggccatgtcgtaaggcagcagctgtgccaggatagctgggtccattcagagcaccttgagaagtgttgcagggaggtgttaagaagagaactctgtgcaaacagtgatggaaggctgttgtcttggtgtatcccttgcctcatagtcaatatattttttttttggcgagtcaccagtgacccgagccctccacaccagcctcctgtatctcatcaggtcccttctcagtactgtatttgctcagtgcatcaggaatgggtgtatgggtgtgtgtgggtgggtgtgagtgtgggtgtgtacgtaccaataaacaacctggttttaagacaatgta

SEQ ID NO: 286198 - DNA, 2106 bp, Artificial Sequence
  derived and/or modified sequence
atgggcagcgccgccgacgtgagattcagcctgggcaccaccacccacgccccccccggcgtgcacagaagatacagcgccctgagagaggagagcgccaaggactgggagaccagccccctgcccggcatgctggcccccgccgccggccccgccttcgacagcgaccccgagatcagcgacgtggacgaggacgagcccggcggcctggtgggcagcgccgacgtggtgagccccagcggccacagcgacgcccagaccctggccatgatgctgcaggagcagctggacgccatcaacgaggagatcagaatgatccaggaggagaaggagagcaccgagctgagagccgaggagatcgagaccagagtgaccagcggcagcatggaggccctgaacctgaagcagctgagaaagagaggcagcatccccaccagcctgaccgccctgagcctggccagcgccagcccccccctgagcggcagaagcacccccaagctgaccagcagaagcgccgcccaggacctggacagaatgggcgtgatgaccctgcccagcgacctgagaaagcacagaagaaagctgctgagccccgtgagcagagaggagaacagagaggacaaggccaccatcaagtgcgagaccagcccccccagcagccccagaaccctgagactggagaagctgggccaccccgccctgagccaggaggagggcaagagcgccctggaggaccagggcagcaaccccagcagcagcaacagcagccaggacagcctgcacaagggcgccaagagaaagggcatcaagagcagcatcggcagactgttcggcaagaaggagaagggcagactgatccagctgagcagagacggcgccaccggccacgtgctgctgaccgacagcgagttcagcatgcaggagcccatggtgcccgccaagctgggcacccaggccgagaaggacagaagactgaagaagaagcaccagctgctggaggacgccagaagaaagggcatgcccttcgcccagtgggacggccccaccgtggtgagctggctggagctgtgggtgggcatgcccgcctggtacgtggccgcctgcagagccaacgtgaagagcggcgccatcatgagcgccctgagcgacaccgagatccagagagagatcggcatcagcaacgccctgcacagactgaagctgagactggccatccaggagatggtgagcctgaccagccccagcgccccccccaccagcagaaccagcagcggcaacgtgtgggtgacccacgaggagatggagaccctggagaccagcaccaagaccgacagcgaggagggcagctgggcccagaccctggcctacggcgacatgaaccacgagtggatcggcaacgagtggctgcccagcctgggcctgccccagtacagaagctacttcatggagtgcctggtggacgccagaatgctggaccacctgaccaagaaggacctgagagtgcacctgaagatggtggacagcttccacagaaccagcctgcagtacggcatcatgtgcctgaagagactgaactacgacagaaaggagctggagaagagaagagaggagagccagcacgagatcaaggacgtgctggtgtggaccaacgaccaggtggtgcactgggtgcagagcatcggcctgagagactacgccggcaacctgcacgagagcggcgtgcacggcgccctgctggccctggacgagaacttcgaccacaacaccctggccctgatcctgcagatccccacccagaacacccaggccagacaggtgatggagagagagttcaacaacctgctggccctgggcaccgacagaaagctggacgacggcgacgacaaggtgttcagaagagcccccagctggagaaagagattcagacccagagagcaccacggcagaggcggcatgctgagcgccagcgccgagaccctgcccgccggcttcagagtgagcaccctgggcaccctgcagcccccccccgccccccccaagaagatcatgcccgaggcccacagccactacctgtacggccacatgctgagcgccttcagagactag

SEQ ID NO: 286199 - DNA, 2079 bp, Artificial Sequence
  derived and/or modified sequence
atgggaagcgccgctgacgtccgctttagcttgggcaccaccacacacgccccccccggcgtacacagacggtattcagctctccgagaggaaagtgccaaggattgggaaacatcccccctgccgggtatgctagccccagccgccggtcccgctttcgattccgatcccgagatttccgatgttgacgaggacgaacccggaggcctggttggtagcgccgatgttgtgagtcccagcggacactctgacgcacagacgttagccatgatgttacaggaacaattggatgcgataaacgaggaaatcaggatgatacaggaggagaaagaatcaacagaactaagagcagaagagatcgaaacacgggtgacctctggatcaatggaagcccttaacctgaaacaactgcggaagcgcggaagcattcccacatctctgacagcactctcgctcgcttcagcatcccctccactgagcggccgtagtacccccaaactcactagcaggtctgccgcccaggacttggacagaatgggagtcatgacgttaccaagcgatttaaggaaacaccggcgcaagctgctcagccccgttagcagggaggagaatagagaggacaaggcaactattaaatgcgagacttcccctccatctagtccccgcaccctacggctggagaaactgggccaccccgccctctcccaggaagagggaaagagcgcattggaagaccagggctcaaacccttcgtcttccaacagctcacaggattcactgcacaagggggcaaagcggaagggtatcaagtctagtataggccggctcttcgggaagaaggagaaggggagactgatccagttgtcaagagacggcgccacaggccacgttctgctgactgactcagaatttagcatgcaggagcccatggttcccgcaaagctgggtactcaggccgagaaagacaggcgcctgaagaaaaaacaccagctgcttgaagacgcccggcgaaaggggatgcccttcgctcagtgggatggtcccaccgtggtctcctggctggaactgtgggtcgggatgcccgcttggtatgtggcagcctgtcgagctaacgtaaagtcaggggcaatcatgtctgctctgtcagatactgagattcagagggaaataggcatcagcaacgctctccatagactgaagcttcggctcgctattcaggaaatggtttctctcacatccccatctgcccccccaacctcccggacctcatcagggaatgtttgggtgacacacgaggagatggaaacgctggaaacctcaaccaaaacaacgctggcatatggggacatgaatcacgagtggatcggcaatgagtggctaccatctttgggccttccccaatacagaagctattttatggaatgcctcgtcgacgccagaatgcttgaccacctgacgaagaaagatctgcgggtacacctgaagatggtagacagtttccaccggacgagccttcagtatggaataatgtgcctcaaaaggttaaactatgaccggaaggaacttgaaaaaaggagggaagagagtcagcacgagattaaagacgtgctcgtgtggacaaacgatcaggtggtgcactgggtacagagcatcggactgcgggactatgcaggcaacctacatgagagtggagtacatggggccctgctagccctggacgaaaactttgatcacaatacactggctctgatcctacaaataccaacacaaaacacccaagcccgtcaagtgatggagagagagttcaataatttactggcgctcggtaccgatcgtaaactcgacgacggggatgataaggtgtttcgacgagctcccagttggagaaaaaggtttagaccacgagaacaccacgggagaggaggcatgttgagcgcttctgccgagacattgcccgctggtttccgagtgtctaccctaggtacgctccagccacctcctgcacccccaaaaaaaataatgcctgaggcgcactctcactatctgtacggacacatgttgagcgcattccgggactag

SEQ ID NO: 286200 - DNA, 2079 bp, Artificial Sequence
  derived and/or modified sequence
atgggcagcgctgctgatgtgcgcttcagcctgggcaccaccacccacgcccctcctggggtgcaccggcgctacagcgccctgcgggaggagagcgccaaggactgggagaccagccccctgcccggcatgctggccccagctgctggccctgcctttgacagcgaccctgagatcagtgatgtggatgaagatgagcccggcggcctggtgggcagcgcagatgtggtgagccccagcggccacagtgatgcccagaccctggccatgatgctgcaggagcagctggatgccatcaatgaggagatccgcatgatccaggaggagaaggagagcacagagctgcgggcagaggagattgagaccagggtgaccagcggctccatggaggccctgaacctgaagcagctgaggaagaggggcagcatccccaccagcctgacagccctgagcctggccagcgccagcccccccctgagcggccgcagcacccccaagctgaccagccgctctgctgcccaggacctggacaggatgggcgtgatgaccctgcccagcgacctgaggaagcacaggaggaagctgctgagccctgtgtcccgggaggagaaccgggaggacaaggccaccatcaagtgtgagaccagcccccccagcagccccaggaccctgcggctggagaagctgggccacccagccctgagccaggaggagggcaagagcgccctggaggaccagggcagcaaccccagcagcagcaacagcagccaggacagcctgcacaagggggccaagaggaagggcatcaagagcagcatcggccgcctgtttgggaagaaggagaagggccgcctcatccagctgagcagagatggagccaccggccacgtgctgctgacagacagcgagttctccatgcaggagcccatggtgcctgccaagctgggcacccaggccgagaaggaccggcggctgaagaagaagcaccagctgctggaggatgcccggaggaagggcatgccctttgcccagtgggatggccccaccgtggtgtcctggctggagctgtgggtgggcatgcctgcctggtacgtggccgcctgccgggccaacgtgaagagcggggccatcatgtctgccctgagtgacacagagatccagcgggagatcggcatcagcaatgccctgcaccggctgaagctgcggctggccatccaggagatggtgtccctgaccagccccagcgccccacccaccagcaggaccagcagtggaaatgtgtgggtgacccatgaggagatggagaccctggagaccagcaccaagaccaccctggcctatggagacatgaaccacgagtggattggaaatgagtggctgcccagcctgggcctgccccagtaccgcagctacttcatggagtgcctggtggatgccaggatgctggaccacctgaccaagaaggacctgcgggtgcacctgaagatggtggacagcttccacaggaccagcctgcagtatggcatcatgtgcctgaagaggctgaactatgacaggaaggagctggagaagagaagagaggagagccagcacgagatcaaggatgtgctggtgtggaccaatgaccaggtggtgcactgggtgcagagcatcggcctgcgggactatgccggcaacctgcatgaaagtggagtgcacggggccctgctggccctggatgagaactttgaccacaacaccctggccctgatcctgcagatccccacccagaacacccaggcccggcaggtgatggagcgggagttcaacaacctgctggccctgggcacagacaggaagctggatgatggagatgacaaggtgttcagaagagcccccagctggaggaagcgcttccggccccgggagcaccacggccggggcggcatgctgagcgccagcgctgagaccctgcctgctggcttccgggtgtccaccctgggcaccctgcagcccccaccagccccacccaagaagatcatgcctgaggcccacagccactacctgtatggccacatgctgagcgccttccgggactag

SEQ ID NO: 286201 - DNA, 2079 bp, Artificial Sequence
  derived and/or modified sequence
atgggcagcgccgccgacgtgcggttcagcctgggcaccaccacccacgcacctcccggggttcatagacggtacagcgctttgagggaagagtcggcaaaggattgggaaacgagccctctgcctggaatgctggcccctgctgcaggtcctgccttcgacagtgatcctgaaatatcagacgtagatgaagatgagccaggggggctggtcggtagcgctgatgtcgtcagtcccagcgggcacagcgatgcccagacgctggcaatgatgcttcaggaacagttagacgctatcaatgaagagattagaatgattcaggaagagaaagagagcactgaattaagagctgaagagatagaaactcgtgttacgtccggaagtatggaggccctcaatctaaagcaactgaggaagagaggctccattcccaccagcctcacagctctttccctggcaagcgcgagcccacccctctctggtcggtcaacccctaagctaactagtcgctccgctgcccaggacttggatcgtatgggggtgatgaccctcccaagcgatctgcgcaagcacagaagaaaattgctgtcccccgtgagcagggaggagaaccgtgaggacaaggccaccatcaaatgtgagaccagccctccttcatctccaaggaccctgagactggaaaagcttggccaccctgccttaagccaggaagagggcaagtccgcactcgaagatcaagggtcaaatccttcctccagcaatagtagccaggactctctgcacaagggcgctaaacgcaagggtatcaaatcctcaatcggacgtttatttggcaagaaagagaaaggccggctgatccagctctctagagacggagcgactggtcatgtgttattaacagacagcgaattctccatgcaagagcctatggtgcccgcaaaactgggaacccaggccgagaaagacaggcgccttaagaaaaagcatcagttgctggaagacgcccgtcgcaaaggcatgccatttgcccaatgggatggacccacagtagtaagttggttggagctatgggtcgggatgcctgcctggtatgtggctgcatgccgagccaacgtgaagagcggcgctattatgtccgctcttagcgataccgaaattcagcgcgagatcggcatatccaacgccctccaccggctgaagttgcggctcgcaattcaggagatggtcagtctgacttctccctccgctccccctacttctcgcacctcatccgggaacgtgtgggtcacccacgaagaaatggagaccctggagacgtccactaaaaccactctggcctacggggatatgaatcacgagtggatagggaatgaatggctcccaagcctcggcttgccgcaatacaggtcttattttatggagtgccttgtggacgctagaatgctcgaccacctgactaagaaagaccttagagtgcacctgaaaatggtagattcctttcataggacctctttacagtatggaattatgtgtctgaagcggcttaattacgatcggaaggaactcgagaaaaggcgggaggagagccagcacgagatcaaggatgtcctggtgtggacgaatgatcaggtggttcactgggtccagtcgattggtcttagagactatgctggaaatttgcacgaatcaggagtccacggggccctgttagccttggacgagaacttcgatcacaataccctggctctgatcttacagataccaacccagaatactcaggcacgccaggtgatggaacgcgagtttaacaatctgctcgcccttggaacagaccggaagttagatgatggcgatgacaaggtatttagaagggcgcctagttggcgcaaacgcttccgaccccgagaacatcatggccgcggcgggatgctttccgcgagtgccgaaacactgccagctgggtttcgagtgtcaactttaggaactttgcagccaccacccgcacctcccaaaaaaattatgcctgaggcgcacagtcactatctgtatggccatatgctgtccgcgttcagagactag

SEQ ID NO: 286202 - DNA, 2079 bp, Artificial Sequence
  derived and/or modified sequence
atgggcagcgctgcagacgtaaggttcagtctaggcaccactactcatgctcccccaggggtacacagaagatactccgcactgagggaagagtcagccaaagactgggaaacaagccccctgcccggaatgctggccccagccgctggaccagcttttgactcggacccggagattagtgatgtcgatgaagatgaacctggtggtcttgtcggctctgcagatgtcgtttccccaagcgggcattcagacgcccagacacttgctatgatgttgcaggaacagttggacgccataaacgaggagatccgtatgatacaggaagagaaagaatcgactgaactccgagccgaggagattgagacgagggtgacttcaggcagcatggaggctctcaacctgaagcaactgcgcaaacgaggcagcattcccacatccctcacagcgctgtccctggcctctgcgtcgccacctctgagtgggagatctacccccaaattaactagccgttcggcggctcaggacctggataggatgggcgttatgacattaccttccgatttgcggaaacataggcgtaagttattatccccagtctcccgggaggagaaccgggaggataaggccaccatcaaatgtgaaaccagtcccccttcgtctcccaggacacttaggcttgagaagctgggccaccctgccctttcccaggaagagggcaagagtgcactggaagatcagggctccaacccttctagctccaactcgtctcaggacagtctgcataaaggagccaagcgaaaaggcatcaagtcatccattggcagattgtttggcaagaaagagaaaggcagattgattcagttgtcccgcgatggcgcaaccgggcatgtcctgttaactgacagtgaattttcaatgcaggaaccaatggtgccggcaaagctcggcacccaagccgagaaagatcgtagattaaagaagaaacaccagctgctcgaggacgcacgtcgcaagggcatgcctttcgcacaatgggatggccctaccgtggttagctggttagaattatgggtgggcatgccagcatggtatgttgccgcttgtcgggctaacgtgaagtcaggcgcaataatgagcgcgctgagcgatactgagatacaaagagagatcggcatttctaatgccctacatcgactcaagctgcgtctcgccattcaggaaatggtgtccctgacctctccatcagcccctccaacttcccgcacctctagtggcaatgtgtgggttacccacgaagagatggagactttagaaacaagcaccaaaaccacgctggcttatggcgacatgaaccacgaatggatcggaaacgagtggctgccgagcctgggcctccctcagtatagatcttactttatggagtgcctggtcgacgcacgcatgctggatcatctgacgaagaaagatctacgagtgcacctaaagatggttgactcttttcacagaacttcgctgcagtacggaatcatgtgtctcaagaggctaaattatgatcgaaaagagcttgaaaaaaggcgggaagagagccagcacgaaatcaaggacgtattagtgtggacaaatgatcaagtagtgcactgggtccagagcatcgggctccgcgactacgctggcaaccttcatgaatctggcgtccacggcgctctgttggctttagacgaaaacttcgatcacaatacactggccttgatcctgcagattcctacccagaatactcaggctagacaagtaatggagcgtgagttcaacaatcttttagccctgggtaccgaccggaaacttgacgacggtgacgataaggtctttagaagggcgccttcttggcggaagcgctttagaccgcgagaacatcacgggaggggcggaatgcttagcgcaagtgcagaaactctgcctgcaggattcagagtcagtaccttggggacccttcaacctcccccagctccaccgaagaagattatgcctgaagctcacagccactatttgtacgggcatatgctgtctgcgttcagggactag

SEQ ID NO: 286203 - DNA, 2079 bp, Artificial Sequence
  derived and/or modified sequence
atgggcagcgccgccgacgtgagattcagcctgggcaccaccacccacgccccccccggcgtgcacagaagatacagcgccctgagagaggagagcgccaaggactgggagaccagccccctgcccggcatgctggcccccgccgccggccccgccttcgacagcgaccccgagatcagcgacgtggacgaggacgagcccggcggcctggtgggcagcgccgacgtggtgagccccagcggccacagcgacgcccagaccctggccatgatgctgcaggagcagctggacgccatcaacgaggagatcagaatgatccaggaggagaaggagagcaccgagctgagagccgaggagatcgagaccagagtgaccagcggcagcatggaggccctgaacctgaagcagctgagaaagagaggcagcatccccaccagcctgaccgccctgagcctggccagcgccagcccccccctgagcggcagaagcacccccaagctgaccagcagaagcgccgcccaggacctggacagaatgggcgtgatgaccctgcccagcgacctgagaaagcacagaagaaagctgctgagccccgtgagcagagaggagaacagagaggacaaggccaccatcaagtgcgagaccagcccccccagcagccccagaaccctgagactggagaagctgggccaccccgccctgagccaggaggagggcaagagcgccctggaggaccagggcagcaaccccagcagcagcaacagcagccaggacagcctgcacaagggcgccaagagaaagggcatcaagagcagcatcggcagactgttcggcaagaaggagaagggcagactgatccagctgagcagagacggcgccaccggccacgtgctgctgaccgacagcgagttcagcatgcaggagcccatggtgcccgccaagctgggcacccaggccgagaaggacagaagactgaagaagaagcaccagctgctggaggacgccagaagaaagggcatgcccttcgcccagtgggacggccccaccgtggtgagctggctggagctgtgggtgggcatgcccgcctggtacgtggccgcctgcagagccaacgtgaagagcggcgccatcatgagcgccctgagcgacaccgagatccagagagagatcggcatcagcaacgccctgcacagactgaagctgagactggccatccaggagatggtgagcctgaccagccccagcgccccccccaccagcagaaccagcagcggcaacgtgtgggtgacccacgaggagatggagaccctggagaccagcaccaagaccaccctggcctacggcgacatgaaccacgagtggatcggcaacgagtggctgcccagcctgggcctgccccagtacagaagctacttcatggagtgcctggtggacgccagaatgctggaccacctgaccaagaaggacctgagagtgcacctgaagatggtggacagcttccacagaaccagcctgcagtacggcatcatgtgcctgaagagactgaactacgacagaaaggagctggagaagagaagagaggagagccagcacgagatcaaggacgtgctggtgtggaccaacgaccaggtggtgcactgggtgcagagcatcggcctgagagactacgccggcaacctgcacgagagcggcgtgcacggcgccctgctggccctggacgagaacttcgaccacaacaccctggccctgatcctgcagatccccacccagaacacccaggccagacaggtgatggagagagagttcaacaacctgctggccctgggcaccgacagaaagctggacgacggcgacgacaaggtgttcagaagagcccccagctggagaaagagattcagacccagagagcaccacggcagaggcggcatgctgagcgccagcgccgagaccctgcccgccggcttcagagtgagcaccctgggcaccctgcagcccccccccgccccccccaagaagatcatgcccgaggcccacagccactacctgtacggccacatgctgagcgccttcagagactag

SEQ ID NO: 286204 - DNA, 189 bp, Artificial Sequence
  derived and/or modified sequence
tagggttatcattgtctgccggcgcccaaccgggcccagggagaagttggcggtgatggtgggtccgttcaattcggtggcagtgtcaaaacctcttcagcactgagggaggagcaggaagcgcagtgggagaattggccaaaatccggggttctgactactgcaccaggcttcttcttgggacgatag

SEQ ID NO: 286205 - DNA, 189 bp, Artificial Sequence
  derived and/or modified sequence
tgaggctaccactgcctgcccgcccccaaccgggcccagggcgaggtcggcggcgatggtggttcagtccaattcggcggtagtgtaaaaacgagtagcgcacttcgggaagagcaagaggcccagtgggaaaactggcctaaatctggtgttctcactacggcaccaggctttttcctgggacgctag

SEQ ID NO: 286206 - DNA, 189 bp, Artificial Sequence
  derived and/or modified sequence
tagggttaccactgcttgcctgcccccaatcgagcccaaggcgaggtaggtggagacggtggctcggtgcagtttggcggttctgttaagactagtagcgccctgagggaggaacaagaagcacagtgggagaattggcccaagagcggagtactgacaaccgcccccggattttttcttggcagatag

SEQ ID NO: 286207 - DNA, 189 bp, Artificial Sequence
  derived and/or modified sequence
tgaggctaccactgcctgcccgcccccaacagagcccagggcgaggtgggcggcgacggcggcagcgtgcagttcggcggcagcgtgaagaccagcagcgccctgagagaggagcaggaggcccagtgggagaactggcccaagagcggcgtgctgaccaccgcccccggcttcttcctgggcagatag

SEQ ID NO: 286208 - RNA, 189 nt, Artificial Sequence
  derived and/or modified sequence
uaggguuaccacugcuugccugcccccaaucgagcccaaggcgagguagguggagacgguggcucggugcaguuuggcgguucuguuaagacuaguagcgcccugagggaggaacaagaagcacagugggagaauuggcccaagagcggaguacugacaaccgcccccggauuuuuucuuggcagauag

SEQ ID NO: 286209 - DNA, 2193 bp, Artificial Sequence
  derived and/or modified sequence
atggagcccggtaccagcaagtggagacgggaacgacccgaatcttgcgatgactcatcgaaggggggagaactgaagaaacccatttccctcggacaccccgggtccttgaaaaagggcaagacaccgccggtcgccgtgactagccccataacacacaccgcacagagcgccctgaaggtggcaggtaagccagaaggaaaggctaccgacaaaggcaagcttgctgtcaagaacacaggacttcagcgcagttcatcagatgcaggaagggatcggctttccgacgcgaaaaaaccccccagcggcatagccaggcccagtacttcgggcagctttgggtataagaagcctcctcctgccaccgggacagctaccgtgatgcaaactggaggaagtgctacccttagcaagattcaaaagagtagcggcatccccgtgaagccagtcaatggtaggaaaaccagtctggacgtaagtaattccgctgagccggggttcctggctcctggagcccggtccaatattcaatatcgaagtctacccaggccggcaaagtcatccagcatgtccgtgaccgggggccgaggtgggccaagacccgtgtcttcatcgatagatccctcgcttttaagtacgaagcagggagggctgaccccttctaggctaaaggaaccaaccaaggtggcgtcaggaagaactaccccggcacctgtgaaccagactgatagagagaaggaaaaagctaaggcgaaggctgtggcactggactccgataacatatcccttaaatcaatcggatcccccgagtcaacacctaaaaatcaggcttctcacccaaccgctaccaagctggccgagctgccacctacccccctgcgggctactgcgaagagctttgtcaagccccctagtctggcaaacctggacaaggtgaattcaaactcacttgatctgccttcttcctcagataccacccacgcttctaaggtcccagacctgcacgctaccagctcagctagcggcggccccctcccaagttgttttaccccaagccccgcccctatcctgaatataaattctgccagcttcagtcagggcctcgaacttatgtctgggttttccgttccgaaggagacccgaatgtatccaaagttatctgggctgcatcgcagtatggagtcactgcagatgccaatgagtctccctagtgccttcccttctagtacccccgtaccaaccccacccgcgccaccagccgccccaactgaagaggagacggaggagctaacctggtcaggaagtccgagagcagggcagctcgactctaaccagcgcgatcggaatacccttccaaagaaaggccttcgctatcagcttcagagccaggaagagacaaaggagcgtcgccatagccatacaattgggggactgcccgaaagtgacgaccagtcagagctgccttcaccacctgccctgccaatgtcgcttagtgcaaagggccagctcacaaatatcgtctcacccacagccgctaccacccccaggatcacaaggtccaactccataccgacacatgaggccgcatttgaactgtactcaggctctcagatgggaagtactctgagcttggctgagagacctaagggcatgattcgatcaggcagctttcgcgatccaacggatgacgtgcacggaagcgtcctgtctctggcttcatctgcgtcttccacatattctagccagatccgaaaactgcggagggaacttgagtcttcgcaagaaaaggtcgctactctgacctcacaactcagcgctaacgccaaccttgtggctgctttcgagcagtcacttgtgaatatgacttcccgcctgcgccacctcgctgagaccgcggaggagaaaatggagtttcgttcctgtcacccaggctggtcggctttagcccggtcctggctgactgctaactctgcttcacaggacactgaactgcttgatctaagggagactattgatttcctgaagaagaaaaactctgaagcccaggctgtgatccagggggccctgaatgcaagtgaaacaacacccaaggagttaagaattaagagacagaacagctccgactccatttcctcccttaactctatcacttcgcattcctctataggatcttctaaggatgccgatgcgtag

SEQ ID NO: 286210 - DNA, 2193 bp, Artificial Sequence
  derived and/or modified sequence
atggagcccggcaccagcaagtggaggcgggagaggcctgagagctgtgatgacagcagcaaaggaggagagctgaagaagcccatcagcctgggccaccctggcagcctgaagaagggcaagaccccacctgtggccgtgaccagccccatcacccacacagcccagagcgccctgaaggtggccggcaagccagagggcaaggccacagacaagggcaagctggccgtgaagaacacaggcctgcagaggagcagcagtgatgctggccgggaccggctgagtgatgccaagaagccacccagcggcatcgcccggcccagcaccagcggcagctttggctacaagaagcccccaccagccaccggcacagccaccgtgatgcagacaggaggcagcgccaccctgagcaagatccagaagagcagcggcatccctgtgaagcctgtgaatggaaggaagaccagcctggatgtgagcaacagcgctgagcccggcttcctggcccctggggcccggagcaacatccagtaccgcagcctgcccaggcctgccaagagcagctccatgtctgtgactggaggccggggcggccccaggcctgtgagcagcagcattgaccccagcctgctgagcaccaagcagggcggcctgacccccagccggctgaaggagcccaccaaggtggccagcggccgcaccaccccagcccctgtgaaccagacagaccgggagaaggagaaggccaaggccaaggctgtggccctggacagcgacaacatcagcctgaagagcatcggcagccctgagagcacccccaagaaccaggccagccaccccacagccaccaagctggccgagctgccccccacccccctgcgggccacagccaagagctttgtgaagccacccagcctggccaacctggacaaggtgaacagcaacagcctggacctgcccagcagcagtgacaccacccacgccagcaaggtgcctgacctgcacgccaccagcagcgccagcggcggccccctgcccagctgcttcacccccagccctgcccccatcctgaacatcaacagcgccagcttcagccagggcctggagctgatgagcggcttctctgtgcccaaggagaccaggatgtaccccaagctgagcggcctgcaccgctccatggagagcctgcagatgcccatgagcctgcccagcgccttccccagcagcacccctgtgcccaccccaccagcccccccagctgcccccacagaggaggagacagaggagctgacctggagcggcagcccccgggccggccagctggacagcaaccagagggacaggaacaccctgcccaagaagggcctgcgctaccagctgcagagccaggaggagaccaaggagaggaggcacagccacaccatcggcggcctgcctgagagtgatgaccagagcgagctgcccagccccccagccctgcccatgagcctgagcgccaagggccagctgaccaacatcgtgagccccacagctgccaccaccccccgcatcaccaggagcaacagcatccccacccatgaggccgcctttgagctgtacagcggcagccagatgggcagcaccctgagcctggccgagcggcccaagggcatgatccgcagcggcagcttccgggaccccacagatgatgtgcacggctctgtgctgagcctggccagcagcgccagcagcacctacagcagccagatcaggaagctgcggcgggagctggagagcagccaggagaaggtggccaccctgaccagccagctgagcgccaatgccaacctggtggccgcctttgagcagagcctggtgaacatgaccagccggctgcggcacctggccgagacagctgaggagaagatggagttccgcagctgccaccctggctggagcgccctggcccgctcctggctgacagccaacagcgccagccaggacacagagctgctggacctgcgggagaccatcgacttcctgaagaagaagaacagcgaggcccaggccgtcatccagggcgccctgaatgccagcgagaccacccccaaggagctgcgcatcaagaggcagaacagcagtgacagcatcagcagcctgaacagcatcaccagccacagcagcatcggcagcagcaaggatgctgatgcctag

SEQ ID NO: 286211 - DNA, 2193 bp, Artificial Sequence
  derived and/or modified sequence
atggagcccggcaccagcaagtggcggcgggagcggcccgagagctgtgacgacagttctaagggcggggagctgaagaaaccaatttcattggggcaccctggaagtttaaagaaaggaaaaacaccccctgtggcggtgacgagcccaatcacgcacactgcgcagagtgccctgaaggtcgcaggcaaacccgaagggaaagccacggacaagggcaaactcgccgtgaaaaacaccggcctccagcgctccagctctgatgccggtcgcgaccggttatcggatgctaagaaaccaccctccggcattgctcgtccctcaaccagcggcagcttcggttacaaaaaaccacctcccgccaccggaaccgctaccgtgatgcaaactggtgggtcagcgactttaagcaaaatacaaaaatcttctgggataccagtgaagcccgtcaacggtcgcaagacgagcctggacgtcagcaatagcgcggagccgggattcctggcgccgggggcccgttccaatatacagtaccgcagcttgcctcgccctgcaaaaagctctagtatgtccgttacaggcggaagaggaggcccaagacccgtaagctcaagtatcgacccctcactgctcagtaccaagcaggggggtctcaccccctcgcgcctgaaagagcctaccaaggtggccagtgggagaaccacaccagcccccgttaaccagaccgatagggaaaaggagaaagctaaggccaaggctgttgctctcgactctgacaacatatccctgaagtcgattggctctccagagtccacacctaagaaccaggccagccaccctacagctacaaagctggcggaactgccacccaccccgctcagagcgactgcaaaatcttttgtgaagccaccatctctcgccaacctcgataaggtgaatagcaactcgctggacttaccatctagtagtgataccactcacgcatcaaaagttccagacctgcacgctacgagcagcgccagcgggggtcctttaccctcctgttttacacctagtcctgcccctattctgaacattaacagcgcctccttttcccagggactggaactcatgtcgggcttctctgttcctaaagaaaccaggatgtatccaaaactgagcgggttgcacagaagcatggaatcgctgcagatgcccatgagccttccgtccgcctttcccagttccacacctgtaccaacccctccagcaccgcccgccgccccaactgaggaggaaacagaagagctgacatggtccgggtcccctcgcgccggacagctggactcaaaccagcgggatcggaacacattacccaaaaaaggcctccgctatcagttgcagtcccaggaagagacaaaggagcgccgccactcacacactatcggtgggcttccagaatccgacgaccagagtgagctcccgtccccccccgcactgcccatgagcctgagcgcgaagggccagctaacaaacatagtgagcccgactgccgctacgaccccaagaattacccggtcaaactccattcccacccatgaagcagcctttgagctgtactccggatctcagatggggtccacactatcgctggctgagcggccgaaaggcatgatcaggtccggctccttcagggaccccacagacgatgtgcatgggtcggtgctgagtctggcgagctcagctagctcaacctatagctcccagattcgtaaattacgccgagaactggagagcagccaagaaaaagttgcaacgttgacttcacagctgtctgctaacgccaaccttgtagcagcatttgagcagagcctggtaaacatgacatctaggttgagacatctcgcggagactgccgaggagaagatggaatttcgatcatgccatcctgggtggtccgccctggccaggtcctggctgacagctaactctgcttcacaggacactgagctgctagacctccgcgagacgattgacttcctcaagaagaagaactccgaagcccaggcggtgatccaaggggcgctgaatgcgtccgaaactaccccgaaggagctccgcatcaaacgacaaaactctagcgattcaatatcttccctaaactcgattacctcccactctagtatcggctcttctaaggatgccgatgcttag

SEQ ID NO: 286212 - DNA, 2193 bp, Artificial Sequence
  derived and/or modified sequence
atggagcccggaactagcaagtggcgcagggagagacccgagtcttgcgatgactcatcaaaggggggagagcttaagaagcctatctctttagggcacccaggatcactgaagaaaggaaagaccccgccagtcgcagtgacgtcacccatcacccacacggcgcaatccgccctgaaggtggctgggaagccggagggaaaggccactgataagggtaaactggcagtgaaaaacacaggactgcagcggagtagcagtgacgctggcagagatagactctctgatgcgaaaaagcccccaagtggtatagccaggccctcaaccagcgggtcgtttggctacaaaaaaccccctcccgcaaccggtactgccaccgtcatgcagaccggcggatccgctaccctgtcaaaaatccagaaatcgagtggcatccctgtgaaacctgttaacggcagaaaaacctccctggatgtctctaactccgctgagcccggttttctggcacccggagcgcgttctaacatccagtatcgatccttacctaggccggctaaatcttccagtatgtccgtgaccggcggacggggaggtccaaggcccgtcagcagtagcatagacccctccttgttgtctacgaaacagggcggattgactcccagcagattgaaggagccaaccaaggtggcatcaggcagaactacaccagcgccagtaaaccagaccgaccgggaaaaggaaaaagcgaaagctaaggccgttgctctcgactccgacaacatttctctcaagtccattggctctcccgagtctaccccgaagaatcaggcctcccaccccacggccaccaagctcgccgagttaccacccactcctctgcgagctacagctaaatctttcgtcaagcccccttccttggccaacctggataaggtgaactctaacagtctggacctcccgtcctcgagcgacacaacacacgcttcaaaggtgcctgatctccatgccaccagtagcgcaagtggaggtcccctgccttcttgtttcaccccctcccccgctccaattctgaacatcaactcggcatcatttagtcaagggctagagctaatgagtggcttttccgttcccaaggagaccaggatgtaccctaaactgtcagggctgcataggtcaatggaatctctccagatgcctatgagtctcccgtccgccttcccatcgagtacacccgtgcccacccctcccgcacctcccgctgcccctacagaggaagaaacagaagagctgacttggagcggaagccctcgcgctggccagctcgattcaaatcagcgagacagaaacaccttgcctaaaaaaggactgcgctatcagcttcagagtcaagaggaaacaaaagaaaggaggcactcccacactattggcggtctgcccgagtccgacgatcagtccgagctgccctcgccacctgctttaccaatgtctttgagcgcaaagggtcagttgacaaacatagtaagccctaccgctgctaccacacccagaatcacacggtcaaactcaatcccaactcacgaagccgctttcgagctgtacagtggaagtcagatgggcagtacactctctctcgcggaaaggcctaaggggatgattcgaagtgggtccttccgagatccgacggatgacgttcatgggagtgttctgtccctggccagcagtgcaagttcaacatacagctcacagatccggaagttgcggagggaactcgagtcatctcaagaaaaggtggccacactcacctcacagctttccgccaacgcaaacctggttgcagcttttgagcagtcactcgttaacatgacaagtcgactgaggcacctggcagaaaccgcagaggaaaagatggagttccgcagttgccaccccggttggagcgccctggcacgaagttggttgacagccaattctgcctcacaggatactgagctcctggaccttagggaaacgattgattttttgaagaagaagaactccgaagcacaggccgtgattcaaggcgcattgaacgcctcggaaacaacccccaaggagttacgcattaaacgtcagaactccagcgatagcattagtagccttaactctattactagtcacagctcaattggatctagcaaagatgcagacgcctag

SEQ ID NO: 286213 - DNA, 2193 bp, Artificial Sequence
  derived and/or modified sequence
atggagcccggcaccagcaagtggagaagagagagacccgagagctgcgacgacagcagcaagggcggcgagctgaagaagcccatcagcctgggccaccccggcagcctgaagaagggcaagaccccccccgtggccgtgaccagccccatcacccacaccgcccagagcgccctgaaggtggccggcaagcccgagggcaaggccaccgacaagggcaagctggccgtgaagaacaccggcctgcagagaagcagcagcgacgccggcagagacagactgagcgacgccaagaagccccccagcggcatcgccagacccagcaccagcggcagcttcggctacaagaagcccccccccgccaccggcaccgccaccgtgatgcagaccggcggcagcgccaccctgagcaagatccagaagagcagcggcatccccgtgaagcccgtgaacggcagaaagaccagcctggacgtgagcaacagcgccgagcccggcttcctggcccccggcgccagaagcaacatccagtacagaagcctgcccagacccgccaagagcagcagcatgagcgtgaccggcggcagaggcggccccagacccgtgagcagcagcatcgaccccagcctgctgagcaccaagcagggcggcctgacccccagcagactgaaggagcccaccaaggtggccagcggcagaaccacccccgcccccgtgaaccagaccgacagagagaaggagaaggccaaggccaaggccgtggccctggacagcgacaacatcagcctgaagagcatcggcagccccgagagcacccccaagaaccaggccagccaccccaccgccaccaagctggccgagctgccccccacccccctgagagccaccgccaagagcttcgtgaagccccccagcctggccaacctggacaaggtgaacagcaacagcctggacctgcccagcagcagcgacaccacccacgccagcaaggtgcccgacctgcacgccaccagcagcgccagcggcggccccctgcccagctgcttcacccccagccccgcccccatcctgaacatcaacagcgccagcttcagccagggcctggagctgatgagcggcttcagcgtgcccaaggagaccagaatgtaccccaagctgagcggcctgcacagaagcatggagagcctgcagatgcccatgagcctgcccagcgccttccccagcagcacccccgtgcccaccccccccgccccccccgccgcccccaccgaggaggagaccgaggagctgacctggagcggcagccccagagccggccagctggacagcaaccagagagacagaaacaccctgcccaagaagggcctgagataccagctgcagagccaggaggagaccaaggagagaagacacagccacaccatcggcggcctgcccgagagcgacgaccagagcgagctgcccagcccccccgccctgcccatgagcctgagcgccaagggccagctgaccaacatcgtgagccccaccgccgccaccacccccagaatcaccagaagcaacagcatccccacccacgaggccgccttcgagctgtacagcggcagccagatgggcagcaccctgagcctggccgagagacccaagggcatgatcagaagcggcagcttcagagaccccaccgacgacgtgcacggcagcgtgctgagcctggccagcagcgccagcagcacctacagcagccagatcagaaagctgagaagagagctggagagcagccaggagaaggtggccaccctgaccagccagctgagcgccaacgccaacctggtggccgccttcgagcagagcctggtgaacatgaccagcagactgagacacctggccgagaccgccgaggagaagatggagttcagaagctgccaccccggctggagcgccctggccagaagctggctgaccgccaacagcgccagccaggacaccgagctgctggacctgagagagaccatcgacttcctgaagaagaagaacagcgaggcccaggccgtgatccagggcgccctgaacgccagcgagaccacccccaaggagctgagaatcaagagacagaacagcagcgacagcatcagcagcctgaacagcatcaccagccacagcagcatcggcagcagcaaggacgccgacgcctag

SEQ ID NO: 286214 - DNA, 783 bp, Artificial Sequence
  derived and/or modified sequence
atgcatcagcagtcttgtaaggatttgcagctgtacctctctaacctggccaaccagatcgacagagaaacaggcataggcgatgtgccgttagtgattttactggatgacctgtcagaagcagggagtatcagtgaactggtcaatggtgccctgacctgtaagtaccataagtgcccctacattattggcaccacaaaccagcctgtcaagatgacccccaatcacggattacacctcagttttagccggatgttgactttttctaacaacgtcgaacctgcaaacggatttttggtccgctatttgagacgcaaacttgtcgaatctgactccgacattaatgctaataaagaagaactcttgcgcgtcctcgactgggtcccaaagctgtggtaccatttacatactttcctggagaagcatagtactagcgattttctgattgggtccccttgctttttcctctcttgcccaatcggcattgaagacttcagaacctggtttattgacctgtggaacaattcaatcattccttacctccaagagggcgccaaggatggaattaaggtccacggacagaaagctgcatgggaagacccagtggagtgggtacgcgacacgctaccttggccttccgctcaacaggacgacagcacgcccagcagcctggacagcgacccacttatggcaatgttgctgaagctccaagaagcggcaaactacattgaaagccctgatcgggaaacaatcttggacccaaaccttcaggccactttatag

SEQ ID NO: 286215 - DNA, 783 bp, Artificial Sequence
  derived and/or modified sequence
atgcaccagcagagctgcaaggacctgcagctgtacctgagcaacctggccaaccagattgaccgggagaccggcattggagatgtgcccctggtgatcctgctggatgacctgtctgaggccggcagcatcagcgagctggtgaatggagccctgacctgcaagtaccacaagtgcccctacatcatcggcaccaccaaccagcctgtgaagatgacccccaaccacggcctgcacctgtccttcagcaggatgctgaccttcagcaacaacgtggagcccgccaacggcttcctggtgcgctacctgcggaggaagctggtggagagtgacagcgacatcaatgccaacaaggaggagctgctgcgggtgctggactgggtgcccaagctgtggtaccacctgcacaccttcctggagaagcacagcaccagtgacttcctgattggcagcccctgcttcttcctgagctgccccatcggcatcgaggacttccgcacctggttcatcgacctgtggaacaacagcatcatcccctacctgcaggagggcgccaaggatggcatcaaggtgcacggccagaaggccgcctgggaggaccctgtggagtgggtgcgggacaccctgccctggcccagcgcccagcaggatgacagcacccccagcagcctggacagcgaccccctgatggccatgctgctgaagctgcaggaggccgccaactacatcgagagcccagaccgggagaccatcctggaccccaacctgcaggccaccctgtag

SEQ ID NO: 286216 - DNA, 783 bp, Artificial Sequence
  derived and/or modified sequence
atgcaccagcagagctgcaaggacctgcagctgtacctgagcaacctcgctaaccagatagatcgggaaacaggaatcggagatgtcccattagtgatcctgctcgacgatctcagtgaggcggggagcatttcagaactcgtaaatggagcactgacctgtaaataccataaatgtccttacatcattggcacaacaaatcagccagtgaagatgaccccaaaccatgggctccatctgagtttctctagaatgctgacatttagtaataacgtcgagccggccaatgggtttctcgtcaggtacctccgcaggaagctggtcgaatcggactcagacatcaacgccaataaagaggaacttctgagagtgcttgactgggtgcctaaactgtggtaccacttgcatacatttctggaaaagcactccacctctgatttcctcatcgggagtccgtgtttcttcctatcttgtccaatcggcatcgaagatttcagaacctggttcattgacttgtggaataatagcatcataccctacctgcaagagggtgcaaaagatgggatcaaagtgcacggtcagaaagctgcctgggaagaccctgtggagtgggtccgagatactctcccatggccttccgcacagcaggatgattctaccccgagttccctggactctgacccgttgatggctatgctactcaagttgcaggaagcagccaactatatcgagtcaccggatagagagaccatcctggacccgaacctccaggcaaccctgtag

SEQ ID NO: 286217 - DNA, 783 bp, Artificial Sequence
  derived and/or modified sequence
atgcatcagcaatcctgtaaggatctacaactgtacctcagtaatctcgcaaatcaaatcgaccgcgagacgggcatcggcgacgtgcctctggtgattctactggacgatctgtctgaggccggatccatctctgaactggtgaatggtgctcttacttgcaagtaccacaagtgcccgtacattattgggactaccaaccagccagttaagatgacaccaaaccacggcctccatctgagctttagtcggatgctgacttttagtaacaatgtggagcccgctaatggctttttggtcagatatctgcgtcgcaaactggtcgaatccgactctgatatcaatgctaacaaggaggaacttctgcgagtgcttgattgggtcccgaaactttggtaccacctgcacactttcttggagaagcattctacttctgactttttgatcgggagtccttgctttttcctgtcctgtcctattgggatcgaggattttagaacttggttcattgatctttggaacaacagtatcattccttatctgcaggaaggggctaaggacggaataaaggtgcatggccagaaggcagcttgggaagatccagttgaatgggtcagggacacactgccgtggcctagtgcccaacaagatgacagcacaccctcatcgctcgacagcgaccctctcatggctatgctcttgaaactgcaagaggcggctaactatattgaaagtccagaccgggaaaccattctcgaccctaacttacaggccaccttgtag

SEQ ID NO: 286218 - DNA, 783 bp, Artificial Sequence
  derived and/or modified sequence
atgcaccagcagagctgcaaggacctgcagctgtacctgagcaacctggccaaccagatcgacagagagaccggcatcggcgacgtgcccctggtgatcctgctggacgacctgagcgaggccggcagcatcagcgagctggtgaacggcgccctgacctgcaagtaccacaagtgcccctacatcatcggcaccaccaaccagcccgtgaagatgacccccaaccacggcctgcacctgagcttcagcagaatgctgaccttcagcaacaacgtggagcccgccaacggcttcctggtgagatacctgagaagaaagctggtggagagcgacagcgacatcaacgccaacaaggaggagctgctgagagtgctggactgggtgcccaagctgtggtaccacctgcacaccttcctggagaagcacagcaccagcgacttcctgatcggcagcccctgcttcttcctgagctgccccatcggcatcgaggacttcagaacctggttcatcgacctgtggaacaacagcatcatcccctacctgcaggagggcgccaaggacggcatcaaggtgcacggccagaaggccgcctgggaggaccccgtggagtgggtgagagacaccctgccctggcccagcgcccagcaggacgacagcacccccagcagcctggacagcgaccccctgatggccatgctgctgaagctgcaggaggccgccaactacatcgagagccccgacagagagaccatcctggaccccaacctgcaggccaccctgtag

SEQ ID NO: 286219 - protein, 301 aa, Artificial Sequence
  derived and/or modified sequence
MGALRPTLLPPSLPLLLLLMLGMGCWAREVLVPEGPLYRVAGTAVSISCNVTGYEGPAQQNFEWFLYRPEAPDTALGIVSTKDTQFSYAVFKSRVVAGEVQVQRLQGDAVVLKIARLQAQDAGIYECHTPSTDTRYLGSYSGKVELRVLPDVLQVSAAPPGPRGRQAPTSPPRMTVHEGQELALGCLARTSTQKHTHLAVSFGRSVPEAPVGRSTLQEVVGIRSDLAVEAGAPYAERLAAGELRLGKEGTDRYRMVVGGAQAGDAGTYHCTAAEWIQDPDGSWAQIAEKRAVLAHVDVQTL

SEQ ID NO: 286220 - DNA, 1581 bp, Artificial Sequence
  derived and/or modified sequence
atgggtgctctgcgccctactctcttacctccatctctcccattgttactcctgctgatgctggggatgggctgctgggcaagggaggtactggtgccggaaggcccactttatcgcgtggccggaacagctgtgtcaatttcatgtaatgtgaccggatacgaaggccccgcccagcaaaacttcgagtggttcctctaccgcccagaagcccccgataccgcgctaggaattgtgtctactaaggacacacaatttagttatgcagtctttaaaagccgtgtggttgcgggcgaggtacaggtccaacggctccagggggatgctgttgtgctcaagattgctagactccaggcccaggatgcagggatatacgaatgccatactcccagcaccgacacacgatatctcggttcatactctgggaaggttgagctccgcgtgctgcccgatgttctgcaggtctcggcagcgccgccagggccaagagggaggcaggcacctaccagtcctcctcgcatgaccgttcacgaagggcaggaactcgccctcggctgcctagctcggacgtccacccagaaacacacgcacctggccgtgagtttcggtcgttccgtcccggaggcccccgtgggccgtagcacactccaggaagtcgtggggattcgcagcgatcttgctgtggaggccggcgccccttacgccgagagactcgccgccggggaattacgcctcgggaaggagggtactgaccgctataggatggtggttggaggagcccaggctggcgacgctgggacctatcactgtacagccgccgaatggattcaggatccggatggcagttgggcacagatcgctgagaagagagccgtgcttgcccatgtggatgtgcagaccctcagttcacagctggccgtcaccgtcgggccaggcgaaaggcgcatcggacctggggaacctctggaattactgtgcaacgtgtccggagccttgccacccgccgggcggcacgccgcatacagcgtgggatgggaaatggcaccagccggcgcccccgggccgggccgcttggtagcccaactggatactgaaggtgtgggaagcctgggccccggttatgagggacgccacattgcaatggaaaaggtcgcctcgagaacttatcggctgcgtttggaggctgcacgcccgggagacgcaggcacgtataggtgcttggctaaagcgtatgtgcgaggcagcggcacgcggcttcgggaagcagcgagcgcccgctccaggcctcttcccgttcacgtcagagaagagggagtagtcctggaggctgtggcatggctggcaggaggcactgtttatcgcggcgaaaccgcctctctgctgtgcaacattagtgtgagaggcggtcctcctgggctgcgatctgcaagatccgggcccgtcaccgtgtatccatacatgcacgctctggacacactgttcgtgcccctcctagtgggcaccggcgtcgccctggtgaccggcgctacggttctcggtacaattacctgctgtttcatgaagcgtctgcggaagcggtag

SEQ ID NO: 286221 - DNA, 906 bp, Artificial Sequence
  derived and/or modified sequence
atgggagcattgcgacccactctcctgccgcctagtttacccttgcttttgttgctcatgctggggatgggctgttgggcccgggaggtactggtgcccgaggggcctttgtacagggtagcagggaccgccgtcagcatttcgtgcaacgtgactggctacgaaggaccagctcaacagaatttcgagtggttcctttaccgccctgaggccccggataccgccttgggaatcgtctctacgaaggatacacagttctcctatgctgtgttcaagagccgcgtcgttgccggcgaagttcaggtgcagaggctacagggagatgcagtggtgttaaagatagctcgcctgcaggcccaggatgctgggatatacgaatgtcacaccccttcaaccgacaccaggtacctgggttcttacagtggaaaggtggagcttcgggtccttcccgacgtgctgcaggtcagcgccgctccacctggaccacgaggccggcaggcccctaccagcccccctcggatgaccgtccacgagggccaggaacttgcactgggatgcctcgcccgcacctctactcagaagcacacccatctagcagttagctttggccgtagtgtgcctgaggcccccgttggcaggagtacactgcaggaggtcgtgggaatacggtccgatctcgcagtcgaggcaggcgctccatacgccgagagactcgcagccggcgaacttcgacttggcaaggaaggcacagatcgctacaggatggtcgtaggaggagcccaggccggggatgcagggacctaccactgcaccgcagcagaatggatacaggacccggacggttcatgggcacagatcgctgagaaacgggccgtcctcgcacacgtcgacgtccagacgttgtag

SEQ ID NO: 286222 - DNA, 2004 bp, Artificial Sequence
  derived and/or modified sequence
attcggcagctccagttcagctcgctcggcgcacccacgcctcgctgccccgcttcctgccctcaacctgggcatgcgccccccacccttccggccccccagaacccgcgccatcccccggagcctccccagagctggccgcgcaggatgggcgccctcaggcccacgctgctgccgccttcgctgccgctgctgctgctgctaatgctaggaatgggatgctgggcccgggaggtgctggtccccgaggggcccttgtaccgcgtggctggcacagctgtctccatctcctgcaatgtgaccggctatgagggccctgcccagcagaacttcgagtggttcctgtataggcccgaggccccagatactgcactgggcattgtcagtaccaaggatacccagttctcctatgctgtcttcaagtcccgagtggtggcgggtgaggtgcaggtgcagcgcctacaaggtgatgccgtggtgctcaagattgcccgcctgcaggcccaggatgccggcatttatgagtgccacaccccctccactgatacccgctacctgggcagctacagcggcaaggtggagctgagagttcttccagatgtcctccaggtgtctgctgcccccccagggccccgaggccgccaggccccaacctcacccccacgcatgacggtgcatgaggggcaggagctggcactgggctgcctggcgaggacaagcacacagaagcacacacacctggcagtgtcctttgggcgatctgtgcccgaggcaccagttgggcggtcaactctgcaggaagtggtgggaatccggtcagacttggccgtggaggctggagctccctatgctgagcgattggctgcaggggagcttcgtctgggcaaggaagggaccgatcggtaccgcatggtagtagggggtgcccaggcaggggacgcaggcacctaccactgcactgccgctgagtggattcaggatcctgatggcagctgggcccagattgcagagaaaagggccgtcctggcccacgtggatgtgcagacgctgtccagccagctggcagtgacagtggggcctggtgaacgtcggatcggcccaggggagcccttggaactgctgtgcaatgtgtcaggggcacttcccccagcaggccgtcatgctgcatactctgtaggttgggagatggcacctgcgggggcacctgggcccggccgcctggtagcccagctggacacagagggtgtgggcagcctgggccctggctatgagggccgacacattgccatggagaaggtggcatccagaacataccggctacggctagaggctgccaggcctggtgatgcgggcacctaccgctgcctcgccaaagcctatgttcgagggtctgggacccggcttcgtgaagcagccagtgcccgttcccggcctctccctgtacatgtgcgggaggaaggtgtggtgctggaggctgtggcatggctagcaggaggcacagtgtaccgcggggagactgcctccctgctgtgcaacatctctgtgcggggtggccccccaggactgcggagtgcccgctcagggcctgttacagtctacccctacatgcatgccctggacaccctatttgtgcctctgctggtgggtacaggggtggccctagtcactggtgccactgtccttggtaccatcacttgctgcttcatgaagaggcttcgaaaacggtgatcccttactccccaggtcttgcaggtgtcgactgtcttccggcccagctccaagccctcctctggttgcctggacaccctctccctctgtccactcttcctttaatttatttgacctcccactacccagaatgggagacgtgcctccccttccccactccttccctcccaagcccctccctctggccttctgttcttgatctcttagggatcctatagggaggccatttcctgtcctggaattagtttttctaaaatgtgaataaacttgttttat

SEQ ID NO: 286223 - DNA, 1059 bp, Artificial Sequence
  derived and/or modified sequence
ggaactggggctgggccgaggcccggggcggatccagggctggagtcttggcggggcggggcggggaggggcggggccggggcggggctgggactcgatgcgactcaaagaacccgcgccatcccccggagcctccccagagctggccgcgcaggatgggcgccctcaggcccacgctgctgccgccttcgctgccgctgctgctgctgctaatgctaggaatgggatgctgggcccgggaggtgctggtccccgaggggcccttgtaccgcgtggctggcacagctgtctccatctcctgcaatgtgaccggctatgagggccctgcccagcagaacttcgagtggttcctgtataggcccgaggccccagatactgcactgggcattgtcagtaccaaggatacccagttctcctatgctgtcttcaagtcccgagtggtggcgggtgaggtgcaggtgcagcgcctacaaggtgatgccgtggtgctcaagattgcccgcctgcaggcccaggatgccggcatttatgagtgccacaccccctccactgatacccgctacctgggcagctacagcggcaaggtggagctgagagttcttccagatgtcctccaggtgtctgctgcccccccagggccccgaggccgccaggccccaacctcacccccacgcatgacggtgcatgaggggcaggagctggcactgggctgcctggcgaggacaagcacacagaagcacacacacctggcagtgtcctttgggcgatctgtgcccgaggcaccagttgggcggtcaactctgcaggaagtggtgggaatccggtcagacttggccgtggaggctggagctccctatgctgagcgattggctgcaggggagcttcgtctgggcaaggaagggaccgatcggtaccgcatggtagtagggggtgcccaggcaggggacgcaggcacctaccactgcactgccgctgagtggattcaggatcctgatggcagctgggcccagattgcagagaaaagggccgtcctggcccacgtggatgtgcagacgctgt

SEQ ID NO: 286224 - DNA, 1581 bp, Artificial Sequence
  derived and/or modified sequence
atgggcgccctgcggcccaccctgctgccccccagcctgcccctgctgctgctgctgatgctgggcatgggctgctgggcccgggaggtgctggtgcctgagggccccctgtacagagtggccggcacagctgtgtccatcagctgcaatgtgacaggctatgagggccctgcccagcagaactttgagtggttcctgtacagacctgaggccccagacacagccctgggcatcgtgtccaccaaggacacccagttctcctatgctgtgttcaagagccgggtggtggccggggaggtgcaggtgcagaggctgcagggagatgctgtggtgctgaagatcgcccggctgcaggcccaggatgctggcatctatgagtgccacacccccagcacagacacccgctacctgggcagctacagcggcaaggtggagctgcgggtgctgcctgatgtgctgcaggtgtctgctgcccctcctggcccccggggccggcaggcccccaccagcccccccaggatgacagtgcatgagggccaggagctggccctgggctgcctggcccggaccagcacccagaagcacacccacctggccgtgtcctttggccgctctgtgcctgaggcccctgtgggccgcagcaccctgcaggaggtggtgggcatccgcagtgacctggccgtggaggccggggccccctatgcagagcggctggccgccggggagctgcggctgggcaaggagggcacagaccgctacaggatggtggtgggcggggcccaggccggagatgctggcacctaccactgcacagctgctgagtggatccaggaccctgatggctcctgggcccagattgctgagaagagagctgtgctggcccacgtggatgtgcagaccctgagcagccagctggccgtgacagtgggccctggagagcggcgcatcggccctggagagcccctggagctgctgtgcaatgtgtctggggccctgcccccagctggaagacatgctgcctacagcgtgggctgggagatggccccagctggggcccctggccctggccgcctggtggcccagctggacacagagggcgtgggcagcctgggccctggctatgagggccgccacatcgccatggagaaggtggccagcaggacctaccgcctgcggctggaggccgcccggcctggagatgctggcacctaccgctgcctggccaaggcctacgtgcggggcagcggcacccggctgcgggaggccgccagcgcccggagccggcccctgcctgtgcacgtgcgggaggagggcgtggtgctggaggccgtggcctggctggccggcggcaccgtgtacagaggagaaacagccagcctgctgtgcaacatctctgtgcggggcggccccccaggcctgcggagcgcccggagcggccctgtgacagtgtacccctacatgcacgccctggacaccctgtttgtgcccctgctggtgggcactggagtggccctggtgactggagccaccgtgctgggcaccatcacctgctgcttcatgaagaggctgaggaagaggtag

SEQ ID NO: 286225 - DNA, 906 bp, Artificial Sequence
  derived and/or modified sequence
atgggcgccctgcggcccaccctgctgccccccagcctgcccctgctgctgctgctgatgctgggcatgggctgctgggcccgggaggtgctggtgcctgagggccccctgtacagagtggccggcacagctgtgtccatcagctgcaatgtgacaggctatgagggccctgcccagcagaactttgagtggttcctgtacagacctgaggccccagacacagccctgggcatcgtgtccaccaaggacacccagttctcctatgctgtgttcaagagccgggtggtggccggggaggtgcaggtgcagaggctgcagggagatgctgtggtgctgaagatcgcccggctgcaggcccaggatgctggcatctatgagtgccacacccccagcacagacacccgctacctgggcagctacagcggcaaggtggagctgcgggtgctgcctgatgtgctgcaggtgtctgctgcccctcctggcccccggggccggcaggcccccaccagcccccccaggatgacagtgcatgagggccaggagctggccctgggctgcctggcccggaccagcacccagaagcacacccacctggccgtgtcctttggccgctctgtgcctgaggcccctgtgggccgcagcaccctgcaggaggtggtgggcatccgcagtgacctggccgtggaggccggggccccctatgcagagcggctggccgccggggagctgcggctgggcaaggagggcacagaccgctacaggatggtggtgggcggggcccaggccggagatgctggcacctaccactgcacagctgctgagtggatccaggaccctgatggctcctgggcccagattgctgagaagagagctgtgctggcccacgtggatgtgcagaccctgtag

SEQ ID NO: 286226 - DNA, 1581 bp, Artificial Sequence
  derived and/or modified sequence
atgggcgccctgcggcccaccctgctgccccccagcctgcccctgctgctacttttgatgcttggaatgggctgttgggctagggaggttctggtgcctgaaggacctctgtatcgagtcgcagggacggctgtctctattagctgtaacgtgacgggctacgaaggccccgcacagcagaattttgagtggttcctttaccggccggaagcccctgacaccgctctgggcattgtctccacaaaggacacacagtttagttatgcagtttttaagtcacgcgttgtggcgggcgaggttcaggtgcaacgtttgcagggcgatgccgtggtgttgaaaatcgcccgtctgcaggcgcaggatgccggcatctatgagtgtcatacccctagtaccgacaccagatacctgggatcttactccggtaaagtggagctccgcgtgcttccagacgtcctgcaggtcagcgcagcccctcctggaccacgcggaagacaggcccctacctctccccctcgcatgacggtccatgagggacaggagctggctttaggatgtcttgcaagaacgtctacgcagaaacacacccatctcgccgtgtcatttgggcgatccgtccctgaagccccagtaggccggtccactctacaggaggttgttggaattcgctcagacctggctgtggaggcgggcgcaccttatgctgagcggctcgcggcaggagagctgagactcggcaaagagggcactgatcgctaccggatggttgtcggcggagcacaagccggcgacgcaggcacctatcactgtaccgcggctgaatggattcaggaccctgacgggagttgggcccaaattgccgagaagcgggccgtgctggcacacgtggacgttcaaactctttcttctcagctggccgtcactgtcgggcctggtgaaagacggatcggtcctggcgagcctctggagcttctgtgtaacgttagtggtgcgttacctcctgcaggcagacacgctgcgtatagtgtcgggtgggaaatggcccccgcgggggctcctggtcccggacgcctggtagcgcagctggacactgagggtgttgggagcttaggtcccggctatgagggtagacacatagcaatggagaaggttgcgtctaggacctatcgcctacgcttggaggctgctcgccccggagatgcgggcacatatcgatgtctggccaaggcctacgtacggggatccgggacccgcctgcgagaagctgcatcagcgcggagtcgcccgctgcctgtgcacgtccgagaggaaggcgtggtattggaagccgtggcctggcttgccggcggaactgtttatcgcggagagacggcttccttgctgtgcaacatttcagttcggggcggcccacccggattgagaagcgctcgttctggtccagtgacggtttacccttacatgcatgccctcgatacgctctttgtgcctcttctggttggaactggagttgcattggtgacaggcgctaccgtgttgggaaccatcacctgctgtttcatgaagcgactgcggaagcgttag

SEQ ID NO: 286227 - DNA, 906 bp, Artificial Sequence
  derived and/or modified sequence
atgggcgccctgcggcccaccctgctgccccccagcctgcccctgttgctcctgttaatgctagggatgggctgctgggcaagggaagtcctggtccccgaaggtccattgtatcgtgtagctgggaccgcggtcagcatctcttgcaacgtcactggatacgagggccctgcccagcagaattttgagtggttcttataccgcccagaggcccctgataccgccttgggcatagttagcactaaggacacccagttttcatatgcagtcttcaagtctcgcgtggttgctggcgaggttcaagtgcagagattgcaaggcgatgcagtggtgctcaagattgcgcgtctccaggcccaggatgctggcatctatgaatgtcataccccttccactgacacccgatacttaggcagctacagcgggaaggtcgaattgcgggtgcttccagacgtcctgcaggtctcagctgcgccccctggtccgaggggcaggcaggctcctacctctcccccgagaatgaccgtccatgaggggcaggaactggctctgggttgcttggcaaggacaagtacgcaaaagcacacacacttagcggtttcattcggaaggagcgtgcccgaagcccctgtgggtagaagcacactacaggaggttgtgggtattcgctccgaccttgctgtagaagccggagccccatacgctgagcggcttgcagccggtgaactcagactgggaaaagagggcacagatcgatacagaatggtagtcggtggagcccaagccggtgacgctggtacataccattgcacagcagccgagtggatccaggaccctgatggaagctgggctcagattgccgagaagcgagccgtactcgcgcatgttgacgtacaaactctgtag

SEQ ID NO: 286228 - DNA, 1581 bp, Artificial Sequence
  derived and/or modified sequence
atgggagcactgcgtccgacgttactgccaccgagtctgccactcctgctacttctcatgttgggaatgggctgttgggcacgagaggtcctggtcccagaaggccctctttaccgggtggctggaaccgcagtgtcgattagttgcaacgtgacgggatatgagggcccagcccagcagaactttgaatggtttctttataggcccgaggcccctgacactgccctcgggattgttagcactaaggacactcaattctcctatgcggtgttcaaatcgcgagtggtagccggagaggtccaggttcagagacttcaaggggatgctgtcgtgctgaagatcgccagacttcaggcccaggacgcagggatttatgagtgccatactccatctaccgacacaaggtatctgggctcttacagcggcaaggttgaattgcgtgtactccctgatgtgctgcaggtgtccgcggcaccacctggcccaagaggccgtcaggctcctacatctccaccccgaatgaccgtgcacgaggggcaggaactggccctgggttgcctggcaagaacctctactcagaagcacacacaccttgcggtctcttttggacggtctgtgcctgaggccccagtgggacggtccacactgcaggaagtggtgggcattagatcggacctagcagtggaagctggcgcaccatatgctgagagactggctgctggagaactcaggctgggtaaagaaggtacagataggtatagaatggtggtaggtggtgcacaggctggagacgccggaacttaccactgtacggctgccgaatggatacaggacccagatggtagttgggcgcaaatcgctgagaagcgtgcggtcctggcccacgttgacgtccagaccctctcaagccagctcgctgtgacagtcggcccaggggagcggaggatagggcctggagaacccctggaactactttgtaatgtgagcggagcactgcccccagcagggagacatgcggcttactctgtgggttgggaaatggctcctgcgggagccccaggacccggtcgacttgtggcacaactggatactgagggggtcggaagcctagggcctggttacgagggacggcacatcgcgatggaaaaggtggccagtcgcacttaccggttgaggctcgaggctgcaagacccggtgatgcaggaacatatcggtgtcttgccaaggcctacgttcggggatctggaacacgactaagggaggcagctagtgctcgatcccgccctctacccgtgcacgtccgagaagagggcgtggtcttagaggccgttgcctggctggcaggcggaacagtttataggggcgaaactgcaagcttactctgtaacatttctgtgcggggaggccctccagggctcaggagtgctcggtctgggcctgttactgtatacccttacatgcacgctctggacacgctattcgtcccgctgctagtcggtacaggcgtagcacttgtcaccggtgctaccgttctgggaacaataacctgttgtttcatgaagcgtttgcgcaagaggtag

SEQ ID NO: 286229 - DNA, 906 bp, Artificial Sequence
  derived and/or modified sequence
atgggagctctgagaccaacacttctcccaccaagtctacctctcctgctgctacttatgctggggatggggtgctgggccagagaagtcctggttccagagggtcccctctaccgggtggccggaaccgcagtctctatatcttgtaacgtaaccggctacgaaggaccggcacagcaaaactttgaatggttcctttaccggcctgaagcacccgatacggccttagggatcgtctctacaaaggacacccagttcagttatgctgtgtttaaaagcagagtagttgctggtgaagtgcaagttcaacgattgcagggcgacgccgttgtgctgaagatcgctcggctccaggctcaggacgctggtatttacgagtgccatacaccaagcactgatacacgctatcttgggagctattccgggaaggtggaactccgggtactaccagatgtgctgcaagttagcgccgctcccccaggcccacgtggccgtcaggctccaacttcacctcctagaatgactgtacacgagggccaggaactggccctcggctgtctggcccgtacttcgacacaaaagcatacccaccttgccgtatccttcgggagatctgtcccagaagccccagtgggcagatccaccctccaggaagttgtgggcatcagatctgaccttgcagtggaggccggagctccttatgccgagcggctcgcagccggtgaactcaggcttggtaaggaggggacagaccggtacaggatggtggttggcggagcccaggctggtgacgctggcacctatcactgcaccgcagccgagtggatccaggatcccgacggctcctgggcccagatcgccgagaagcgtgctgttcttgcccatgtcgacgttcagacactctag

SEQ ID NO: 286230 - DNA, 1581 bp, Artificial Sequence
  derived and/or modified sequence
atgggcgccctgagacccaccctgctgccccccagcctgcccctgctgctgctgctgatgctgggcatgggctgctgggccagagaggtgctggtgcccgagggccccctgtacagagtggccggcaccgccgtgagcatcagctgcaacgtgaccggctacgagggccccgcccagcagaacttcgagtggttcctgtacagacccgaggcccccgacaccgccctgggcatcgtgagcaccaaggacacccagttcagctacgccgtgttcaagagcagagtggtggccggcgaggtgcaggtgcagagactgcagggcgacgccgtggtgctgaagatcgccagactgcaggcccaggacgccggcatctacgagtgccacacccccagcaccgacaccagatacctgggcagctacagcggcaaggtggagctgagagtgctgcccgacgtgctgcaggtgagcgccgccccccccggccccagaggcagacaggcccccaccagcccccccagaatgaccgtgcacgagggccaggagctggccctgggctgcctggccagaaccagcacccagaagcacacccacctggccgtgagcttcggcagaagcgtgcccgaggcccccgtgggcagaagcaccctgcaggaggtggtgggcatcagaagcgacctggccgtggaggccggcgccccctacgccgagagactggccgccggcgagctgagactgggcaaggagggcaccgacagatacagaatggtggtgggcggcgcccaggccggcgacgccggcacctaccactgcaccgccgccgagtggatccaggaccccgacggcagctgggcccagatcgccgagaagagagccgtgctggcccacgtggacgtgcagaccctgagcagccagctggccgtgaccgtgggccccggcgagagaagaatcggccccggcgagcccctggagctgctgtgcaacgtgagcggcgccctgccccccgccggcagacacgccgcctacagcgtgggctgggagatggcccccgccggcgcccccggccccggcagactggtggcccagctggacaccgagggcgtgggcagcctgggccccggctacgagggcagacacatcgccatggagaaggtggccagcagaacctacagactgagactggaggccgccagacccggcgacgccggcacctacagatgcctggccaaggcctacgtgagaggcagcggcaccagactgagagaggccgccagcgccagaagcagacccctgcccgtgcacgtgagagaggagggcgtggtgctggaggccgtggcctggctggccggcggcaccgtgtacagaggcgagaccgccagcctgctgtgcaacatcagcgtgagaggcggcccccccggcctgagaagcgccagaagcggccccgtgaccgtgtacccctacatgcacgccctggacaccctgttcgtgcccctgctggtgggcaccggcgtggccctggtgaccggcgccaccgtgctgggcaccatcacctgctgcttcatgaagagactgagaaagagatag

SEQ ID NO: 286231 - DNA, 906 bp, Artificial Sequence
  derived and/or modified sequence
atgggcgccctgagacccaccctgctgccccccagcctgcccctgctgctgctgctgatgctgggcatgggctgctgggccagagaggtgctggtgcccgagggccccctgtacagagtggccggcaccgccgtgagcatcagctgcaacgtgaccggctacgagggccccgcccagcagaacttcgagtggttcctgtacagacccgaggcccccgacaccgccctgggcatcgtgagcaccaaggacacccagttcagctacgccgtgttcaagagcagagtggtggccggcgaggtgcaggtgcagagactgcagggcgacgccgtggtgctgaagatcgccagactgcaggcccaggacgccggcatctacgagtgccacacccccagcaccgacaccagatacctgggcagctacagcggcaaggtggagctgagagtgctgcccgacgtgctgcaggtgagcgccgccccccccggccccagaggcagacaggcccccaccagcccccccagaatgaccgtgcacgagggccaggagctggccctgggctgcctggccagaaccagcacccagaagcacacccacctggccgtgagcttcggcagaagcgtgcccgaggcccccgtgggcagaagcaccctgcaggaggtggtgggcatcagaagcgacctggccgtggaggccggcgccccctacgccgagagactggccgccggcgagctgagactgggcaaggagggcaccgacagatacagaatggtggtgggcggcgcccaggccggcgacgccggcacctaccactgcaccgccgccgagtggatccaggaccccgacggcagctgggcccagatcgccgagaagagagccgtgctggcccacgtggacgtgcagaccctgtag

SEQ ID NO: 286232 - protein, 259 aa, Artificial Sequence
  derived and/or modified sequence
  misc_feature (1)..(1): Xaa can be any naturally occurring amino acid
XFTAQAPSGRGAAVGSGTRLASLRLLTELESPAWWPFSSKLWKTPPETKPREDVSMTSCEPFGKEGILIKIPAVISHRTESHVKPGRLTVLVSGLEIHDSSSLLMHRFEREDVDDIKVHSPYEISIRQRFIGKPDMAYRLISAKMPEVIPILEVQFSKKMELLEDALVLRSARTSSPAEKSCSVWHAASGLMGRTLHREPPAGDQEGTALHLQTSLPALSEADTQELTQGFRPMSLSTQTVLVMLCSESAGALWRQRLS

SEQ ID NO: 286233 - DNA, 780 bp, Artificial Sequence
  derived and/or modified sequence
tgattcaccgcccaggcccccagcggcagaggcgccgccgtgggcagcggcaccagactggccagcctgagactgctgaccgagctggagagccccgcctggtggcccttcagcagcaagctgtggaagaccccccccgagaccaagcccagagaggacgtgagcatgaccagctgcgagcccttcggcaaggagggcatcctgatcaagatccccgccgtgatcagccacagaaccgagagccacgtgaagcccggcagactgaccgtgctggtgagcggcctggagatccacgacagcagcagcctgctgatgcacagattcgagagagaggacgtggacgacatcaaggtgcacagcccctacgagatcagcatcagacagagattcatcggcaagcccgacatggcctacagactgatcagcgccaagatgcccgaggtgatccccatcctggaggtgcagttcagcaagaagatggagctgctggaggacgccctggtgctgagaagcgccagaaccagcagccccgccgagaagagctgcagcgtgtggcacgccgccagcggcctgatgggcagaaccctgcacagagagccccccgccggcgaccaggagggcaccgccctgcacctgcagaccagcctgcccgccctgagcgaggccgacacccaggagctgacccagggcttcagacccatgagcctgagcacccagaccgtgctggtgatgctgtgcagcgagagcgccggcgccctgtggagacagagactgagctag

SEQ ID NO: 286234 - DNA, 1446 bp, Artificial Sequence
  derived and/or modified sequence
atgagggcaaggctccggttcctgccctcacagggtcccagaagcaagggcagtgaggacctggcccacgtccctggcacgggctgtctgattctccttcgctgtggcgggaagatggccggatttgaagattgctgacagaactggaatctcctgcttggtggccctttagctccaagctttggaagacaccaccggaaacaaagcccagggaagatgtctccatgaccagttgtgaaccctttgggaaagaagggatactgataaaaattcctgctgttatttcccacagaacagagtctcacgttaaaccagggaggctcaccgtccttgtgtctgggttggaaatacatgactccagttctttgctcatgcacaggtttgaaagagaagacgtggacgacatcaaggtccactcaccttacgaaattagcatccgccagcggtttattggaaagccagacatggcctatcgtttgatatctgccaagatgccagaggttatccccattttagaagtgcagttcagcaagaagatggagctgttagaagatgcattggtgctcagaagcgcaagaacctcttcccccgcagagaagagctgctcagtctggcatgcagcatctgggctgatgggccgtaccctgcaccgtgagccacccgcaggagaccaggagggcacagcactgcacctgcagacaagcctgccagccctttctgaggcagatacccaggaactaacccagatcctgaggaggatgaaggggctggccctggaggccgagagtgagctggagagacaagacgaagccctggatggcgttgcagcagctgtggacagggcaaccttgaccatcgacaagcacaacaggcggatgaagaggctgacctaggggcagaacgtccctgcattcctgtctcaccctgcacatcccgctgagatggagggctgggcggcagtgccagggctgcagaggcctgtggccctccggagtggtcttcctctggatggggctgctactgtggggctgcttctgcaccaggggcctccccaggtgtgcaccatgcctgcctcccacttggctgtccctgctgctgggcaggacccggccacatgttctgcggatgctgcagaagtgtggaccatggcgggaccccaaggacacttggcacaggcctggaagaggccgccctcgtcttgtctcggctccctttcatggacagactggccttcttagctgtactataaatttgtgagtgaagttagagcccagctcacttagccagctcactttgagggcatcctataaacacccaactgttcttttatcgtctcggttttagccaaaagtgaaattagcatgactgcatctttcaaacaaaaatattgatttctgcttttagggccccgtttccatccagaaataaagggaaatgctggcttca

SEQ ID NO: 286235 - DNA, 780 bp, Artificial Sequence
  derived and/or modified sequence
taatttacagctcaggctccctcagggcggggggcagcagtggggtctggtacacgactggcaagtctccggctcctcacggagctggagtctcctgcttggtggccattttccagcaaactgtggaaaacccccccagagactaaaccacgagaggatgtgtccatgacaagctgtgaaccttttggcaaagagggtattttgatcaaaatccctgcggtgattagtcatcggacagagagccatgtcaagcccgggcgcttgaccgttctcgtctccggactcgagatccacgacagttcctccttactgatgcataggtttgagcgcgaagatgtcgacgatatcaaagtgcatagtccttacgaaatcagcattcgccagagattcatcgggaaacccgacatggcatatcgtctcatttcagccaagatgcccgaggtgatccccatattagaagtgcaatttagcaagaagatggaattgctggaagatgctctggtgctgcggtcagcccggacatcctctccagcagaaaaaagctgcagcgtgtggcacgcagcaagtggcctcatggggcggactctacaccgggaaccccccgccggggaccaggagggcacagccctccatctgcaaacgagcctccctgctttatccgaagctgatacccaggagctgacccagggtttccggcctatgtcactctccacccagaccgttctagttatgctttgcagtgaatccgctggcgctctttggagacagagactgagctag

SEQ ID NO: 286236 - DNA, 780 bp, Artificial Sequence
  derived and/or modified sequence
tgattcaccgcccaggcccccagcggccgcggggctgctgtgggcagcggcacccggctggccagcctgcggctgctgacagagctggagagccctgcctggtggcccttcagcagcaagctgtggaagaccccacctgagaccaagccccgggaggatgtgtccatgaccagctgtgagccctttgggaaggagggcatcctgatcaagatcccagctgtgatcagccacaggacagagagccacgtgaagccaggccgcctgactgtgctggtgtctggcctggagatccatgacagcagcagcctgctgatgcacagatttgaaagagaagatgtggatgacatcaaggtgcacagcccctatgagatcagcatccggcagcgcttcatcggcaagccagacatggcctaccgcctcatcagcgccaagatgcctgaggtgatccccatcctggaggtgcagttcagcaagaagatggagctgctggaggatgccctggtgctgcggagcgcccggaccagcagccctgctgagaagagctgcagcgtgtggcatgctgccagcggcctgatgggccgcaccctgcaccgggagcccccagctggggaccaggagggcacagccctgcacctgcagaccagcctgcctgccctgtctgaggccgacacccaggagctgacccagggcttccggcccatgagcctgagcacccagacagtgctggtgatgctgtgcagcgagagcgctggggccctgtggaggcagaggctgtcctag

SEQ ID NO: 286237 - DNA, 780 bp, Artificial Sequence
  derived and/or modified sequence
tgattcaccgcccaggcccccagcggccggggcgccgccgtgggctcaggtacacgactcgcaagtctgcggttgctcactgaattagaaagtccagcttggtggcctttctccagcaagttatggaaaaccccccccgaaaccaagcctcgggaagacgttagtatgacctcctgtgagccctttggtaaagagggcatcctgatcaagattcctgctgtgatctcccatcggaccgaaagccatgtgaagcctggacggcttactgttcttgtgtcgggactggaaatacatgactccagtagcctgcttatgcacaggtttgaaagggaggatgtcgacgatataaaagtacatagcccgtacgagatctctatacgacagagattcattggaaaacctgatatggcctacagactaatatccgctaagatgccagaagttattcccatcctagaggtgcaatttagcaaaaagatggaactcttggaggatgccctcgtgctgcgctccgcccgcactagcagtcccgctgagaagagctgtagcgtgtggcacgctgcgtccggactgatggggcgcaccttgcatcgggaacctccggcgggcgaccaggaagggacagccttgcacctgcaaacgtccttaccggctttgtctgaggctgatacgcaggaactgactcagggattccgccccatgtctctcagcacccaaaccgttttggttatgctgtgcagcgagtccgccggcgcactgtggagacagcggctcagctag

SEQ ID NO: 286238 - DNA, 1867 bp, Artificial Sequence
  derived and/or modified sequence
cttcactgcgcaggcgccgagcggccgaggcgccgcggtcggctctgggactcgtctggcgtccctcagattgctgacagaactggaatctcctgcttggtggccctttagctccaagctttggaagacaccaccggaaacaaagcccagggaagatgtctccatgaccagttgtgaaccctttgggaaagaagggatactgataaaaattcctgctgttatttcccacagaacagagtctcacgttaaaccagggaggctcaccgtccttgtgtctgggttggaaatacatgactccagttctttgctcatgcacaggtttgaaagagaagacgtggacgacatcaaggtccactcaccttacgaaattagcatccgccagcggtttattggaaagccagacatggcctatcgtttgatatctgccaagatgccagaggttatccccattttagaagtgcagttcagcaagaagatggagctgttagaagatgcattggtgctcagaagcgcaagaacctcttcccccgcagagaagagctgctcagtctggcatgcagcatctgggctgatgggccgtaccctgcaccgtgagccacccgcaggagaccaggagggcacagcactgcacctgcagacaagcctgccagccctttctgaggcagatacccaggaactaacccagggcttccggcctatgtcgctgtcaacccagacagtgttggtgatgctttgctccgagtctgcaggagctttgtggagacagagactttcctagcagggcagcaagcggaagcttttcttccagaacagcctttgctcagggcatgagggagccggccaggcccacagcgcccagggcatcctcctcacggatgtgttggaggaaagtggctttggtgctatcctgggggaccatggccataagctggcagtgtcagccacgcatcagttgcgtttctttgttcaggttgtgcctcttgctgcctgcctgagtcacccagggctgctccccttcctggctctgacgccctcagcgggtcccacaagccgctcaggaccacagagtctggccatgggtctggccaggcatccactgatgctctaagctgcagcttctcttaggaacacttctatcaggtctggctcgcaggcatgccccagggccagcctggattgtactgtccttcaagcactccttgctctatttctttgaagtttataaaagtttgtttcccccaaaacccaaagcacttttaatcaggtagtttctgtggaggtcgaactggctggaaggaaggctggttcctggatttctttactcatgtagcagggactcaaggaagtctgatttgcgcctcgcctctgactcagagcccatgaaggttcctgtgtgaggccactggctgcctcggagctgacagcatcctgcacaatggctagatggcttgtcaccccaggccgcagaggaacaactgtttctagggtttggccagacttcacattctccattctttccatccctgttatgtggaatgcacacgatgccatgtaattacttcagtcccttctcaaaggaaaaagaatctggacctgcactccaggacactagcagtttgaaggttcgctcaggaatgttctttgtctgcagacctagcagctgtacagatcgctcttgtgtttttgcactattaattaacttcaagtgcaattttggcaggcaggccaagggtctcaacaggctatttggaatgagttctcttttaaggccttcaacgtagtgagacattttcaaatcaaaaagtacagcaggagccagcctttattttgtctgtgtacacaataaaatattccgcttctataggca

SEQ ID NO: 286239 - DNA, 780 bp, Artificial Sequence
  derived and/or modified sequence
taattcactgcccaggccccttcggggaggggcgctgcggtgggatccggaacacggctcgcttcccttcggttgcttactgagttagagagccccgcatggtggccgtttagctccaagctctggaaaactccaccggagaccaaacctcgagaggatgtcagtatgacctcttgcgaaccttttggcaaggaggggatcttaattaaaataccagccgtgatttcccatcggactgagtcacacgtgaaaccgggtcgactgacagtgctggtgtctggattggagattcacgactcgtcctctctgctcatgcaccgcttcgagcgcgaggatgtggatgatataaaagtccattcaccctatgagatcagcatcagacaacggtttattggcaagccggacatggcttatcgcttaatctcagctaaaatgccagaagtgatacccattctcgaagtccagtttagcaagaagatggaactgctcgaagacgcactggtgctgcggagcgccagaacaagtagcccggctgagaaatcttgctcagtgtggcacgcggctagcggactgatgggaaggacattgcatcgggaaccacctgcaggcgatcaggaaggcactgctctccacctgcagacctctctgccggctttaagcgaggcagatacgcaggaacttacccagggttttcgccctatgtcactgtctacgcagactgtgcttgtgatgttatgttcagagtccgcaggagcactgtggcggcagagactctcatag

SEQ ID NO: 286240 - DNA, 987 bp, Artificial Sequence
  derived and/or modified sequence
atggaacccacactgcggattctggcaatattacacaccgtgatttctttcttttgcataatcggatactattgcctcaaggttcctcttgtgattttcaaacgggagaaagaggtggcaaggaagctcgaatttgacggactgtacatcaccgagcagccctccgaggatgatataaaagggcagtgggacaggctggtcatcaatactcaatcgttccccaataactattgggacaagttcgttaagcgtaaggtaatggataagtacggcgaattttacggccgggacagaatctcagagctcctgggtatggataaggccgcactggatttctctgacgcccgtgagaagaaaaaacctaagaaggactccagcctgtctgcagtgcttaatagtatcgatgtgaagtatcagatgtggaagttgggagtcgtttttaccgacaattcattcttgtacctagcctggtatatgacaatgagcgtgttgggtcattacaacaactttttctttgctgctcacctcttggacatagccatgggctttaaaacactcaggacaatcctaagttcagtgacccacaatggcaaacagctggtgctgaccgtgggactgttggccgtagtcgtttacctgtacacagtggttgcctttaacttttttaggaaattctacaacaaatccgaagacggtgacactccggacatgaagtgcgatgatatgcttacctgttacatgtttcacatgtatgtgggcgtcagggcggggggcggcatcggagatgagatcgaggaccctgctggcgatgaatacgagatctataggataatcttcgatatcacatttttcttctttgtgatcgtcatactgctcgccataattcaggggctgattatcgatgcttttggggaattgcgggatcaacaggagcaggtgaaggaggacatggaggtgttttctgatgtgtcatataagcagaggtag

SEQ ID NO: 286241 - DNA, 645 bp, Artificial Sequence
  derived and/or modified sequence
agtctgttttgtaagctgggggttctcgttcgtcacagaatttccctgtttggaaacgacgcgacatccatcgtcaattgtctgcacattctcgggcaaactctggatgctaggaccgtgatgaagaccggcctggagagtgtcaaatcagcactgagggcgtttctcgataatgctgccgaggatctggaaaagacgatggaaaacctgaaacaaggccagttcacccacacaaggaaccaacccaaaggtgtgacccagatcatcaattatacgaccgttgcccttctgcccatgctgagctctttgtttgaacacatcggacagcaccagtttggagaggatctgatccttgaggatgtgcaagtgtcgtgttataggattctgacatctctgtacgctctgggaactagtaagtctatctacgtggaaaggcagaggtccgccctcggcgaatgcctggccgccttcgcaggggccttcccggtggctttcctcgagacccaccttgacaagcacaacatctactccatttacaatacgaagtctagccgggagcgagccgccctaagcctgcccaccaacgtcgaggatgtttgtcccaacatccctagtctcgaaaagttgatggaggaaatagtgtag

SEQ ID NO: 286242 - DNA, 987 bp, Artificial Sequence
  derived and/or modified sequence
atggagcccaccctgcgcatcctggccatcctgcacacagtcatctccttcttctgcatcatcggctactactgcctgaaggtgcccctggtgatcttcaagcgggagaaggaggtggccaggaagctggagtttgatggcctgtacatcacagagcagcccagtgaagatgacatcaagggccagtgggaccggctggtgatcaacacccagagcttccccaacaactactgggacaagtttgtgaagaggaaggtgatggacaagtacggggagttctacggccgggaccgcatcagcgagctgctgggcatggacaaggccgccctggacttcagtgatgcccgggagaagaagaagcccaagaaggacagcagcctgtctgctgtgctgaacagcattgatgtgaagtaccagatgtggaagctgggcgtggtgttcacagacaacagcttcctgtacctggcctggtacatgaccatgtctgtgctgggccactacaacaacttcttctttgctgcccacctgctggacatcgccatgggcttcaagaccctgcggaccatcctgagctctgtgacccacaacgggaagcagctggtgctgactgtgggcctgctggccgtggtggtgtacctgtacacagtggtggccttcaacttcttcaggaagttctacaacaagtcagaagatggagacaccccagacatgaagtgtgatgacatgctgacctgctacatgttccacatgtatgtgggcgtgcgggccggcggcggcattggagatgaaattgaagatcctgctggagatgaatatgagatctaccgcatcatctttgacatcaccttcttcttcttcgtcatcgtcatcctgctggccatcatccagggcctcatcattgatgcctttggagagctgcgggaccagcaggagcaggtgaaggaggacatggaggtgttcagtgatgtgtcctacaagcagaggtag

SEQ ID NO: 286243 - DNA, 645 bp, Artificial Sequence
  derived and/or modified sequence
agcctcttctgcaagctgggcgtgctggtgcgccaccgcatcagcctgtttggaaatgatgccaccagcatcgtgaactgcctgcacatcctgggccagaccctggatgccaggacagtgatgaagacaggcctggagagcgtgaagagcgccctgcgggccttcctggacaatgctgctgaggacctggagaagaccatggagaacctgaagcagggccagttcacccacaccaggaaccagcccaagggcgtgacccagatcatcaactacaccaccgtggccctgctgcccatgctgagcagcctgtttgagcacatcggccagcaccagtttggagaggacctgatcctggaggatgtgcaggtgtcctgctaccgcatcctgaccagcctgtatgccctgggcaccagcaagagcatctacgtggagcggcagaggtctgccctgggggagtgcctggccgcctttgctggggccttccctgtggccttcctggagacccacctggacaagcacaacatctacagcatctacaacaccaagagcagccgggagcgggccgccctgagcctgcccaccaacgtggaggatgtgtgccccaacatccccagcctggagaagctgatggaggagatcgtgtag

SEQ ID NO: 286244 - DNA, 987 bp, Artificial Sequence
  derived and/or modified sequence
atggagcccaccctgcggatcctggccatcctgcacaccgtgatctcatttttctgcatcattgggtactactgcctgaaagtcccactcgtgatctttaaacgcgagaaggaagtggcccgtaaactagagttcgatggtctgtacattactgagcaaccaagcgaagatgatataaaaggacaatgggacagacttgttatcaatacccagtctttccctaataactattgggacaaattcgtgaagcggaaagtgatggacaaatacggcgagttctatgggagggatcgcattagcgaactgttgggaatggataaggcagcacttgatttcagcgatgcgagggaaaaaaaaaagccaaagaaggactcttccctgtccgccgtcctcaactctattgacgtaaagtatcaaatgtggaaactgggtgtggtctttacggataactcatttctctatctggcttggtatatgactatgtccgtcctcggtcattacaataatttcttctttgcagcccatttattggatattgccatgggcttcaagacactgcgtaccattctgtcctccgtgacacataacggcaagcaattggttttaactgtaggactccttgccgtcgtggtgtacctgtacaccgtggtggcattcaatttcttccggaagttttacaacaaatcggaagacggggacactcccgatatgaagtgcgacgatatgctgacttgttacatgttccacatgtacgttggcgtgcgcgcaggcggtggtatcggcgatgaaattgaagacccggcaggcgatgaatatgagatatatcgcattatcttcgatattacattttttttcttcgtgatcgtaattctactcgccattatacaggggcttatcatcgatgcgtttggcgaactgcgagatcagcaggagcaggtgaaagaagatatggaagtattctctgacgtgtcgtataagcagcgctag

SEQ ID NO: 286245 - DNA, 645 bp, Artificial Sequence
  derived and/or modified sequence
agcctgttctgcaagctgggcgtgctggtgcggcaccggatcagcctgttcggtaatgacgccacctcaattgttaactgcttgcatattttagggcaaactctcgatgcccgcactgttatgaaaactgggctggaatccgtcaaaagcgccctaagagctttcctagacaatgcggccgaggacctagagaagaccatggaaaatctgaagcaaggacagtttacccacacccggaaccagccaaaaggggtgactcagatcattaactatacaacagttgccctcctgcccatgctgtcttccctgtttgaacatattgggcagcaccagtttggagaggatctgattctggaggatgtgcaggtctcctgctaccggatcctcacaagcctctatgctctgggaacctctaaaagcatctatgtcgagaggcagcggagcgccctcggagaatgccttgccgcttttgccggggcttttcccgtcgcatttctcgagacacacctggataaacacaatatctatagtatttataacactaagtcgagtcgggagcgcgcagccctgtcactgccgacaaacgtggaggacgtgtgccctaacatcccatccctcgaaaaactgatggaggaaatcgtgtag

SEQ ID NO: 286246 - DNA, 987 bp, Artificial Sequence
  derived and/or modified sequence
atggagcctaccctaaggatactggccattttgcatactgtaatttcgttcttttgcatcattgggtactactgtttaaaagtgccccttgtgatctttaagcgcgagaaggaagtcgcacggaaactggagtttgatggcctctacattactgagcagccttcagaggatgatattaagggacagtgggatcggctggtgattaacacccagtcctttcctaataattattgggataagttcgtgaagagaaaagttatggataagtacggtgagttttacggacgcgatcgcatctctgaactcctgggtatggataaggccgctctggactttagtgacgccagggagaaaaaaaaaccaaaaaaagactcctctctgtccgccgtgctaaattctattgacgtgaaatatcagatgtggaagctgggggtggtgtttactgacaattcattcctgtacttggcctggtacatgactatgtctgtccttgggcactataacaacttctttttcgcagcccatttgttagacatcgccatgggcttcaagaccttgagaaccattttgagcagcgtgacacataacggcaagcagttggtgctcactgtgggattgttggcagtggtggtgtacctctatacggtagtcgcttttaacttcttcagaaaattttataacaagtctgaggatggggataccccagacatgaagtgcgatgatatgcttacttgttacatgttccacatgtacgtaggggttagggcaggtggtggaattggagatgagatagaggaccccgcaggtgacgaatacgagatttaccggattatctttgacattaccttcttctttttcgtcatcgtgatcctactggcaataattcaaggcctgatcattgacgccttcggagaactgagggaccagcaagagcaagtaaaggaagacatggaggtcttctcggatgtgtcttacaagcagcgctag

SEQ ID NO: 286247 - DNA, 645 bp, Artificial Sequence
  derived and/or modified sequence
tcattattttgcaagcttggtgtgctggtgcggcataggatatcacttttcggaaacgatgccacctccattgtcaattgcctgcatatccttggccaaactcttgatgctcgcactgttatgaagaccggtcttgaatctgtgaagagcgcacttcgggcattcttggataatgcagcggaagatctggagaagactatggaaaacctgaagcagggtcaatttacacatactagaaatcagccaaaaggcgtgacccaaattattaactataccaccgtggccctcttacccatgctttcaagtcttttcgaacacatcggacagcatcagtttggcgaagatctgatcctagaggatgtccaagtctcttgctatagaattctgacaagcctctatgccttgggcactagcaaaagcatctatgtcgagcgccaaaggagcgccttgggcgaatgcttagcagcctttgctggggcatttcccgtagcctttcttgaaacccacctggataagcacaacatttacagcatctataataccaagtcttccagggagcgtgcggctctgtccctccccactaatgttgaagacgtgtgtcctaacatccctagcctggagaagctaatggaggagattgtgtag

SEQ ID NO: 286248 - DNA, 987 bp, Artificial Sequence
  derived and/or modified sequence
atggagcccaccctgagaatcctggccatcctgcacaccgtgatcagcttcttctgcatcatcggctactactgcctgaaggtgcccctggtgatcttcaagagagagaaggaggtggccagaaagctggagttcgacggcctgtacatcaccgagcagcccagcgaggacgacatcaagggccagtgggacagactggtgatcaacacccagagcttccccaacaactactgggacaagttcgtgaagagaaaggtgatggacaagtacggcgagttctacggcagagacagaatcagcgagctgctgggcatggacaaggccgccctggacttcagcgacgccagagagaagaagaagcccaagaaggacagcagcctgagcgccgtgctgaacagcatcgacgtgaagtaccagatgtggaagctgggcgtggtgttcaccgacaacagcttcctgtacctggcctggtacatgaccatgagcgtgctgggccactacaacaacttcttcttcgccgcccacctgctggacatcgccatgggcttcaagaccctgagaaccatcctgagcagcgtgacccacaacggcaagcagctggtgctgaccgtgggcctgctggccgtggtggtgtacctgtacaccgtggtggccttcaacttcttcagaaagttctacaacaagagcgaggacggcgacacccccgacatgaagtgcgacgacatgctgacctgctacatgttccacatgtacgtgggcgtgagagccggcggcggcatcggcgacgagatcgaggaccccgccggcgacgagtacgagatctacagaatcatcttcgacatcaccttcttcttcttcgtgatcgtgatcctgctggccatcatccagggcctgatcatcgacgccttcggcgagctgagagaccagcaggagcaggtgaaggaggacatggaggtgttcagcgacgtgagctacaagcagagatag

SEQ ID NO: 286249 - DNA, 645 bp, Artificial Sequence
  derived and/or modified sequence
agcctgttctgcaagctgggcgtgctggtgagacacagaatcagcctgttcggcaacgacgccaccagcatcgtgaactgcctgcacatcctgggccagaccctggacgccagaaccgtgatgaagaccggcctggagagcgtgaagagcgccctgagagccttcctggacaacgccgccgaggacctggagaagaccatggagaacctgaagcagggccagttcacccacaccagaaaccagcccaagggcgtgacccagatcatcaactacaccaccgtggccctgctgcccatgctgagcagcctgttcgagcacatcggccagcaccagttcggcgaggacctgatcctggaggacgtgcaggtgagctgctacagaatcctgaccagcctgtacgccctgggcaccagcaagagcatctacgtggagagacagagaagcgccctgggcgagtgcctggccgccttcgccggcgccttccccgtggccttcctggagacccacctggacaagcacaacatctacagcatctacaacaccaagagcagcagagagagagccgccctgagcctgcccaccaacgtggaggacgtgtgccccaacatccccagcctggagaagctgatggaggagatcgtgtag

SEQ ID NO: 286250 - DNA, 1425 bp, Artificial Sequence
  derived and/or modified sequence
agcttagccatctaattttttagcatgcattggaatcctcagaatttttggttgaataagaatgaattttaaaagtctccacttcttctgtggttgaaggaaaggagctccccacgagaagttcaagtgaaaatgccaaagtgacaagcctggacagcagctcccatagaatcatcgcagttcactatgtactagaggagagcagcggctacatggagcccacgttgcgtatcttagctattctgcacacggtcatttctttcttctgcatcattggatactactgcttgaaagtcccattggttatttttaagcgagaaaaggaagtggcacggaaattggaatttgatgggctttatattacagaacagccttcagaagatgatattaaaggccagtgggatagactcgtaatcaacacacagtcatttcccaacaactactgggacaaatttgttaaaagaaaggttatggataaatatggagagttctacggccgagacagaatcagtgaattacttggcatggacaaggcagctctggacttcagtgatgccagagaaaagaagaagccaaagaaagacagctccttatcagctgtactgaactccattgatgtgaagtatcagatgtggaaactaggagtcgttttcactgacaactccttcctctacctagcctggtatatgactatgtctgttcttggacactataacaactttttttttgccgctcaccttctcgacattgctatgggattcaagacattaagaaccatcttgtcctcagtaactcacaatggcaaacagctcgtattaaccgttggcttattagctgttgttgtatacctatacactgtggtggcattcaattttttccgaaaattctacaataaaagtgaagatggtgatacaccagatatgaaatgtgacgatatgctaacatgctatatgttccacatgtatgttggagttcgtgctggaggagggatcggggatgaaatcgaagacccagcaggagatgaatatgagatctatcgaatcatctttgacatcactttcttcttctttgttattgtcattctcttggccataatacaaggtctaattattgatgcttttggagaactaagagaccaacaggaacaagtcaaagaagacatggaggttttttctgatgtatcttataaacaaagatgaaacagaacacacaggacaggaatcttatgtctggaagatgtatcaagaaaggtgttgggaatttttcccagcaggggattgcttccggaaacagtatgaagaccagctaaattaaactcagacccaatcacctctaaaaaccaaaaccctacccctctctctccctctctcaatttctctgctctcttggaaacattttgctgattttgtgaattgccagcgttgt

SEQ ID NO: 286251 - protein, 214 aa, Artificial Sequence
  derived and/or modified sequence
SLFCKLGVLVRHRISLFGNDATSIVNCLHILGQTLDARTVMKTGLESVKSALRAFLDNAAEDLEKTMENLKQGQFTHTRNQPKGVTQIINYTTVALLPMLSSLFEHIGQHQFGEDLILEDVQVSCYRILTSLYALGTSKSIYVERQRSALGECLAAFAGAFPVAFLETHLDKHNIYSIYNTKSSRERAALSLPTNVEDVCPNIPSLEKLMEEIV

SEQ ID NO: 286252 - protein, 4973 aa, Artificial Sequence
  derived and/or modified sequence
LGPRSSSNKLSNKKMMKWFCSAPQPSTKNNRSYAWQQKDLATDFVSWSPLPIPRMCPQTSPSAPLCWSSPSLSGRCRRCWLTPWRNQKGQLDIIKWSFGLKTAQGGGHRTLLYGHAILLRHSYSGMYLCCLSTSRSSTDKLAFDVGLQEDTTGEACWWTIHPASKQRSEGEKVRVGDDLILVSVSSERYLHLSYGNGSLHVDAAFQQTLWSVAPISSGSEAAQGYLIGGDVLRLLHGHMDECLTVPSGEHGEEQRRTVHYEGGAVSVHARSLWRLETLRVAWSGSHIRWGQPFRLRHVTTGKYLSLMEDKNLLLMDKEKADVKSTAFTFRSSKEKLDVGVRKEVDGMGTSEIKYGDSVCYIQHVDTGLWLTYQSVDVKSVRMGSIQRKAIMHHEGHMDDGISLSRSQHEESRTARVIRSTVFLFNRFIRGLDALSKKAKASTVDLPIESVSLSLQDLIGYFHPPDEHLEHEDKQNRLRALKNRQNLFQEEGMINLVLECIDRLHVYSSAAHFADVAGREAGESWKSILNSLYELLAALIRGNRKNCAQFSGSLDWLISRLERLEASSGILEVLHCVLVESPEALNIIKEGHIKSIISLLDKHGRNHKVLDVLCSLCVCHGVAVRSNQHLICDNLLPGRDLLLQTRLVNHVSSMRPNIFLGVSEGSAQYKKWYYELMVDHTEPFVTAEATHLRVGWASTEGYSPYPGGGEEWGGNGVGDDLFSYGFDGLHLWSGCIARTVSSPNQHLLRTDDVISCCLDLSAPSISFRINGQPVQGMFENFNIDGLFFPVVSFSAGIKVRFLLGGRHGEFKFLPPPGYAPCYEAVLPKEKLKVEHSREYKQERTYTRDLLGPTVSLTQAAFTPIPVDTSQIVLPPHLERIREKLAENIHELWVMNKIELGWQYGPVRDDNKRQHPCLVEFSKLPEQERNYNLQMSLETLKTLLALGCHVGISDEHAEDKVKKMKLPKNYQLTSGYKPAPMDLSFIKLTPSQEAMVDKLAENAHNVWARDRIRQGWTYGIQQDVKNRRNPRLVPYTLLDDRTKKSNKDSLREAVRTLLGYGYNLEAPDQDHAARAEVCSGTGERFRIFRAEKTYAVKAGRWYFEFETVTAGDMRVGWSRPGCQPDQELGSDERAFAFDGFKAQRWHQGNEHYGRSWQAGDVVGCMVDMNEHTMMFTLNGEILLDDSGSELAFKDFDVGDGFIPVCSLGVAQVGRMNFGKDVSTLKYFTICGLQEGYEPFAVNTNRDITMWLSKRLPQFLQVPSNHEHIEVTRIDGTIDSSPCLKVTQKSFGSQNSNTDIMFYRLSMPIECAEVFSKTVAGGLPGAGLFGPKNDLEDYDADSDFEVLMKTAHGHLVPDRVDKDKEATKPEFNNHKDYAQEKPSRLKQRFLLRRTKPDYSTSHSARLTEDVLADDRDDYDFLMQTSTYYYSVRIFPGQEPANVWVGWITSDFHQYDTGFDLDRVRTVTVTLGDEKGKVHESIKRSNCYMVCAGESMSPGQGRNNNGLEIGCVVDAASGLLTFIANGKELSTYYQVEPSTKLFPAVFAQATSPNVFQFELGRIKNVMPLSAGLFKSEHKNPVPQCPPRLHVQFLSHVLWSRMPNQFLKVDVSRISERQGWLVQCLDPLQFMSLHIPEENRSVDILELTEQEELLKFHYHTLRLYSAVCALGNHRVAHALCSHVDEPQLLYAIENKYMPGLLRAGYYDLLIDIHLSSYATARLMMNNEYIVPMTEETKSITLFPDENKKHGLPGIGLSTSLRPRMQFSSPSFVSISNECYQYSPEFPLDILKSKTIQMLTEAVKEGSLHARDPVGGTTEFLFVPLIKLFYTLLIMGIFHNEDLKHILQLIEPSVFKEAATPEEESDTLEKELSVDDAKLQGAGEEEAKGGKRPKEGLLQMKLPEPVKLQMCLLLQYLCDCQVRHRIEAIVAFSDDFVAKLQDNQRFRYNEVMQALNMSAALTARKTKEFRSPPQEQINMLLNFKDDKSECPCPEEIRDQLLDFHEDLMTHCGIELDEDGSLDGNSDLTIRGRLLSLVEKVTYLKKKQAEKPVESDSKKSSTLQQLISETMVRWAQESVIEDPELVRAMFVLLHRQYDGIGGLVRALPKTYTINGVSVEDTINLLASLGQIRSLLSVRMGKEEEKLMIRGLGDIMNNKVFYQHPNLMRALGMHETVMEVMVNVLGGGESKEITFPKMVANCCRFLCYFCRISRQNQKAMFDHLSYLLENSSVGLASPAMRGSTPLDVAAASVMDNNELALALREPDLEKVVRYLAGCGLQSCQMLVSKGYPDIGWNPVEGERYLDFLRFAVFCNGESVEENANVVVRLLIRRPECFGPALRGEGGNGLLAAMEEAIKIAEDPSRDGPSPNSGSSKTLDTEEEEDDTIHMGNAIMTFYSALIDLLGRCAPEMHLIHAGKGEAIRIRSILRSLIPLGDLVGVISIAFQMPTIAKDGNVVEPDMSAGFCPDHKAAMVLFLDRVYGIEVQDFLLHLLEVGFLPDLRAAASLDTAALSATDMALALNRYLCTAVLPLLTRCAPLFAGTEHHASLIDSLLHTVYRLSKGCSLTKAQRDSIEVCLLSICGQLRPSMMQHLLRRLVFDVPLLNEHAKMPLKLLTNHYERCWKYYCLPGGWGNFGAASEEELHLSRKLFWGIFDALSQKKYEQELFKLALPCLSAVAGALPPDYMESNYVSMMEKQSSMDSEGNFNPQPVDTSNITIPEKLEYFINKYAEHSHDKWSMDKLANGWIYGEIYSDSSKVQPLMKPYKLLSEKEKEIYRWPIKESLKTMLAWGWRIERTREGDSMALYNRTRRISQTSQVSVDAAHGYSPRAIDMSNVTLSRDLHAMAEMMAENYHNIWAKKKKMELESKGGGNHPLLVPYDTLTAKEKAKDREKAQDILKFLQINGYAVSRGFKDLELDTPSIEKRFAYSFLQQLIRYVDEAHQYILEFDGGSRGKGEHFPYEQEIKFFAKVVLPLIDQYFKNHRLYFLSAASRPLCSGGHASNKEKEMVTSLFCKLGVLVRHRISLFGNDATSIVNCLHILGQTLDARTVMKTGLESVKSALRAFLDNAAEDLEKTMENLKQGQFTHTRNQPKGVTQIINYTTVALLPMLSSLFEHIGQHQFGEDLILEDVQVSCYRILTSLYALGTSKSIYVERQRSALGECLAAFAGAFPVAFLETHLDKHNIYSIYNTKSSRERAALSLPTNVEDVCPNIPSLEKLMEEIVELAESGIRYTQMPHVMEVILPMLCSYMSRWWEHGPENNPERAEMCCTALNSEHMNTLLGNILKIIYNNLGIDEGAWMKRLAVFSQPIINKVKPQLLKTHFLPLMEKLKKKAATVVSEEDHLKAEARGDMSEAELLILDEFTTLARDLYAFYPLLIRFVDYNRAKWLKEPNPEAEELFRMVAEVFIYWSKSHNFKREEQNFVVQNEINNMSFLITDTKSKMSKAAVSDQERKKMKRKGDRYSMQTSLIVAALKRLLPIGLNICAPGDQELIALAKNRFSLKDTEDEVRDIIRSNIHLQGKLEDPAIRWQMALYKDLPNRTDDTSDPEKTVERVLDIANVLFHLEQKSKRVGRRHYCLVEHPQRSKKAVWHKLLSKQRKRAVVACFRMAPLYNLPRHRAVNLFLQGYEKSWIETEEHYFEDKLIEDLAKPGAEPPEEDEGTKRVDPLHQLILLFSRTALTEKCKLEEDFLYMAYADIMAKSCHDEEDDDGEEEVKSFEVTGSQRSKEKEMEKQKLLYQQARLHDRGAAEMVLQTISASKGETGPMVAATLKLGIAILNGGNSTVQQKMLDYLKEKKDVGFFQSLAGLMQSCSVLDLNAFERQNKAEGLGMVTEEGSGEKVLQDDEFTCDLFRFLQLLCEGHNSDFQNYLRTQTGNNTTVNIIISTVDYLLRVQESISDFYWYYSGKDVIDEQGQRNFSKAIQVAKQVFNTLTEYIQGPCTGNQQSLAHSRLWDAVVGFLHVFAHMQMKLSQDSSQIELLKELMDLQKDMVVMLLSMLEGNVVNGTIGKQMVDMLVESSNNVEMILKFFDMFLKLKDLTSSDTFKEYDPDGKGVISKRDFHKAMESHKHYTQSETEFLLSCAETDENETLDYEEFVKRFHEPAKDIGFNVAVLLTNLSEHMPNDTRLQTFLELAESVLNYFQPFLGRIEIMGSAKRIERVYFEISESSRTQWEKPQVKESKRQFIFDVVNEGGEKEKMELFVNFCEDTIFEMQLAAQISESDLNERSANKEESEKERPEEQGPRMAFFSILTVRSALFALRYNILTLMRMLSLKSLKKQMKKVKKMTVKDMVTAFFSSYWSIFMTLLHFVASVFRGFFRIICSLLLGGSLVEGAKKIKVAELLANMPDPTQDEVRGDGEEGERKPLEAALPSEDLTDLKELTEESDLLSDIFGLDLKREGGQYKLIPHNPNAGLSDLMSNPVPMPEVQEKFQEQKAKEEEKEEKEETKSEPEKAEGEDGEKEEKAKEDKGKQKLRQLHTHRYGEPEVPESAFWKKIIAYQQKLLNYFARNFYNMRMLALFVAFAINFILLFYKVSTSSVVEGKELPTRSSSENAKVTSLDSSSHRIIAVHYVLEESSGYMEPTLRILAILHTVISFFCIIGYYCLKVPLVIFKREKEVARKLEFDGLYITEQPSEDDIKGQWDRLVINTQSFPNNYWDKFVKRKVMDKYGEFYGRDRISELLGMDKAALDFSDAREKKKPKKDSSLSAVLNSIDVKYQMWKLGVVFTDNSFLYLAWYMTMSVLGHYNNFFFAAHLLDIAMGFKTLRTILSSVTHNGKQLVLTVGLLAVVVYLYTVVAFNFFRKFYNKSEDGDTPDMKCDDMLTCYMFHMYVGVRAGGGIGDEIEDPAGDEYEIYRIIFDITFFFFVIVILLAIIQGLIIDAFGELRDQQEQVKEDMETKCFICGIGNDYFDTVPHGFETHTLQEHNLANYLFFLMYLINKDETEHTGQESYVWKMYQERCWEFFPAGDCFRKQYEDQLN

SEQ ID NO: 286253 - DNA, 14922 bp, Artificial Sequence
  derived and/or modified sequence
ctgggcccaagaagcagtagcaataagctgtcaaataagaaaatgatgaaatggttctgctcagctccccagccttcgactaaaaataaccgatcttatgcctggcaacagaaggacctcgctaccgactttgtgtcatggtctcctctacctattccaaggatgtgtcctcagacaagcccatcagcaccgttatgttggtcctcgccgtctctgtcaggaagatgtcgtaggtgttggctgacgccatggcggaatcagaagggccagttggatatcattaagtggagttttggactaaagaccgctcagggcggtgggcatcgcactctcctctacgggcatgccattctcctacggcatagctactcgggaatgtacctgtgctgtctttccacaagcaggtcttctaccgacaagctcgcattcgacgtggggttgcaggaagacacaaccggcgaagcatgctggtggacaatccacccggctagcaagcaaagatcagagggtgagaaggtgagggtgggagacgatctcattttagtgagtgtatccagcgagagatacctgcatctgtcttatggaaacggttccctccacgttgacgccgcattccaacaaacactctggagcgtggccccaattagttcaggctcggaggcagcccagggctacttaatcggtggagatgtgctgcgactgctgcacggacatatggacgaatgcttgaccgtgccatcaggagagcacggcgaggagcagcgtcgaacggttcactacgaggggggggcagtgtcagttcacgctcggtctctctggcggctggagactcttcgcgtagcgtggtctggtagtcacataaggtgggggcaacccttccgacttcggcacgtgacaactgggaagtacctaagtctgatggaagataaaaaccttttgttgatggacaaggaaaaggctgatgtcaaatctacagcttttacgtttaggagttctaaggagaaattggacgtcggtgttcggaaggaagtggacggaatggggacaagtgaaattaagtatggagacagcgtttgctacatacagcatgttgacaccggactttggctgacctatcagtccgtcgatgtgaaatccgtgcgaatgggcagcattcagcgcaaggctatcatgcaccacgaaggccacatggatgatggcatttcactgtctagaagtcaacacgaggagtcccggaccgccagggtcattaggagcactgtattccttttcaatagattcatcaggggcttggatgctctgtccaagaaggctaaggcctcaacagttgatctccccattgagtcagtgtcgttgtcgctacaggatctgataggctatttccaccctccggacgagcatctggagcatgaggacaagcagaatcggctccgcgcccttaaaaacaggcagaacctattccaggaagagggaatgataaatttggtcctggaatgcatcgatcgtctgcacgtctactccagcgccgctcattttgctgatgttgccggccgcgaggccggcgaatcatggaaaagcattctcaatagcttatatgagcttctggcagctttaattcgtggtaatcgcaagaattgtgcccaatttagcggatctcttgattggctgattagtagactagagaggctggaagcatctagtggtattctcgaagtgctccattgcgtgctggtggagtcacctgaagcacttaatatcatcaaagaaggccacattaaatctattattagccttttggacaagcacggtcgaaaccataaggttcttgacgtcctttgttctctgtgcgtctgccatggagttgccgtgcggagtaatcaacaccttatctgcgataatttattaccaggtcgggatctgctactgcagactagactagttaaccacgtgtcgagcatgagaccgaacatttttctgggtgtgagtgaaggctccgcacagtacaaaaaatggtattatgagcttatggttgaccatacggagcccttcgtaaccgccgaggccactcatcttcgtgtcggctgggcgagcactgaggggtatagcccctaccctggagggggagaggaatggggcgggaatggcgtaggagatgacctgttttcatacggcttcgacggattgcacctctggtccggctgcatcgcccgtacagtctcgagtcctaatcagcatctccttaggactgacgacgtcatttcttgttgcttggatcttagtgcaccaagcattagtttccgaatcaatggccagcctgtccagggtatgttcgagaatttcaacattgatggtctttttttcccagtggtgtccttctctgctgggattaaggtgaggtttttgctggggggccgacacggcgaattcaaatttctcccccccccgggttacgcaccctgctatgaagccgtcctccccaaggagaaactcaaagtggaacacagccgcgaatacaagcaggagagaacatacactagagatctgttgggccccactgttagtttaacccaggccgccttcactccaatcccagtggacacatcacagatcgtgttgcctccacacctggaacgaatccgggaaaagttggccgagaacattcatgaactgtgggtgatgaacaagatcgaactgggatggcagtatggccccgtacgggacgacaacaaaagacagcacccctgtctggtggaattctccaagcttcccgaacaggaaagaaactataatcttcaaatgtcattggagactctgaagacactgctggccctcggttgtcacgttgggatctccgacgagcacgcagaggacaaggtgaaaaaaatgaaactcccaaaaaattatcagcttacgagcgggtacaaacccgccccaatggacctgtctttcatcaagttgacacctagccaggaggccatggttgataagcttgccgaaaatgcccacaatgtctgggcccgagacagaataaggcagggatggacttacggaatccagcaagatgtaaagaatcgaaggaatccaaggttggtcccctatacactgctcgacgacagaaccaagaagtcaaacaaagattccttgcgggaggccgtgcgcacactgctgggatacgggtataatcttgaggcccctgatcaggaccacgctgctagagcggaggtgtgttcaggtacaggagagcggtttcggattttccgtgctgaaaagacctatgcagtcaaggccggccgatggtactttgagttcgaaacagttacggctggcgacatgcgcgtgggctggtctcgtcctggatgccaacctgaccaggagcttggttctgatgagcgcgcattcgccttcgacggctttaaggctcaacgctggcatcaggggaatgagcactatgggcgaagttggcaagctggagacgtggtggggtgcatggtggacatgaacgaacataccatgatgttcacgttgaacggagaaattctccttgatgacagcggttccgagctggcctttaaggattttgatgtaggcgatggtttcatccctgtatgtagcctgggggtcgctcaggtgggacgaatgaattttggaaaggacgtgtccacattgaaatatttcacaatctgtggattgcaagagggttacgagccatttgccgttaacactaacagagacatcacaatgtggctctctaagaggctgccccaatttctgcaagttccctctaaccacgagcatatagaggtgaccaggatcgacggaactattgactctagtccctgcctcaaagtaacccagaaatcattcggcagtcagaacagcaataccgatattatgttttatcggctctcaatgcctatcgagtgcgctgaggtgttcagcaaaacggtggccggaggactgccgggcgcaggcttgttcggccccaaaaatgacctggaagactatgatgctgactcagatttcgaagttctgatgaaaaccgcacacggacatttggttcccgaccgagtggacaaagacaaagaagcaaccaaaccagaattcaacaaccacaaggactatgcccaagagaagccatctagactaaaacaacgatttctcctgagaagaactaagcctgactacagcacgtcacattccgccagactaacggaggacgtgctcgctgacgacagggatgattacgatttccttatgcagacatccacgtactactatagcgtgcggatctttcctggccaggaacccgccaacgtttgggtgggttggatcacttcggatttccaccagtatgatactggatttgatctcgacagggtccgcacggttaccgtcacactaggagacgaaaaaggcaaggtgcacgagagcataaagcgatcaaattgttacatggtttgtgcgggagaaagcatgtccccaggtcaaggcaggaacaacaatgggctagaaattggatgtgtcgtggacgccgccagcgggctgctaacctttatcgccaatggaaaggaactgtccacatattatcaagtggagccgtcaaccaagctgttcccagccgtgttcgcccaagctacatcacccaacgtgttccagttcgaattaggcagaatcaaaaatgtgatgcctctctccgccggcctgttcaaaagcgaacacaaaaaccccgtgccgcagtgtcccccccgcctccacgtccagttcctgagccatgtgctttggtcacgaatgcccaaccagtttctcaaagttgacgtgtctcgcatctccgaacgccaggggtggctggttcaatgccttgaccccctgcagttcatgtcattacatatccccgaggagaatcgaagcgtggacattctggagctcactgaacaggaggaactcctgaaattccattaccatacgcttaggctttactccgcagtgtgtgcactaggtaatcaccgggttgcacacgccttgtgcagccacgtggatgaaccccagttgctgtatgcgattgaaaataaatatatgcctggcctgctgcgggctggctattatgacttacttattgacatacatctgtctagctatgccactgctagacttatgatgaacaatgagtatatcgtccccatgacagaggagacaaagtccattactctttttcctgacgaaaacaagaagcacgggctccccggaattggtttgtctacctctcttcgacctcgcatgcaatttagcagcccttccttcgtctcaattagtaacgagtgctaccaatattctcctgagtttcccctggacatcttaaaatccaaaactatccagatgttgaccgaggcagtgaaagaaggcagcctgcacgcacgtgaccccgttggcggaacaacagagttcctattcgtgcccctgatcaagctgttctatactctgttgatcatggggatcttccataacgaagacttaaaacacattttgcaactcatagagccttccgtgtttaaagaagccgctactcctgaggaggagtctgacacattggaaaaggaactgtctgtggatgacgccaaactacaaggcgctggcgaagaggaagctaagggagggaagagacctaaggaggggctgctccaaatgaagctgcccgaacctgtgaagctgcagatgtgcctgctactgcagtatctttgtgactgccaagttaggcatcggattgaggctatagtcgctttttccgacgacttcgtggcgaagctccaggataatcagaggtttaggtacaacgaagttatgcaggccttaaatatgtctgctgctctcactgcaaggaagactaaagaattcagatctcccccccaggagcagatcaacatgctgctgaacttcaaagatgacaagagtgaatgtccatgcccggaagagatccgggaccagctattggatttccacgaggatctcatgacacattgtggaattgagctggatgaggacggaagcctggatgggaactcagatctcactattagggggaggcttctgtctttggtggagaaggtgacctatctcaagaagaagcaggcagaaaagccggtggaatcagacagcaaaaagtcatccaccttgcaacagctgattagcgagacaatggtcaggtgggcacaagaaagtgtgattgaggaccccgaactcgttcgtgcaatgtttgtgctgttacacaggcagtatgatgggataggcggcctggtgcgcgctttaccaaaaacttatactatcaatggggtttctgtggaggataccataaaccttctggccagtctggggcagataagaagcctgctgtcagtgagaatgggaaaggaggaggaaaagttgatgataaggggactgggcgacataatgaataacaaggtgttctatcaacatcccaatcttatgcgagcgctgggtatgcatgaaactgtgatggaggtgatggtcaatgtgttggggggaggagagtctaaggagattaccttcccaaagatggtagcaaattgctgtcgttttctgtgctacttttgtagaatctctcgacagaatcagaaagcgatgttcgatcacctgtcctatctgctggaaaatagttccgtgggcctggctagtccagcgatgcgcggctcaaccccactggacgttgccgccgcgagcgtgatggataacaatgagctggccctggcgctgagggaacccgaccttgagaaggtggtgcgatatctcgccggctgcgggcttcagagctgtcaaatgctggtgagtaaaggttaccccgatattgggtggaacccagttgaaggagagcgatatctagatttcttgcgcttcgccgtgttctgtaacggggagagcgtggaagagaacgctaacgtcgtagtgagactgctgattcgaagaccagagtgtttcggccctgcattaagaggtgaggggggaaacggtctgctcgcagccatggaagaagcaattaagatagcagaggacccgagcagagatggaccctctcctaactcagggagcagcaagactttagataccgaggaggaagaggatgacacaatacacatgggtaacgccattatgactttttactctgctttaattgacctgcttggccgatgcgcacccgagatgcatctcattcatgctggcaagggggaggctataaggatcaggagtatcctgcgctcactgattccactgggagatctcgtgggtgtcatctcgatagcctttcagatgcccacaattgccaaggacggcaacgtggtcgaacccgatatgtccgccggcttctgcccagaccacaaggcagccatggtgctattcctggacagagtgtatggaattgaggttcaggacttcttactgcacttgctcgaagtggggttcttgcccgatttgcgcgccgccgctagcttagataccgccgcactgtctgcaactgacatggcactagcccttaataggtacctctgtaccgcagtgctgcccctccttacacggtgtgcccctctattcgccggtacagaacaccatgcatcactcatcgacagcttgctccatacagtctaccgcctaagcaagggctgcagcctcactaaagcccaaagagactccattgaagtctgtctgctgtcaatttgcggtcagttgaggccatcaatgatgcagcacttgttaagaaggctcgtctttgatgtgcctcttctaaacgagcacgccaagatgcctctgaaactgcttactaaccactacgagagatgttggaaatactactgtctcccaggcgggtggggcaacttcggagccgcatccgaggaagagctgcacttgtcgaggaaacttttttgggggattttcgatgcgctcagccagaagaaatatgagcaagaactgtttaagctagctcttccatgtttgtccgcagtagccggtgccctgccccctgactatatggagagcaactacgtctccatgatggagaaacagtctagtatggatagcgaaggcaactttaatcctcagcccgtggatactagtaatatcacaatccccgaaaaactggaatactttataaataagtatgccgagcactcccacgataagtggtccatggataagctggccaacggttggatttacggcgagatctattccgactcctcaaaggtccagcctctcatgaagccctataagctgttgtcagagaaggagaaggaaatctataggtggccaattaaggaatccttaaagaccatgctggcatggggatggcgaatcgagcgtacgagggagggggactccatggctctgtataataggactcgtcgcatctcccagacctctcaggtgtcagtggatgccgctcacggctacagtcccagggcaatcgatatgtcgaacgtcaccctatcacgggacctccacgctatggcggaaatgatggcggaaaattaccataacatatgggctaagaaaaaaaaaatggagctggaaagtaaggggggtggtaatcaccccctcctggtcccatacgataccttgactgccaaggaaaaggctaaggatagagagaaagcacaggatatactaaagttcctgcagattaatggttacgctgtgtcccggggctttaaagacttggagcttgacacgccttctattgaaaagcgctttgcctattcgttcctacaacagctgatcagatacgttgacgaggcccaccagtatatacttgagttcgacggagggtccagagggaagggagaacattttccctacgaacaggaaatcaagttcttcgccaaggtcgtacttccactcatcgaccaatacttcaagaatcatcgcctgtattttctgtctgcggccagcagacccctgtgttccggcggtcacgccagcaacaaggaaaaagaaatggttacctcattgttttgcaaattaggcgtgctagtgaggcacagaatctccttgttcggcaacgatgccacctccatcgtgaattgcttacatatcttaggacagaccctggacgcgaggactgtgatgaagacaggtcttgaaagtgttaaatccgccctgcgcgcgtttctggacaatgcagccgaggatctcgagaaaaccatggagaatctgaaacagggacagttcacgcacactaggaatcagccgaagggagtaactcaaatcattaattacaccactgttgccctgttgcctatgctctccagtttgttcgagcacattgggcagcaccagtttggcgaggacttaatattggaagatgtgcaggtcagttgttacagaattttaacctcactttacgcattgggcactagcaaatctatatacgtggaaaggcagagatcggccctaggagagtgcctggcagcattcgcaggcgcttttccagtggcctttctggagactcacctggacaagcacaacatctattccatttacaataccaagtcaagtagagagcgggcagcgctctccctccccaccaatgtcgaggatgtgtgtccaaatattcccagcttggaaaagctcatggaggaaattgtggagctggccgagtcaggcattcggtacacccagatgcctcatgtgatggaagtcatcctgccaatgctttgtagctacatgtcccggtggtgggaacacggaccggagaacaatccagagagagctgaaatgtgttgtaccgccctgaatagcgagcacatgaacacattgttagggaacattctcaagataatttataataatctgggcatcgacgagggggcctggatgaagagacttgctgtgttctcccagcccataattaacaaggtcaagccacagttgcttaaaactcactttttgcccctcatggagaagcttaagaagaaggcagccacggtcgtttctgaggaggaccacttgaaagccgaggcgcgcggagatatgagcgaagctgagctgttgatcctcgacgagttcacaacccttgctagagacttgtatgcgttctacccattgctgattcgtttcgtcgactataaccgcgccaaatggcttaaggagccaaaccccgaagctgaggagctattcagaatggtggccgaggtatttatttactggtctaagtcacacaactttaagagagaagagcagaattttgtggtccagaatgagatcaataatatgtcatttcttataactgacactaagtcaaagatgtccaaggccgctgtgtccgatcaagaaagaaaaaaaatgaagcggaaaggcgaccggtacagcatgcagacctccctgatcgtggctgcactgaaacggttgcttcctatcgggcttaacatttgcgcccccggcgaccaggagttaatcgctttggctaagaacaggttttccctgaaagacactgaggacgaggtcagagatatcattcgctctaacatccacctgcaggggaagctcgaagacccggctatcagatggcagatggcgctgtataaagatttgcctaacagaaccgacgatacatccgatcccgagaagactgtggaaagagtcctggacatcgccaacgtcctgtttcacttagagcagaagtcgaagcgggtggggaggcgccattattgcctcgtcgaacacccacagcgatcgaagaaggcggtgtggcataagttactatcgaagcagcgcaagagagcagtggttgcctgttttcgcatggcacccctgtataacctcccaagacacagggcagtaaatctgtttctccaggggtatgagaagtcttggatcgagacagaagagcactacttcgaagataagctcatcgaagaccttgccaagccaggcgccgagccaccagaggaagatgagggaacgaaacgtgtcgaccccctgcatcagttgattctgttattttcacgcacagcattgacggagaagtgcaagctggaagaggacttcctgtacatggcatatgccgacatcatggctaagtcatgccatgatgaagaggacgacgacggcgaggaggaagtgaagagctttgaagtcacaggctctcagcggagcaaggaaaaggaaatggagaagcagaaactgctgtaccagcaggcaagactgcacgaccgaggggcagccgagatggtgctgcaaaccatctctgcctccaaaggggagaccggccctatggttgccgccacattaaagctgggaatcgctatacttaatggaggaaactctacagtacagcagaagatgctggactatctcaaggagaaaaaggacgtcggattcttccagagcctggccggtctaatgcagtcatgttcggtgctcgacttgaatgcatttgagcgacagaataaggctgaaggactgggcatggtcacggaggagggaagcggggaaaaagtgttgcaagatgacgagtttacatgcgatctgtttagatttctgcagcttctctgcgaagggcacaactcggactttcagaactaccttcgcactcagaccgggaataacacaacggtcaacatcattatctcaaccgtcgactacttattaagggtgcaggagtcgataagtgacttttattggtactattccggtaaagatgtgatcgacgaacagggccaacgcaacttttcaaaagcaatccaggttgctaaacaggtgttcaacactttaactgaatacattcagggaccatgcacaggtaaccagcaaagcctggcacattcaaggctatgggacgcggtggtaggattcttgcatgtgttcgcccacatgcagatgaaactctcccaagactcttcccagatcgaactcttaaaagaactgatggacctgcagaaggacatggtggtaatgctcttgtccatgctcgagggtaatgtagtcaacgggacaatcggcaagcagatggtcgatatgctggtggagtcatccaacaacgtggaaatgattcttaagttttttgacatgttcttgaagctcaaggatctgacatcctctgacacctttaaggaatacgatcccgacggtaaaggagtcatcagtaagcgtgattttcataaggccatggaatctcacaaacattacacccagagcgagacagaatttctcctgtcctgtgcagaaacggacgaaaacgagacactggactacgaggagttcgtgaagcgcttccacgagccggcgaaggatatcggatttaacgtggccgtgttactcaccaacttgagcgaacatatgcccaatgatacgcggttacagactttcctggagcttgctgagagcgtgctgaattacttccagccattcctggggaggattgaaattatgggctctgcaaagagaatcgagcgggtatatttcgaaataagtgagtcctcacgcacacagtgggagaagcctcaggttaaggaatctaaacgacagtttatcttcgacgtggtcaacgaagggggagaaaaggagaagatggaactgttcgtgaacttttgtgaagacacgatttttgagatgcaactggcagcccagattagcgagtctgatttgaatgaaagatctgccaacaaagaagagtcagagaaggaaagaccagaagagcagggaccgcgtatggccttcttcagtattctaaccgtcaggtctgccctgtttgcgctgagatacaacatccttacactgatgaggatgctgtctctgaagtccctcaaaaagcaaatgaagaaggtgaagaagatgacggtaaaagatatggtgactgctttcttctcatcttattggtccatcttcatgacacttctccacttcgtcgcttctgtgtttaggggctttttccgcatcatttgctctctgttgttaggaggctctctggtggagggtgcaaagaaaataaaggtggcggaactccttgccaacatgcccgatccaacacaggacgaggtgagaggcgatggggaagagggagaaagaaagcctcttgaggccgctctaccttcagaagacttgacggatctgaaagaactgactgaggagagtgacttgcttagcgacatcttcggactcgacttgaaacgggagggggggcaatataagttaatcccccataatccaaacgccgggctctctgacctcatgtctaatcccgtgccaatgcctgaagtgcaggagaaattccaggaacagaaggccaaggaggaggagaaggaggaaaaagaggaaacgaaatccgagcctgagaaagcagagggcgaggacggcgagaaggaagaaaaggccaaagaagacaagggcaaacagaagttgcgccagcttcacacccatcggtacggggaacctgaggtccccgagtccgcattctggaaaaagattatcgcataccaacagaagctgctgaattacttcgcccgtaacttctacaacatgcgtatgttagctctgttcgtggcgttcgcaatcaacttcatcttgctattttacaaggtctcaacaagttcagtagttgaaggtaaggaactccctaccagaagctcctctgagaacgccaaagtaacaagcctagattccagcagccatagaatcattgccgttcactatgtgctggaggaaagctcgggctatatggagccaacactaaggattctggccattttacacactgtgatatcttttttctgcatcattggctattactgccttaaggtcccactagtcatcttcaagcgggagaaagaggtggcgcgcaagctcgagtttgatggactgtacataaccgagcaacccagtgaagacgacattaagggacaatgggacaggttggtgatcaacacacagagtttccccaataattattgggacaaattcgttaagcgcaaggtgatggacaagtacggggaattctacggccgagaccgcatatccgaattactaggaatggataaggcagcactcgacttttctgacgcccgcgaaaaaaaaaaacccaagaaggactctagcttgtcagcagtactgaactcgattgacgtaaagtatcaaatgtggaaactcggagttgtgttcacggataactcgttcctgtatctggcatggtatatgaccatgtctgtgctgggccattacaacaactttttttttgccgctcatctgctagatattgcgatgggctttaaaaccctgcgcaccatactaagttcagtgacccacaacggcaagcagctggttctgacggttggcttgctcgccgtcgttgtgtacctctatacagtggtggcctttaatttctttcggaagttctacaacaaatcggaagatggagacaccccagacatgaagtgtgacgacatgcttacgtgttacatgttccatatgtacgtgggagtgcgcgccggcggtggcatcggcgacgaaattgaagacccagccggagacgaatacgagatctacagaatcatcttcgatataacatttttcttcttcgtgatcgttattctgctggccatcatccaaggtctgataatcgacgcattcggagaacttcgggaccaacaggagcaggttaaagaggacatggagacaaaatgctttatctgcgggattgggaatgactacttcgatactgtccctcacggatttgaaacccacaccctgcaagaacacaatctggcaaattacctctttttcttaatgtatctgatcaataaagacgaaacagaacatactggacaggagtcctatgtgtggaagatgtatcaagaacgctgttgggagttctttccggctggcgattgcttccgcaagcaatacgaggaccaactgaattag

SEQ ID NO: 286254 - DNA, 14922 bp, Artificial Sequence
  derived and/or modified sequence
ctgggccccaggagcagcagcaacaagctgagcaacaagaagatgatgaagtggttctgcagcgccccccagcccagcaccaagaacaacagaagctatgcctggcagcagaaggacctggccacagactttgtgtcctggagccccctgcccatccccaggatgtgcccccagaccagccccagcgcccccctgtgctggagcagccccagcctgagcggccgctgccgccgctgctggctgaccccctggaggaaccagaagggccagctggacatcatcaagtggagctttggcctgaagacagcccagggcggcggccacaggaccctgctgtatggccacgccatcctgctgcggcacagctacagcggcatgtacctgtgctgcctgagcaccagccgcagcagcacagacaagctggcctttgatgtgggcctgcaggaggacaccaccggggaggcctgctggtggaccatccacccagccagcaagcagaggtctgagggggagaaggtgcgggtgggagatgacctgatcctggtgtctgtgagcagcgagcgctacctgcacctgtcctatggaaatggcagcctgcacgtggatgctgccttccagcagaccctgtggagcgtggcccccatcagcagcggcagcgaggccgcccagggctacctgattggaggagatgtgctgcggctgctgcacggccacatggatgaatgtctgactgtgcccagcggggagcacggggaggagcagaggagaacagtgcactatgagggcggcgctgtgtctgtgcacgcccggagcctgtggaggctggagaccctgcgggtggcctggagcggcagccacatccgctggggccagcccttccggctgcggcacgtgaccaccgggaagtacctgagcctgatggaggacaagaacctgctgctgatggacaaggagaaggcagatgtgaagagcacagccttcaccttccgcagcagcaaggagaagctggatgtgggcgtgaggaaggaggtggatggcatgggcaccagcgagatcaagtacggggacagcgtgtgctacatccagcacgtggacaccggcctgtggctgacctaccagagcgtggatgtgaagtctgtgaggatgggcagcatccagaggaaggccatcatgcaccacgagggccacatggatgatggcatcagcctgagccgcagccagcacgaggagagcaggacagcccgggtcatccgcagcaccgtcttcctgttcaaccgcttcatccggggcctggatgccctgagcaagaaggccaaggccagcacagtggacctgcccattgaatctgtgtccctgagcctgcaggacctgattggctacttccaccccccagatgagcacctggagcacgaggacaagcagaaccggctgcgggccctgaagaaccggcagaacctcttccaggaggagggcatgatcaacctggtgctggagtgcatcgaccggctgcacgtgtacagcagcgctgcccactttgctgatgtggccggccgggaggccggggagagctggaagagcatcctgaacagcctgtatgagctgctggccgccctgatccggggcaacaggaagaactgtgcccagttcagcggcagcctggactggctgatcagccggctggagcggctggaggccagcagcggcatcctggaggtgctgcactgtgtgctggtggagagccctgaggccctgaacatcatcaaggagggccacatcaagagcatcatcagcctgctggacaagcacggcaggaaccacaaggtgctggatgtgctgtgcagcctgtgtgtgtgccacggcgtggccgtgcgcagcaaccagcacctgatctgtgacaacctgctgcccggccgggacctgctgctgcagacccggctggtgaaccacgtgtcctccatgaggcccaacatcttcctgggcgtgtctgagggcagcgcccagtacaagaagtggtactatgagctgatggtggaccacacagagccctttgtgacagctgaggccacccacctgcgggtgggctgggccagcacagagggctacagcccctacccaggcggcggggaggagtggggcggcaatggagtgggagatgacctcttctcctatggctttgatggcctgcacctgtggagcggctgcatcgccaggacagtgagcagccccaaccagcacctgctgaggacagatgatgtgatcagctgctgcctggacctgagcgcccccagcatctccttccgcatcaatggccagcctgtgcagggcatgtttgagaacttcaacattgatggcctcttcttccctgtggtgtccttctctgctggcatcaaggtgcgcttcctgctgggcggccgccacggggagttcaagttcctgcccccacctggctacgccccctgctatgaagctgtgctgcccaaggagaagctgaaggtggagcacagccgggagtacaagcaggagaggacctacacccgggacctgctgggccccaccgtgtccctgacccaggccgccttcacccccatccctgtggacaccagccagatcgtgctgcccccccacctggagcgcatccgggagaagctggccgagaacatccacgagctgtgggtgatgaacaagattgagctgggctggcagtatggccctgtgagagatgacaacaagaggcagcacccctgcctggtggagttcagcaagctgcctgagcaggagaggaactacaacctgcagatgagcctggagaccctgaagaccctgctggccctgggctgccacgtgggcatcagtgatgagcacgccgaggacaaggtgaagaagatgaagctgcccaagaactaccagctgaccagcggctacaagccagcccccatggacctgtccttcatcaagctgacccccagccaggaggccatggtggacaagctggctgaaaatgcccacaacgtgtgggcccgggaccgcatccggcagggctggacctacggcatccagcaggatgtgaagaacagaagaaacccccggctggtgccctacaccctgctggatgacaggaccaagaagagcaacaaggacagcctgcgggaggccgtgaggaccctgctgggctacggctacaacctggaggccccagaccaggaccacgccgcccgggcagaggtgtgcagcggcactggagagcgcttccgcatcttccgggcagagaagacctatgctgtgaaggccggccgctggtactttgaatttgaaacagtgacagctggggacatgagggtgggctggagccggcccggctgccagcctgaccaggagctgggcagtgatgagcgggcctttgcctttgatggcttcaaggcccagcgctggcaccagggcaatgagcactacggccgctcctggcaggccggagatgtggtgggctgcatggtggacatgaatgagcacaccatgatgttcaccctgaatggagagatcctgctggatgacagcggcagcgagctggccttcaaggactttgatgtgggagatggcttcatccctgtgtgcagcctgggcgtggcccaggtgggccgcatgaactttgggaaggatgtgtccaccctgaagtacttcaccatctgtggcctgcaggagggctatgagccctttgctgtgaacaccaacagagacatcaccatgtggctgagcaagaggctgccccagttcctgcaggtgcccagcaaccacgagcacatcgaggtgaccagaattgatggcaccatcgacagcagcccctgcctgaaggtgacccagaagagctttggcagccagaacagcaacacagacatcatgttctaccgcctgtccatgcccattgaatgtgccgaggtgttcagcaagacagtggccggcggcctgcctggagctggcctgtttggccccaagaatgacctggaggactatgatgctgacagcgactttgaggtgctgatgaagacagcccacggccacctggtgcctgacagagtggacaaggacaaggaggccaccaagccagagttcaacaaccacaaggactatgcccaggagaagcccagccggctgaagcagcgcttcctgctgcggaggaccaagccagactacagcaccagccacagcgcccggctgacagaagatgtgctggctgatgacagagatgattatgacttcctgatgcagaccagcacctactactacagcgtgcgcatcttccctggccaggagcccgccaacgtgtgggtgggctggatcaccagtgacttccaccagtatgacaccggctttgacctggacagagtgaggacagtgacagtgaccctgggagatgagaagggcaaggtgcatgagagcatcaagaggagcaactgctacatggtgtgtgccggggagagcatgagccctggccagggcaggaacaacaacggcctggagatcggctgtgtggtggatgctgccagcggcctgctgaccttcatcgccaacgggaaggagctgagcacctactaccaggtggagcccagcaccaagctgtttcctgctgtgtttgcccaggccaccagccccaacgtgttccagtttgagctgggccgcatcaagaatgtgatgcccctgtctgctggcctcttcaagtctgagcacaagaaccctgtgccccagtgccccccccggctgcacgtgcagttcctgagccacgtgctgtggagcaggatgcccaaccagttcctgaaggtggatgtgagccgcatcagcgagcggcagggctggctggtgcagtgcctggaccccctgcagttcatgagcctgcacatcccagaagaaaatagatctgtggacatcctggagctgacagagcaggaggagctgctgaagttccactaccacaccctgcggctgtacagcgctgtgtgtgccctgggcaaccaccgggtggcccacgccctgtgcagccacgtggatgagccccagctgctgtatgccatcgagaacaagtacatgcctggcctgctgcgggccggctactatgacctgctgattgacatccacctgagcagctatgccacagcccggctgatgatgaacaatgagtacatcgtgcccatgacagaggagaccaagagcatcaccctcttcccagatgagaacaagaagcacggcctgcccggcatcggcctgagcaccagcctgcggcccaggatgcagttcagcagccccagctttgtgtccatcagcaatgaatgctaccagtacagccctgagttccccctggacatcctgaagagcaagaccatccagatgctgacagaggccgtgaaggagggcagcctgcacgcccgggaccctgtgggcggcaccacagagttcctgtttgtgcccctcatcaagctgttctacaccctgctgatcatgggcatcttccacaatgaagacctgaagcacatcctgcagctgattgagcccagcgtcttcaaggaggccgccaccccagaggaggagagtgacaccctggagaaggagctgtctgtggatgatgccaagctgcagggcgctggggaggaggaggccaagggcggcaagaggcccaaggagggcctgctgcagatgaagctgcctgagcctgtgaagctgcagatgtgcctgctgctgcagtacctgtgtgactgccaggtgcgccaccgcatcgaggccatcgtggccttcagtgatgactttgtggccaagctgcaggacaaccagcgcttccgctacaatgaggtgatgcaggccctgaacatgtctgctgccctgacagccaggaagaccaaggagttccgcagccccccccaggagcagatcaacatgctgctgaacttcaaggatgacaagtcagaatgtccctgcccagaggagatccgggaccagctgctggacttccacgaggacctgatgacccactgcggcatcgagctggatgaagatggcagcctggatggcaacagcgacctgaccatccggggccgcctgctgagcctggtggagaaggtgacctacctgaagaagaagcaggccgagaagcctgtggagagtgacagcaagaagagcagcaccctgcagcagctgatcagcgagaccatggtgcgctgggcccaggagagcgtgattgaggaccctgagctggtgcgggccatgtttgtgctgctgcaccggcagtatgatggcattggaggcctggtgcgggccctgcccaagacctacaccatcaatggagtgtctgtggaggacaccatcaacctgctggccagcctgggccagatccgcagcctgctgtctgtgaggatgggcaaggaggaggagaagctgatgatccggggcctgggggacatcatgaacaacaaggtgttctaccagcaccccaacctgatgagggccctgggcatgcatgagaccgtgatggaggtgatggtgaatgtgctgggcggcggggagagcaaggagatcaccttccccaagatggtggccaactgctgccgcttcctgtgctacttctgccgcatcagccggcagaaccagaaggccatgtttgaccacctgagctacctgctggagaacagctctgtgggcctggccagccctgccatgaggggcagcacccccctggatgtggccgccgcctctgtgatggacaacaatgagctggccctggccctgcgggagccagacctggagaaggtggtgcgctacctggccggctgcggcctgcagagctgccagatgctggtgtccaagggctacccagacatcggctggaaccctgtggagggggagcgctacctggacttcctgcgctttgctgtgttctgcaatggagagagcgtggaggagaatgccaacgtggtggtgcggctgctgatccggcggccagaatgttttggacctgccctgcggggggagggcggcaatggcctgctggccgccatggaggaggccatcaagattgctgaggaccccagcagagatggccccagccccaacagcggcagcagcaagaccctggacacagaggaggaggaggatgacaccatccacatgggaaatgccatcatgaccttctacagcgccctgattgacctgctgggccgctgtgcccctgagatgcacctgattcatgctggaaaaggagaggccatccgcatccgcagcatcctgcggagcctcatccccctgggggacctggtgggcgtcatcagcatcgccttccagatgcccaccatcgccaaggatggaaatgtggtggagccagacatgtctgctggcttctgcccagaccacaaggccgccatggtgctcttcctggacagagtgtatggcatcgaggtgcaggacttcctgctgcacctgctggaggtgggcttcctgcctgacctgcgggctgctgccagcctggacacagctgccctgagcgccacagacatggccctggccctgaaccgctacctgtgcacagctgtgctgcccctgctgacccgctgtgcccccctgtttgctggaacagagcaccacgccagcctgattgacagcctgctgcacacagtgtaccgcctgagcaagggctgcagcctgaccaaggcccagagggacagcattgaggtgtgcctgctgagcatctgtggccagctgcggcccagcatgatgcagcacctgctgcggcggctggtgtttgatgtgcccctgctgaatgagcacgccaagatgcccctgaagctgctgaccaaccactatgagcgctgctggaagtactactgcctgcccggcggctggggcaactttggagctgccagcgaggaggagctgcacctgagcaggaagctgttctggggcatctttgatgccctgagccagaagaagtatgagcaggagctgttcaagctggccctgccctgcctgtctgctgtggccggggccctgcccccagactacatggagagcaactacgtgtccatgatggagaagcagagctccatggattctgagggcaacttcaacccccagcctgtggacaccagcaacatcaccatccctgagaagctggagtacttcatcaacaagtatgcagagcacagccatgacaagtggagcatggacaagctggccaacggctggatctatggagagatctacagcgacagcagcaaggtgcagcccctgatgaagccctacaagctgctgtctgagaaggagaaggagatctaccgctggcccatcaaggagagcctgaagaccatgctggcctggggctggagaattgaaagaacccgggagggggacagcatggccctgtacaacagaacaagacgcatcagccagaccagccaggtgtctgtggatgctgcccacggctacagcccccgggccatcgacatgagcaatgtgaccctgagccgggacctgcacgccatggccgagatgatggccgagaactaccacaacatctgggccaagaagaagaagatggagctggagagcaaaggaggcggcaaccaccccctgctggtgccctatgacaccctgacagccaaggagaaggccaaggaccgggagaaggcccaggacatcctgaagttcctgcagatcaatggctatgctgtgtcccggggcttcaaggacctggagctggacacccccagcattgagaagagatttgcctacagcttcctgcagcagctgatccgctacgtggatgaggcccaccagtacatcctggagtttgatggcggcagccggggcaagggggagcacttcccctatgagcaggagatcaagttctttgccaaggtggtgctgcccctgattgaccagtacttcaagaaccaccggctgtacttcctgtctgctgccagccggcccctgtgcagcggcggccacgccagcaacaaggagaaggagatggtgaccagcctcttctgcaagctgggcgtgctggtgcgccaccgcatcagcctgtttggaaatgatgccaccagcatcgtgaactgcctgcacatcctgggccagaccctggatgccaggacagtgatgaagacaggcctggagagcgtgaagagcgccctgcgggccttcctggacaatgctgctgaggacctggagaagaccatggagaacctgaagcagggccagttcacccacaccaggaaccagcccaagggcgtgacccagatcatcaactacaccaccgtggccctgctgcccatgctgagcagcctgtttgagcacatcggccagcaccagtttggagaagatctcatcctggaggatgtgcaggtgtcctgctaccgcatcctgaccagcctgtatgccctgggcaccagcaagagcatctacgtggagcggcagaggtctgccctgggagaatgtctggccgcctttgctggggccttccctgtggccttcctggagacccacctggacaagcacaacatctacagcatctacaacaccaagagcagccgggagagagctgccctgagcctgcccaccaacgtggaggatgtgtgccccaacatccccagcctggagaagctgatggaggagatcgtggagctggccgagagcggcatccgctacacccagatgcctcatgtgatggaggtgatcctgcccatgctgtgcagctacatgagccgctggtgggagcacggccctgagaacaaccctgagagagctgagatgtgctgcacagccctgaacagcgagcacatgaacaccctgctgggcaacatcctgaagatcatctacaacaacctgggcattgatgaaggagcctggatgaagaggctggccgtgttcagccagcccatcatcaacaaggtgaagccccagctgctgaagacccacttcctgcccctgatggagaagctgaagaagaaggccgccaccgtggtgtctgaggaggaccacctgaaggccgaggcccggggggacatgtctgaggccgagctgctgatcctggatgagttcaccaccctggcccgggacctgtatgccttctaccccctgctgatccgctttgtggactacaacagagccaagtggctgaaggagcccaaccctgaggccgaggagctgttcaggatggtggccgaggtgttcatctactggagcaagagccacaacttcaagcgggaggagcagaactttgtggtgcagaatgagatcaacaacatgtccttcctgatcacagacaccaagagcaagatgagcaaggctgctgtgtctgaccaggagaggaagaagatgaagaggaaaggagaccgctacagcatgcagaccagcctcatcgtggccgccctgaagaggctgctgcccatcggcctgaacatctgtgcccctggggaccaggagctgattgccctggccaagaaccgcttcagcctgaaggacacagaagatgaggtgcgggacatcatccgcagcaacatccacctgcagggcaagctggaggaccctgccatccgctggcagatggccctgtacaaggacctgcccaacagaacagatgacaccagtgaccctgagaagacagtggagcgggtgctggacatcgccaacgtgctcttccacctggagcagaagagcaagagggtgggccgccgccactactgcctggtggagcacccccagaggagcaagaaggctgtgtggcacaagctgctgagcaagcagaggaagagagctgtggtggcctgcttcaggatggcccccctgtacaacctgcccaggcacagagctgtgaacctcttcctgcagggctatgagaagtcctggattgaaacagaggagcactactttgaggacaagctgattgaggacctggccaagccaggagctgagcccccagaggaggatgagggcaccaagagggtggaccccctgcaccagctgatcctgctcttcagcaggacagccctgacagagaagtgcaagctggaggaggacttcctgtacatggcctatgctgacatcatggccaagagctgccatgatgaagaagatgatgatggagaggaggaggtgaagagctttgaggtgacaggcagccagaggagcaaggagaaggagatggagaagcagaagctgctgtaccagcaggcccggctgcatgacagaggagctgctgagatggtgctgcagaccatcagcgccagcaagggggagaccggccccatggtggccgccaccctgaagctgggcatcgccatcctgaatggaggcaacagcacagtgcagcagaagatgctggactacctgaaggagaagaaggatgtgggcttcttccagagcctggccggcctgatgcagagctgcagcgtgctggacctgaatgcctttgagcggcagaacaaggccgagggcctgggcatggtgacagaggagggcagcggggagaaggtgctgcaggatgatgagttcacctgtgacctcttccgcttcctgcagctgctgtgtgagggccacaacagcgacttccagaactacctgcggacccagacaggcaacaacaccaccgtgaacatcatcatcagcacagtggactacctgctgcgggtgcaggagagcatcagtgacttctactggtactacagcggcaaggatgtgattgatgagcagggccagaggaacttcagcaaggccatccaggtggccaagcaggtgttcaacaccctgacagagtacatccagggcccctgcaccggcaaccagcagagcctggcccacagccggctgtgggatgctgtggtgggcttcctgcacgtgtttgcccacatgcagatgaagctgagccaggacagcagccagatcgagctgctgaaggagctgatggacctgcagaaggacatggtggtgatgctgctgtccatgctggagggcaatgtggtgaatggcaccatcggcaagcagatggtggacatgctggtggagagcagcaacaacgtggagatgatcctgaagttctttgacatgttcctgaagctgaaggacctgaccagcagtgacaccttcaaggagtatgaccctgatggcaagggcgtcatcagcaagagggacttccacaaggccatggagagccacaagcactacacccagagcgagacagagttcctgctgagctgtgccgagacagatgaaaatgagaccctggactatgaggagtttgtgaagcgcttccacgagcccgccaaggacatcggcttcaacgtggccgtgctgctgaccaacctgtctgagcacatgcccaatgacacccggctgcagaccttcctggagctggccgagagcgtgctgaactacttccagcccttcctgggccgcatcgagatcatgggcagcgccaagagaattgagcgggtgtactttgagatcagcgagagcagcaggacccagtgggagaagccccaggtgaaggagagcaagaggcagttcatctttgatgtggtgaatgaaggaggagagaaggagaagatggagctgtttgtgaacttctgtgaggacaccatctttgagatgcagctggccgcccagatcagcgagagtgacctgaatgaaagaagtgccaacaaggaggagagcgagaaggagaggcctgaggagcagggccccaggatggccttcttcagcatcctgactgtgcgcagcgccctgtttgccctgcgctacaacatcctgaccctgatgaggatgctgagcctgaagagcctgaagaagcagatgaagaaggtgaagaagatgacagtgaaggacatggtgacagccttcttcagcagctactggagcatcttcatgaccctgctgcactttgtggccagcgtcttccggggcttcttccgcatcatctgcagcctgctgctgggcggcagcctggtggagggcgccaagaagatcaaggtggccgagctgctggccaacatgccagaccccacccaggatgaggtgagaggagatggagaggagggggagaggaagcccctggaggccgccctgcccagcgaggacctgacagacctgaaggagctgacagaggagagtgacctgctgagtgacatcttcggcctggacctgaagcgggagggcggccagtacaagctgatcccccacaaccccaatgccggcctgagtgacctgatgagcaaccctgtgcccatgcctgaggtgcaggagaagttccaggagcagaaggccaaggaggaggagaaggaggagaaggaggagaccaagtctgagcctgagaaggccgagggagaagatggagagaaggaggagaaggccaaggaggacaagggcaagcagaagctgcggcagctgcacacccaccgctacggggagcctgaggtgcctgagagcgccttctggaagaagatcatcgcctaccagcagaagctgctgaactactttgccaggaacttctacaacatgaggatgctggccctgtttgtggcctttgccatcaacttcatcctgctcttctacaaggtgtccaccagctctgtggtggagggcaaggagctgcccaccaggagcagcagtgaaaatgccaaggtgaccagcctggacagcagcagccaccgcatcatcgctgtgcactacgtgctggaggagagcagcggctacatggagcccaccctgcgcatcctggccatcctgcacacagtcatctccttcttctgcatcatcggctactactgcctgaaggtgcccctggtgatcttcaagcgggagaaggaggtggccaggaagctggagtttgatggcctgtacatcacagagcagcccagtgaagatgacatcaagggccagtgggaccggctggtgatcaacacccagagcttccccaacaactactgggacaagtttgtgaagaggaaggtgatggacaagtatggagagttctacggccgggaccgcatcagcgagctgctgggcatggacaaggccgccctggacttcagtgatgcccgggagaagaagaagcccaagaaggacagcagcctgtctgctgtgctgaacagcattgatgtgaagtaccagatgtggaagctgggcgtggtgttcacagacaacagcttcctgtacctggcctggtacatgaccatgtctgtgctgggccactacaacaacttcttctttgctgcccacctgctggacatcgccatgggcttcaagaccctgcggaccatcctgagctctgtgacccacaacgggaagcagctggtgctgactgtgggcctgctggccgtggtggtgtacctgtacacagtggtggccttcaacttcttcaggaagttctacaacaagtcagaagatggagacaccccagacatgaagtgtgatgacatgctgacctgctacatgttccacatgtatgtgggcgtgcgggccggcggcggcattggagatgaaattgaggaccctgctggagatgaatatgagatctaccgcatcatctttgacatcaccttcttcttctttgtgattgtcatcctgctggccatcatccagggcctcatcattgatgccttcggggagctgcgggaccagcaggagcaggtgaaggaggacatggagaccaagtgcttcatctgtggcattggaaatgactactttgacacagtgccccacggctttgagacccacaccctgcaggagcacaacctggccaactacctgttcttcctgatgtacctgatcaacaaggatgaaacagagcacacaggccaggagagctatgtgtggaagatgtaccaggagcgctgctgggagttcttccctgctggggactgcttcaggaagcagtatgaggaccagctgaactag

SEQ ID NO: 286255 - DNA, 14922 bp, Artificial Sequence
  derived and/or modified sequence
ctgggcccccggagcagcagcaacaagctgagcaacaagaagatgatgaagtggttctgctctgccccacagccatcaactaaaaacaataggtcttacgcttggcagcagaaagacctggccaccgattttgtttcttggtccccgctgccgatccctcgaatgtgtccccaaacctcaccctctgctccgttatgctggagctcgccttctctgagtggtcgatgcaggcgatgttggctgaccccttggcgaaatcagaaaggacagttagacatcatcaagtggtcttttgggctgaaaacagcacaggggggcggccatcggaccctcttgtacggacacgccattcttctgcgccactcttacagtgggatgtacctgtgttgcctgagcacgagccgctcgagtactgataagctggcatttgatgttggtctgcaggaagacactaccggagaagcatgctggtggacgattcacccagccagcaaacagagatccgagggcgaaaaggtcagggttggagacgacctgattctggtgagtgtatcttcagagagatatcttcatctttcctatggtaacggaagtcttcacgtggacgcggcattccaacagactctgtggtccgtggcacctatatcttcaggcagtgaagcagcgcagggatatttaatcggcggcgatgtattgcggttgctgcatggccatatggatgagtgtctgacagtgcccagtggagagcacggggaggagcagaggagaaccgttcattatgagggaggcgcggtaagcgtacacgccagatccctgtggcggctggaaacccttcgagttgcctggtcaggcagtcacattagatggggccaaccgttcaggcttcgccacgtgaccacagggaagtacctctctctgatggaagataagaacttgctgctgatggataaggagaaagctgacgtgaagtctaccgcatttacattcagatccagcaaggagaagctggacgttggcgtgaggaaagaggtagatggcatgggcacatctgagatcaaatacggcgattccgtgtgttatattcagcacgtcgacacaggactgtggcttacttaccagtctgtggacgtcaagagtgttagaatgggatcgatccagcggaaagcgatcatgcaccatgagggccatatggatgacgggatatccctttctcggagccagcacgaagaaagccgcacggctcgggttataaggagtacagtctttttgtttaaccgctttatccgcggcctagatgccctatccaagaaagccaaagccagcaccgtggacctgcccatcgaatcagtatctctgtcactgcaggaccttattgggtacttccatccgccggacgaacatttggaacacgaagacaaacagaatcggcttcgcgctttgaagaacaggcagaatttgttccaagaagagggaatgattaacctcgtgctcgagtgcatcgatagactgcacgtgtattctagcgcagcacactttgccgacgtggccggacgtgaagcaggggaatcttggaaaagcatcttgaatagcttgtatgagctgcttgcggctttgataagaggcaatcggaagaattgtgcacagttctctggtagcttggactggctgatctctcgcctagaacggctggaggcttcttccgggatcctggaagtgctgcactgtgtcttggtggaaagcccggaggctctgaacattattaaagaggggcacatcaagagcatcatctccctccttgacaagcatggccgtaatcacaaagtcctggatgtcctgtgttccctctgcgtttgtcacggagtggcagttcgatcaaatcagcatttaatctgcgacaacctgctgcccggccgcgacctcctgctgcagactcgcctcgtgaatcacgtctcctcgatgagacctaatattttcctcggcgtgtctgagggcagcgctcagtataaaaagtggtattatgagcttatggtggatcacactgagcccttcgtgacagccgaggccacccacctgcgggttggctgggctagcaccgaggggtattccccctacccagggggtggagaagaatggggcggaaacggggtaggggatgacctgttctcctacggatttgacgggctccacctctggagcggatgcatcgcacgtactgtttcatctccgaatcagcacctgctcagaacagatgatgtaatctcttgctgcctggacctctcagctccgagcatctctttcaggattaacgggcagccggtgcagggaatgttcgagaacttcaatatagacgggctgtttttcccagtggtgagctttagcgccggcatcaaagtgcggttcttattagggggccgccacggagaatttaagtttctgcctcccccgggctatgctccctgttacgaagcagttcttcccaaggagaaactgaaggttgagcacagccgagagtacaagcaggagcggacctacacccgggatctattgggcccgactgtgtcccttacacaggccgccttcacaccgattcctgtggacactagccagatagtactaccccctcacttagagagaatccgcgaaaagttagcagagaacattcacgaactttgggtgatgaacaagatcgaattgggatggcagtacgggccagtgcgagacgacaataagaggcaacacccatgtttggtcgaattctccaaactgcctgagcaggagcgtaattataatttacagatgagcctggagacattgaagacactgcttgccctgggttgtcatgtcggtatctccgatgaacacgccgaagacaaagtgaaaaagatgaaactccccaagaactatcagctgactagcggatataagcctgcccctatggatctcagctttatcaaacttactcctagccaagaagccatggttgataagctcgccgagaatgcacacaatgtgtgggcccgcgacaggatccggcagggttggacatacgggatccaacaagatgtcaaaaaccgaagaaaccctcgtcttgtaccgtataccttactcgacgaccgtacaaaaaaatccaacaaggattcgctccgcgaggctgttcgcaccttgcttgggtacgggtacaatctcgaagccccagatcaggaccatgctgcccgggctgaagtgtgttcaggcaccggagaaaggttccgtatattcagagctgagaaaacatatgccgttaaggccggcaggtggtactttgagttcgagacggtcaccgccggcgatatgcgtgtgggctggagcagacccggatgtcagccggaccaggagctgggatctgatgaaagggcctttgcttttgacggctttaaggcacaacgctggcaccagggaaatgagcactacgggcggtcgtggcaagcaggcgacgtggtcgggtgcatggtcgacatgaacgaacataccatgatgttcaccctgaatggcgagatactccttgacgattccggcagcgaactggccttcaaggatttcgacgttggagatgggtttattcctgtttgttcgctgggagtggcccaggtagggagaatgaattttgggaaagacgtctctactctaaagtactttacaatctgtggactgcaggagggctacgagccttttgccgttaataccaaccgggacattaccatgtggttgagcaaacgattgccccagttcctgcaagtgccaagcaatcatgaacacatagaggtgactcgcattgacggcacgatcgacagtagcccctgtctgaaggtaacgcagaagtcatttggatcgcagaattccaacacagacattatgttctaccgcctgagcatgcctatcgagtgcgccgaggtcttttcgaaaactgtggctgggggcctcccaggcgccggcctctttggccccaagaacgacctcgaggactacgatgccgatagcgacttcgaggtcctcatgaaaacagcccacggtcatctcgtgcccgatagagtcgataaggataaggaggctaccaaaccagagttcaacaaccataaggattatgcccaggaaaaacccagccgcttgaagcagaggtttctactgcggcggaccaaaccggactatagtactagtcattctgctcgactgactgaagacgttcttgctgacgacagggacgattatgacttcctgatgcaaacatccacttactattactcggttaggatctttcccgggcaggagccagccaatgtgtgggtgggttggataacaagcgattttcaccagtacgacactggcttcgacctcgatcgcgtcagaacagtgacagttacactcggagacgagaaggggaaagtgcacgagtccatcaaacgctctaattgttacatggtgtgtgcaggtgagagcatgtcacctggacagggacgtaataacaatggcctggaaatcggatgcgttgtggacgcagcctcgggtcttttaacatttatagcaaacggcaaggagctcagtacctattaccaggtggagccgagcacaaagctgttcccagcggtgttcgcacaagccacttcacctaatgttttccagttcgagttgggtaggattaagaacgtcatgccactgagtgctgggctgtttaagagcgagcataagaacccggtcccccagtgccccccccggctacatgtgcagttcctgtcacacgttctttggagtcggatgcctaatcagttcctaaaagtggacgtatcaagaatcagcgagcggcaggggtggttagtgcagtgccttgacccactgcagttcatgagcctgcatatcccagaggagaaccggagtgtggatattcttgaactgacggaacaagaggagctcttgaaatttcattatcacacactgaggctgtatagcgctgtgtgtgctctggggaaccaccgggttgctcacgcactgtgcagtcatgtagacgagccacagctgctctatgccattgaaaacaagtacatgcctgggctgctgagagctggctattacgacctactaatcgatattcatttgtcttcctatgcaactgcaagactgatgatgaacaatgagtatatcgttccaatgacagaggagacgaaatccatcaccctgttccctgatgagaataagaagcacggactgcccgggataggtctctccacaagtctgcgcccacgaatgcagttctcctctccatccttcgtctccatctctaatgagtgctaccagtatagccccgagtttccactggatattctcaaaagtaagaccatccagatgctaactgaagcagtaaaggagggcagtctccacgctcgtgatcccgtgggaggcactacggagtttttatttgtacctttgattaagctattctacaccctgctaatcatggggatttttcataatgaggacttgaaacatattctgcagttgattgaaccttccgtattcaaggaagcagccacacctgaggaagagtctgacaccctggagaaagaactgtcagtagacgatgccaaacttcagggagctggggaagaagaagccaaaggaggtaagcggccaaaagaggggctgctccagatgaaactgcccgagccagtgaagctgcagatgtgcctgctcctccagtacctgtgtgattgtcaggttcgtcaccgcattgaagcaatcgtcgcatttagcgacgattttgtggctaagctacaggataaccagcggtttcggtataacgaggtgatgcaggcactgaacatgtccgcagcactgacagcccgcaagacaaaagagtttagaagcccaccgcaggagcagataaatatgctgctcaactttaaggacgataaaagcgaatgcccatgccccgaggaaatcagagatcaactgctcgactttcacgaagatttaatgactcattgtggaatcgagcttgatgaagatggatctttggacgggaacagtgatcttactatccgagggcgtctcttgtctcttgttgaaaaggtgacatacttgaagaagaagcaggctgagaagcccgtggagtcagactctaaaaagtctagcaccttacagcagctgattagcgagacaatggtcagatgggctcaggaatccgttatcgaagatcctgaactggtgagggccatgttcgtactgttacaccgccagtatgacggcattggcgggcttgtccgggctctgcccaaaacgtatacaatcaatggggtcagcgtcgaagatactattaaccttttggctagcctggggcagatacgtagccttctgtctgtgcgcatgggaaaggaggaagagaagctgatgatcagggggctaggcgatataatgaataataaggtgttttaccagcatccaaatctgatgagagccctcggcatgcatgaaactgtgatggaggtcatggtgaacgtgctgggaggaggtgagagcaaggaaatcaccttcccaaagatggtggccaactgttgtcgttttttgtgttatttttgccgtatctctagacagaatcagaaggcgatgttcgatcacctttcttacctgttggaaaattctagcgtgggcctggcttcaccagctatgagagggagtaccccattggacgttgccgccgctagcgtgatggataataatgagctcgccttggccctgagagagccagacctggaaaaggttgtgaggtatttggccggatgtggattacagtcctgtcaaatgcttgtaagcaagggatacccagacattggctggaaccccgtggagggtgagcgttatttggattttctgcgctttgccgtcttttgcaatggagagtcggtggaagaaaatgctaacgtggtagtgcgcttgctcattcgaagaccagagtgtttcggacctgcactgagaggcgagggagggaacggcctcttggctgctatggaggaggctattaagattgctgaagacccttctagggatggtccgtcacccaacagcggctcctcaaaaacactggataccgaggaggaggaagacgacacgatccacatgggaaacgcaatcatgacgttctatagcgccttgatagacctgctcggaagatgcgcgcccgagatgcaccttattcacgcgggcaagggcgaagccatcaggattagaagcatcctgcggtctctcatacccctcggcgacctggttggggtcatctccatagctttccagatgcccacaatcgcaaaggacggtaatgtggtcgaacccgacatgtccgcggggttttgtcctgaccataaggccgccatggtccttttcttagaccgagtctacggaatagaggtccaggacttcctgctgcacttgctggaggtgggattccttcctgatttacgggcagctgcctccctcgataccgcagctctaagcgcaaccgacatggccctggccctgaatagatatctgtgtaccgctgtcctgcccctactaacacggtgtgcacctctgttcgccggaaccgaacaccacgccagcctgattgacagtctgctgcacacagtatatagactgtcaaagggctgcagtctcacaaaagctcaacgagatagtatcgaagtttgcttgctgagtatttgcggtcagctgcggccctcaatgatgcagcacctgcttagacggctagtctttgacgtgccccttttgaatgaacacgccaagatgcctcttaagcttctgacaaaccattacgagcgctgttggaaatactattgtctccctgggggatggggcaacttcggagcagcttcagaagaggagctgcatctcagcagaaagctattctggggaatatttgacgcactctcgcagaagaagtacgagcaggagctctttaagctggcccttccatgcctcagcgctgtagcaggggctctgccaccagattacatggagtcgaactacgtgagtatgatggagaagcagagcagcatggattccgagggcaattttaatccgcaacctgtggatactagtaacataaccatacccgagaagctggaatattttattaataagtatgccgagcactcccacgataaatggagtatggacaagctcgcaaacggatggatctatggcgaaatctacagtgactcgagcaaggtgcagccacttatgaagccttataaactgttatcagagaaggaaaaggagatatatagatggcccattaaagaatcattaaagactatgctcgcgtgggggtggagaatcgagcgaacccgagagggagactctatggctctgtataatagaaccaggaggatttcacagacctcacaggtgagcgtggatgccgctcatgggtattctccgagggcaatagacatgtccaacgtgacactgagtagggacctccacgcaatggcagagatgatggccgagaattaccataacatttgggccaagaagaagaaaatggagctggaatccaaaggtggcggcaatcatcccctgttagtgccatatgacactcttactgcaaaggaaaaagctaaggatcgcgaaaaggcacaggatattttaaaatttttgcagatcaatggctatgcggtttcaagggggttcaaagacctggagctggatacaccgtcgatcgagaagaggttcgcttacagctttctgcaacaattaattcgttacgtcgatgaggctcaccagtatatcttggaatttgacgggggctccagaggaaagggcgagcacttcccatacgagcaagagatcaaattttttgcgaaagttgtcctgcccttaattgaccaatactttaaaaatcaccggctctatttcttgtccgccgcctccaggccactctgcagtggtggacacgcaagcaacaaggaaaaggagatggtgacttcccttttttgtaaactgggggttctggtgcgccaccgaatctcattgttcggtaacgatgccacctccatcgtgaattgtctgcatatcctgggccagacactggatgccagaaccgtgatgaaaacgggactggagtctgtcaagtcggcactccgcgccttcctagacaacgctgccgaggatttggagaaaactatggagaatctcaagcaaggacagttcacccacacacgcaatcaaccgaagggagtaactcaaattatcaattataccacggtggcgcttcttcctatgctcagcagcctgtttgagcatattggtcagcatcagtttggggaggacctgatcctggaagatgttcaggttagctgctataggattctgactagcctttatgctctgggaaccagcaaatccatttacgtggagcgacagcgcagcgctctcggcgagtgcctggccgcttttgccggtgctttcccggtggcttttctggagacccaccttgataagcataatatttacagtatctataacaccaagtcctccagagaacgcgctgcactgagccttccaaccaacgtggaagacgtgtgtcctaacatcccatctctcgagaaactgatggaggagatagtcgagttggcggaatcaggcattcggtatacgcagatgcctcacgtgatggaggtcatcctgcccatgctgtgtagttacatgagcagatggtgggagcacggacccgaaaataacccagagcgtgctgaaatgtgttgtaccgctctgaactccgagcacatgaatactcttttggggaacatcttgaagattatctacaataacctgggcatcgatgagggcgcttggatgaaacggttggcggtgttttcacagcccattattaataaggtgaagcctcagctcctgaaaacgcatttcctcccgctgatggaaaaactgaaaaagaaggctgctactgtggtgtctgaggaagaccacctgaaggcagaggcaagaggcgacatgagtgaggcagagcttttgatcctggatgaattcacaactctagcacgcgatctctacgcattctatcctctcctgatcaggtttgtggattataacagagcaaaatggttaaaggagcccaacccagaggcagaggaactcttcaggatggttgccgaagtctttatctactggtccaaaagccataatttcaagcgggaggaacagaacttcgtggtccagaacgagattaataacatgtccttcctgatcacagataccaagtctaaaatgtctaaggccgccgtgtccgatcaggagcgaaagaagatgaagaggaaaggagatcggtactccatgcagacatctctgatcgtcgctgccttgaagcggctgttaccgattggtctgaatatatgcgctcccggtgatcaggaactgatagccttggccaaaaataggttctctctgaaggacaccgaggatgaggtgcgggacatcattcggtctaacatacatctccaaggcaagctggaagaccctgccatccggtggcagatggcgctatataaagatctgccgaatcgaacagacgacacgagcgatccagagaagacagtcgaacgggtcctagatatagccaatgttctatttcatctggagcagaaatccaaaagagttggcaggcggcattattgtcttgtggagcacccacagcggtctaagaaggcagtctggcacaagctcctgtccaagcagcggaaacgggcagttgtggcttgtttcagaatggctcctttatataatcttcctagacaccgtgctgtcaacctgttcctccagggctatgagaagagctggatcgagaccgaagaacattatttcgaagacaaactaattgaggatctcgccaagccaggcgcagagccccccgaagaggatgaggggaccaaaagggtggacccactccatcagcttatcctattgttctccaggaccgctttgacagagaagtgcaaactggaagaggactttttgtacatggcttacgcagacatcatggccaaaagctgccacgatgaggaggacgacgatggtgaggaggaggtgaagagcttcgaagtcaccggaagtcagaggtctaaggagaaggaaatggagaagcagaaacttctctatcaacaggctagactccatgaccgaggggctgctgagatggtcctccaaacaatttctgcttcgaagggagaaactggcccaatggtggctgctacgcttaagctgggcattgctatccttaatggcggcaattccacagtgcagcagaaaatgctggattatttaaaagaaaaaaaggacgttgggttctttcagtctctcgctggacttatgcaatcttgttccgtccttgacttgaacgccttcgagcggcagaataaggccgaggggcttggtatggtgacagaagagggcagcggagaaaaggtcctgcaagatgacgagttcacgtgcgacttgttccgcttcctgcagcttttgtgtgagggccataactccgattttcagaattacctgaggacgcagaccggtaacaatacgaccgttaatatcattatctctaccgtggactacttgttgagggtccaagaatccatttcagacttttattggtattatagcggaaaagacgtgatagatgagcagggccagcgtaatttcagcaaagccatccaggtggcgaaacaagtattcaacacgctgacagaatacatacaggggccttgtaccggcaatcagcagagcttagctcacagtcgcctttgggatgctgtggtgggcttcctgcatgtgttcgcccacatgcagatgaagctgtctcaggattcgagccagattgagttactgaaggagctgatggacctgcagaaagatatggtcgtaatgctgctgtcaatgcttgaagggaacgttgttaatgggaccattggcaagcagatggtcgatatgctagtggagtcatccaacaatgtggaaatgatcctcaagttcttcgacatgttcctgaaacttaaggacctcacttccagcgacaccttcaaagaatatgatcctgacggaaaaggggtcatttccaagcgcgactttcacaaagccatggaaagccataagcactacacgcagagcgagacagagtttctgttgtcgtgtgctgaaaccgatgagaacgagacacttgactacgaggagttcgtgaagcggttccacgaacccgcaaaggatatcgggtttaatgtggcagtgctcttgacaaacctgtccgagcatatgccaaacgataccagactgcagaccttcctggagctcgcggaatcggtgctgaactattttcagccatttctgggtagaattgagattatgggctccgccaagcgcatcgagagagtttacttcgagattagtgaatcatctcgcacccagtgggagaagccacaggtcaaagagtccaagaggcaatttattttcgacgtcgtcaatgaaggcggcgagaaagagaagatggagttgttcgtaaatttctgcgaggacaccattttcgagatgcagctggccgcgcaaatctcagaaagtgacctgaatgagagatctgcaaataaagaggaaagcgaaaaagaaagaccagaagagcagggaccacgcatggctttcttcagcattcttactgtccgctccgcgctgtttgcactgagatacaatatcttgactctcatgagaatgctgtctctaaagagtcttaagaaacaaatgaagaaagtaaaaaagatgactgttaaagatatggtgaccgcattcttcagctcttactggagcattttcatgaccctcctgcacttcgtagccagtgtcttcaggggtttctttcgcatcatctgttcccttctgctcggcggcagtctcgtcgaaggggcaaagaagatcaaagtggctgaattgctcgcaaatatgcccgaccccactcaggacgaggtgcggggagatggggaggaaggcgaaagaaagccactggaagccgctttgcctagtgaggatttgacagatctcaaggagttgacggaagagtcagacttgctgtcggacattttcgggctcgacctgaaacgcgagggaggtcagtacaaactaatccctcacaatcctaacgcaggattgagcgacttaatgtcaaatcccgtgcccatgcctgaggtgcaagagaagtttcaggagcagaaggcaaaggaggaagaaaaagaggagaaggaggagaccaagtccgaacccgagaaagccgaaggtgaagatggcgagaaggaagagaaagctaaggaagataagggaaagcaaaagctccgacagcttcacacgcaccgctatggcgagcccgaagtcccagaatccgccttttggaaaaagattatcgcctatcaacagaagttacttaattattttgcccgcaacttctacaacatgaggatgttagctctgtttgtggctttcgcaatcaatttcattctgctattctacaaggtatccacctcaagtgttgtcgaaggcaaggaattgcctacccgctccagtagcgagaatgcgaaggttaccagcctggattcttcttcacatagaatcatcgccgtgcattacgttttggaggaatcttccggctacatggagcctaccctcaggatcctggccatcctgcacactgtaattagtttcttctgtattataggttactattgcctgaaggtccccctggtgatttttaaaagagagaaggaggtggcccgcaaactggagttcgacggcctctacataaccgaacagcccagcgaggacgacatcaaaggacaatgggaccgccttgtcatcaatacgcagagcttcccgaataactattgggacaaattcgttaaaagaaaagtgatggacaaatacggggaattttacggcagggatcgaattagcgagttgttgggaatggacaaagcagccttagattttagtgacgcccgcgagaagaagaaacctaagaaagactcaagcctgtctgcagtgctgaattcaatagacgtgaaataccagatgtggaagttgggcgtcgtgttcaccgacaactcttttttatatcttgcctggtacatgacaatgtccgtgctagggcactacaacaattttttttttgcagcccacttgttggacatcgcaatgggcttcaagacactcaggacaattctatcatccgtcacacacaatggaaaacaactagtgctcaccgtcgggctgcttgctgttgtagtttacctgtatacagttgtggcgttcaactttttcagaaagttctacaataaatcagaagacggcgacactccagacatgaaatgcgatgacatgcttacctgctatatgttccatatgtacgtgggcgtgcgagcagggggggggataggcgatgagatcgaggatcctgcaggcgacgagtacgagatttacaggattatttttgacattactttttttttctttgttattgtgattctgcttgcgattatccaagggctcattattgacgcgttcggggaactgagagatcagcaagagcaagtgaaagaagatatggagacaaagtgcttcatttgcgggataggaaatgactactttgacaccgtacctcatggcttcgaaacccacaccctgcaggaacataacctggcaaattacctattcttccttatgtatctaataaataaggatgaaacagagcacacgggtcaggagagctatgtttggaagatgtaccaagagagatgctgggagttttttcccgcaggagactgtttccgcaaacaatacgaagatcagctcaattag

SEQ ID NO: 286256 - DNA, 14922 bp, Artificial Sequence
  derived and/or modified sequence
ctcgggccaagatcctcctctaataaactctcaaacaagaagatgatgaagtggttctgttcagcgccacagccaagtactaaaaacaaccgaagttacgcttggcagcagaaggatctggccacggacttcgtgagttggtcgccactgcctattccacggatgtgcccccaaacaagcccctctgcgccactgtgttggtcaagccctagcctctctgggagatgtcggagatgctggctgacgccgtggcgcaaccagaaaggccagttggatattatcaaatggtccttcggactgaagacagcccaggggggaggccaccggacgcttctgtatggtcacgcaattctgttgcggcattcctatagcgggatgtacctgtgttgcctgtccacatctaggagcagtaccgataaactggccttcgacgtgggactccaagaggacacaacaggtgaagcatgctggtggacgatacatcctgccagtaagcaacggagtgagggggaaaaagttagggtgggggatgatctgatcctcgtctctgtgagtagcgaacgctatctgcacttatcatacggaaacggatcgctgcacgtcgacgcagcctttcagcaaactctctggagcgtggcccctatatcatccggatcagaagccgcacagggttaccttatcggcggtgatgtgctgcggctactgcatggacatatggacgagtgccttaccgttcctagcggcgaacacggagaggaacagaggagaaccgtgcattacgaaggaggtgcagttagcgttcacgcacgctctttatggcgactggaaactttgcgcgtggcatggtccggatctcacattaggtgggggcagccgttccgcctccggcacgtgaccaccggaaaatatctgagcttgatggaggacaaaaacttgctcttgatggacaaagaaaaagccgatgtgaagtcaacagctttcacttttcggagcagcaaagaaaagctcgatgtgggtgtgagaaaggaagtggatgggatggggaccagtgagattaagtacggcgactcagtatgctacatccagcatgtggatacaggactgtggctgacctatcagtcggtggatgtaaagagtgtacggatgggttccattcagcggaaagcaattatgcaccatgaggggcacatggacgacggaattagcttgagccggagtcagcatgaagaaagccggaccgcgcgagttataagatctacagttttcctgttcaatcgattcatccgaggcctcgatgccctgtcgaagaaagcaaaagcttccaccgtagatcttcccatagagtccgttagtttgagtcttcaggacttgattgggtactttcatcctccggatgaacacctggagcatgaggataagcagaataggctgcgagccttgaagaaccggcaaaacttgttccaggaggagggcatgattaaccttgtactggaatgtatagataggctgcatgtctactcatcggcggctcacttcgccgacgtcgctggtcgtgaggcaggcgaatcctggaagtctattctcaattccttatacgagctgctggccgctctgattagaggtaatcgcaaaaattgcgctcagttctctggctctctggattggttgatcagtcggttggagcgattggaggctagttctggcatcctggaggtcctccattgtgtgctagtcgaatccccagaggcattgaacatcataaaggagggccatattaaaagcattattagcctcctggacaaacacgggaggaatcataaagtgctggacgtcctgtgctccctgtgcgtgtgtcacggggttgctgttcgtagcaatcagcatctgatatgcgataatttattgcccggaagagacctgctgctgcaaacccgactggtgaatcacgtttccagcatgcgccctaacattttcttaggcgtgtctgaaggctccgcccaatacaagaagtggtattatgaactgatggtagaccacactgaaccgtttgtgacagccgaggccacacacctgagagttggatgggctagcacagaagggtattctccctatcccggtgggggagaggaatggggtggtaatggtgtaggggacgatctcttttcctacggttttgacggcttgcatctctggagtggatgcattgcaaggactgtctcaagtcctaaccaacatcttctccgcacggacgacgtgatttcctgctgtctggatctgtccgcaccctcaattagttttagaatcaatggtcagcctgtgcagggaatgtttgaaaattttaacatcgatggtctcttctttccggtggtgagcttctccgccggaatcaaggttcggtttctgctcggcggaaggcatggcgaattcaagttcctcccaccgccagggtatgcgccatgctacgaggccgttttaccaaaagagaagctgaaggtcgagcactctcgggagtacaagcaggagcgaacttacacccgggacttactgggaccaaccgtgtctttgacccaggcggctttcaccccaattcctgttgatacgagccaaattgttctgccaccgcacctggaaagaatccgggagaaacttgccgaaaatattcatgagctgtgggtgatgaacaagatcgagctgggctggcagtacggcccagtccgcgacgacaacaaacgccagcacccatgtttagtggaattctccaaactacctgagcaagagcgtaactacaacctgcagatgtctttggagactcttaaaaccctgctggccctcggatgccatgttggaatctcggacgaacatgccgaagacaaggtgaagaaaatgaagctaccgaaaaattaccagctcacttcaggttataagcctgccccaatggacctgagtttcatcaaactgaccccctcccaggaagcgatggttgacaaactagccgagaatgcccataatgtctgggccagagacagaattcgccaggggtggacatatggaatccaacaggacgtcaagaatcgacgaaatcccaggttggtgccttacactctactggatgatcgcacaaagaagtcaaacaaggattctctgagggaagccgtaagaacacttctgggatatggatacaatctggaagctccggatcaggatcacgctgctcgagccgaggtgtgctcagggacaggagagcggtttcgaattttccgagctgaaaagacttatgctgttaaagcaggacggtggtacttcgagttcgagaccgttacagcaggcgatatgcgagttggttggtctcggccaggctgtcagcctgatcaggagttaggctctgatgaaagagcgttcgcctttgacggtttcaaggcacagcggtggcaccagggaaatgaacactacggacggtcatggcaagcaggagacgtggtggggtgtatggtggacatgaacgagcacacgatgatgtttacactcaatggagagattctcctcgatgactcaggctctgagctcgccttcaaggacttcgatgtgggagatggttttatacctgtgtgctcgctgggggttgcgcaggtcggtagaatgaatttcgggaaggacgtatccacattaaagtacttcacgatatgtggattgcaggagggctatgaacctttcgctgtcaacacaaatagggacattaccatgtggctgagcaagcgcctccctcaattcctgcaggtaccatcaaatcatgagcacattgaagtgacccgcatagatggaaccattgactcctcaccctgcctgaaggtgacacagaagtccttcggcagccagaattcaaatactgacatcatgttttaccgcctgtcaatgcctattgagtgcgctgaggtttttagcaaaacagttgccggtggactgcccggagccggactattcggaccaaaaaatgatctcgaggattacgatgccgattccgatttcgaagtgctgatgaagactgcacatggacatttggtcccagatagggtggacaaagacaaagaagccacaaagcccgagttcaataaccacaaagattacgcgcaggagaagccatcccgtttgaagcagcggtttttgttgcggcgtactaaacccgactactcaacgagtcatagtgctcgccttaccgaggatgtgctggccgatgacagagatgactacgattttctgatgcagacctcaacgtactactattccgtgagaattttcccaggacaggaacccgctaatgtctgggtggggtggattacttctgacttccaccaatacgacaccgggtttgatctggacagagtgaggactgtgacggtgacactcggcgatgaaaagggaaaagtgcacgagagtatcaagcgcagcaactgctacatggtctgtgcgggagagtccatgagtcctggacagggcaggaataacaatggacttgaaatcgggtgcgtggttgatgctgcgagtgggctgctgacttttattgccaatggcaaggagttgtcaacgtactaccaggtcgaaccgagcacgaagctgttcccagctgtgttcgctcaagccacgagtcccaatgtctttcaatttgaactcggacgaattaaaaatgtgatgcctctgtcagccggattgtttaaaagcgagcacaagaatcctgtgccacagtgtcctcccagattgcacgtacagtttctctcgcacgtactctggtcccgcatgcccaaccagtttcttaaagttgatgtgagccggatctctgaaagacagggctggctcgtccagtgtcttgatcccttacagttcatgtcactgcatataccagaggaaaaccgctctgttgacattttggaactgaccgagcaggaagagctgctaaaattccactaccatactttaagattatatagcgccgtgtgtgctctgggaaaccatcgggtggctcatgctctttgctcacatgtcgacgaacctcagttgctctatgccattgaaaacaagtacatgccagggttactgcgggcaggatattacgacctcttgatcgacatacacctttctagctatgctacagccagattaatgatgaacaacgaatacatcgttccaatgaccgaggagactaaaagcatcacactatttcctgacgaaaacaaaaagcatggcctccccggtattggactctcaacaagcctgaggccaaggatgcagttctcaagtccgtctttcgtgtccatatccaatgaatgctaccagtactcaccagagtttcctctggatatcctgaagtcaaaaactatccaaatgttaacagaagccgtcaaagagggctccctacatgcaagagacccagtgggcggaactacagagttcttgtttgtccccctaatcaagctgttttacactttgcttattatggggatcttccataacgaggatttgaagcacatcttgcaacttatcgagccgagcgttttcaaggaggctgctacgccagaggaagagtcagacacactggaaaaggagttaagtgtcgatgatgccaaattacagggcgctggggaggaagaggcgaaaggcggtaagagacccaaggaggggctcttgcagatgaaacttcctgagcccgtgaagcttcagatgtgccttttgctccaatatctgtgcgactgccaggtgagacatcggatcgaggccattgtagccttctccgatgactttgtggcgaaactccaggacaaccagaggtttcggtacaacgaagtgatgcaggctctcaatatgagtgcagccctgactgccagaaaaacaaaagagttccgcagtcccccacaggaacagattaacatgctactcaattttaaagacgataagtccgagtgtccctgcccagaggaaattagggaccagctgttggattttcacgaggacctcatgacccactgtgggatcgagctagatgaagatgggtcattggatgggaattccgatctcactatacggggacgtttactctctctggtggaaaaggtgacataccttaaaaagaaacaggccgaaaaacccgtcgagtccgactctaaaaagagcagcacccttcagcaactgatctccgaaacaatggtgaggtgggctcaagaaagcgtgatagaagacccagagttggtgagggccatgtttgtgctcctgcatcggcaatacgacggtattggcggtctggtaagagcgctgccaaagacctacactattaacggagtgtcagttgaggatacaattaatttgcttgcctcactcggccaaattcgttcactactctccgtccggatggggaaggaagaggaaaagttgatgattcgaggtctgggcgacattatgaataacaaagtgttttaccagcatcctaacttaatgcgggcacttggcatgcacgaaacagtgatggaggtgatggtgaatgtgctgggcggaggggaatcaaaggagatcacgtttcctaaaatggttgctaactgctgcagattcctatgttatttctgtaggatatccagacaaaaccaaaaggctatgttcgatcatttgagttacttactggaaaacagttctgtcggcctagctagtcccgcaatgaggggcagcaccccattggatgtggccgcagcctctgtcatggataataacgagctggcacttgccctgcgcgaacctgatctcgaaaaggtggtccggtatctcgccggatgtgggctgcagtcttgtcagatgctggtttcaaaaggatatccggatatcgggtggaatcccgttgagggtgaacggtatctggacttcctccgctttgcagtcttctgtaatggggagagcgttgaagaaaacgctaacgtagtagtccgcctgctgattcgtaggcccgagtgttttggccctgccctcagaggtgaaggaggcaatggcctcctggccgcaatggaggaagcaatcaaaattgcagaagatcccagtcgcgatggcccttctcctaatagcggctcttcaaagacactggacaccgaggaggaagaggacgatacaattcatatgggaaacgccatcatgacattttattcggcgcttattgatttgcttggcagatgtgcaccagagatgcatctcatacacgccggaaagggcgaggccatccgaattaggagcattctgcggtctctgatacccctgggggatctggtgggagttattagcatcgctttccaaatgcctactatcgcaaaggacggaaacgtggtggaacccgacatgtctgcaggtttctgccctgatcacaaggccgcaatggtcctgttcttggaccgggtgtacggcatagaggtgcaggactttcttctgcatctgctagaagttgggttcttgcccgatctgagggcagctgccagcttggacaccgcggctcttagcgccacagatatggcattggcactgaatcgctacttgtgtacggccgtgcttccactgctaactcgttgcgctcctctgtttgctggcacagagcaccatgcaagtcttattgatagcctcctccatacagtctataggctctccaagggatgttctttgactaaggcacaacgggactccatcgaagtgtgcctcctgtccatttgcggtcagttgagaccttcaatgatgcaacaccttctgcgcaggcttgtgttcgatgtgccgttgcttaacgaacatgccaagatgcccctgaagctccttactaaccactatgaaaggtgctggaagtactattgcctgccagggggatggggtaacttcggcgctgcttctgaggaggagctccatctctcacgaaaacttttctggggaattttcgatgctctgtcgcagaagaaatatgaacaggaactatttaaattggctctgccatgcctctcagcagtggctggagccctacctcctgattacatggagtcaaattacgtgagcatgatggagaaacaaagcagtatggacagtgagggtaactttaatcctcagccagtcgatacatcaaatataacaattccggaaaaactggaatactttattaataagtatgccgaacacagccatgacaaatggagtatggataagctggctaacgggtggatatacggcgaaatctactccgacagttctaaggtccaacctctcatgaagccgtacaaactgctgtcggagaaagagaaggagatttacaggtggcccatcaaggaatccctaaagactatgcttgcatgggggtggagaattgagagaacccgcgagggcgacagtatggccctgtataacaggacccgacgcattagccaaacctctcaggtgtcggtcgacgctgctcatggatactcaccgagggcaattgatatgtcaaacgtcacactgtcgcgagacttgcatgcaatggccgagatgatggctgagaattatcacaacatctgggcaaaaaaaaagaagatggagctggagtctaagggcggaggaaaccatcccctgctggttccctacgataccctgacggcaaaagagaaggccaaggacagggagaaagcacaagatattctgaaattcctccagatcaacggctatgcagtgtctcgagggttcaaagaccttgaactagacactccctctatcgagaagaggtttgcttactcatttcttcagcaattgatccgttacgtcgacgaagcccaccagtacattctggaatttgatggaggtagtagaggtaagggagagcacttcccctatgaacaggagatcaaattctttgccaaggtcgtgctgcccctgattgatcagtactttaaaaatcatcggctgtacttcctctccgccgcatcgcgcccactatgcagcgggggtcatgctagtaacaaggaaaaagagatggtgacaagcctgttttgtaaactcggagtccttgtgaggcaccgcatttctctgttcggcaacgacgccacaagcatcgtcaactgcttgcacattttgggacagacgcttgatgccaggaccgtcatgaagacgggcctggaatctgtgaagtctgctctgcgggctttccttgataatgcagcagaagaccttgagaaaactatggagaacttaaagcagggtcagttcacgcacaccaggaaccagcctaagggagtcactcagatcatcaattacactacagttgccctgctgccgatgctaagcagcctcttcgagcacatcgggcagcatcagttcggcgaggacctaattctggaggacgttcaggtgtcctgttatcgaatcctcacttcgttgtacgctttaggtacatcaaagagtatttacgtggaacggcaaagatcagctttaggtgaatgtctggccgcttttgccggagcattcccagttgcttttttggagactcatttggacaaacataatatttatagcatttacaacacaaaaagttccagagaacgtgccgcattgtcgttacctaccaacgttgaggacgtgtgtcccaacattccttcccttgaaaagttgatggaagagatcgtagagttagcagaaagtgggatcagatacacacagatgccacacgtcatggaggtaattttacctatgctgtgctcgtacatgtcccgatggtgggaacatgggccagaaaataaccctgagcgggcagaaatgtgttgcaccgcactaaactctgaacatatgaacactctgctgggcaatatactcaaaatcatatacaataacttgggcatagacgagggagcatggatgaagagactagccgtcttctcccagccaatcatcaacaaagtcaagccacaactcctcaaaacccactttctgccactcatggagaaactgaaaaaaaaggccgcaacagtagtctccgaggaggatcacctgaaagctgaagcccgaggcgacatgtctgaggcggagctgctcatcttggatgagttcaccacactggctcgtgatctttatgccttttacccgttgctgattcggtttgtggactataatcgcgctaaatggctcaaagaaccaaacccagaagctgaagagctcttccgtatggtcgctgaggttttcatctactggtcgaaaagtcacaattttaaaagggaggaacagaattttgttgtgcagaacgaaataaacaacatgtctttccttattacagacactaagtccaaaatgtccaaagccgcagtgtcagatcaggagagaaaaaagatgaaaaggaagggagatagatactctatgcagacttccctcatagttgcagcgctcaagaggctgttacccatcggattgaatatctgcgccccaggcgatcaggaattgatcgctctggcaaagaaccggttctcgcttaaggacactgaagatgaggtacgagacattattcggagcaatattcatcttcagggcaagttagaagaccccgctattagatggcaaatggcactttacaaagatctgcctaataggacagacgatacgtccgacccggagaaaacagtggaaagggtgttggatattgccaacgtcctctttcacctggagcaaaaatctaagcgcgtgggaagaaggcattattgtctagttgaacacccccaacgctccaagaaagctgtatggcataaactgttgtctaaacagaggaaacgcgctgtagtcgcctgcttccgcatggcccctctatataacctgccaaggcatagggccgtgaatctgtttttgcaaggatatgagaagtcctggatcgaaacagaggaacactattttgaggataaactgatcgaggacctggcgaagcccggtgcagagcctccagaggaggacgagggcaccaagcgggttgaccccctgcaccagctgatactgctgttctcgaggacagcactcactgaaaaatgcaaactggaggaagatttcctttatatggcttatgccgacatcatggcaaagtcatgtcatgatgaagaagacgacgatggcgaagaggaggtcaaatcttttgaagtgactggctcacagcggagcaaggagaaagaaatggagaagcagaaacttctgtaccagcaggcaaggttgcacgatcggggagcagcagagatggtattgcagacaatatcggcctcaaagggcgaaactggaccaatggtcgcagccacgctaaagctgggcatagcgatcctcaacgggggaaacagtaccgttcagcaaaagatgctcgactaccttaaggaaaagaaggatgtgggctttttccaatctttggccggtctcatgcagtcctgttcagtcctggacctcaacgcctttgagcgtcaaaacaaagcagaaggcctgggcatggttactgaggaggggtccggagagaaggtgctgcaagatgatgaattcacatgtgatctctttagatttctccaattgctgtgtgagggtcacaacagtgacttccagaattacttacggactcagacaggaaataataccaccgtaaatattatcatatccactgttgattacttacttagggtgcaagaatcaattagcgacttttactggtattacagcggaaaagacgtgattgatgagcagggccagcggaacttctctaaggcaatccaagtggccaaacaggtgttcaatacgctgacagaatatatccaggggccttgcaccggcaaccagcagtcgttggcccatagccggttgtgggacgctgtggttggcttcctccatgtcttcgctcatatgcagatgaaattaagccaggacagctcccagatcgaactgctgaaagaattaatggaccttcagaaggatatggttgtgatgttattgagcatgctcgaggggaacgtggtaaatggcaccatcggcaaacagatggtggacatgctagtggaatcatcgaataatgtggagatgatcctgaagttttttgatatgttcctcaagcttaaagacctgacaagctcagatacattcaaggagtacgaccccgacggaaaaggtgtgatcagtaagcgggatttccacaaagccatggagtcacacaagcactatacacaatctgagacagagttcttgttgtcctgcgctgaaacagacgagaatgaaactctggattatgaagagttcgtcaaacgcttccatgaaccagccaaggatattggatttaatgtcgctgtcctgctcacaaacctgtctgaacacatgcccaatgatacacgcctccagacgttcctggagttggccgagtctgttcttaattacttccagcccttcctgggacgcatagaaatcatggggtctgctaagaggatcgagagggtttacttcgagatatccgagtcgtcccgcacccaatgggagaagccccaagtgaaagaatccaaacggcaattcatctttgacgtggtcaacgagggcggtgaaaaagaaaagatggagctgttcgttaatttttgcgaagacactatcttcgaaatgcagttggccgctcaaatcagcgagtctgacttaaacgagcgtagtgccaataaagaggagagtgagaaggagcgtccagaggaacaggggcctcggatggctttcttctccatcctgactgtgagaagcgcattatttgcccttcgatataatattctgacacttatgcgtatgctgagtcttaaaagcctgaagaagcagatgaaaaaggtcaagaagatgactgtgaaggatatggtgacagctttcttctccagctactggagcatctttatgactctgttgcacttcgttgcttcagtgtttcggggatttttcagaatcatctgttcgctgcttctgggaggctcactcgtggagggggctaagaaaatcaaagtggctgaattactggctaacatgcctgaccccacccaggatgaagtgcgcggagacggcgaggagggagagcggaagcctttggaggcggcactgccttctgaagatctcactgatctcaaagaacttacggaggaatccgaccttctttccgatatcttcgggctggacctgaaacgagaggggggacagtacaaactcattccccataaccctaacgccggactgtccgaccttatgtccaacccggtcccaatgccggaggtgcaggagaagtttcaggagcaaaaagccaaagaagaagaaaaagaggagaaggaagaaaccaagtccgaacctgaaaaggcagaaggtgaggacggagagaaggaagagaaggctaaagaggataaaggaaaacagaagctcaggcagttgcatacacataggtacggagaacccgaggtgcccgagagcgccttttggaagaagatcattgcataccaacagaagctgctaaattacttcgctaggaacttttacaatatgaggatgcttgcactgtttgttgctttcgcaatcaattttatattgctattctacaaggtctcgacatctagtgtcgttgagggtaaagagctcccaacaagaagctcatctgaaaacgccaaagtgacctcacttgattcatccagtcatagaataatagctgttcactatgtactggaggagagcagcggctacatggagccgacactcagaattctcgcaatcctgcacaccgtgattagctttttctgcataatcggatattactgcctgaaggtgcccctggtaatcttcaaaagagaaaaggaagtggcccgaaagctcgagttcgacgggctctatatcacagaacagccatcggaagacgacattaagggacaatgggaccgactggtgattaacacgcagagtttccctaataattactgggacaagtttgtcaagcgcaaggtcatggataagtacggtgaattttatggacgtgacaggatatcagagctgctgggcatggataaggctgctttagacttctctgatgcacgggaaaagaaaaaacctaagaaagactcctccttgtctgccgtactgaattctatagatgtcaaatatcaaatgtggaagctgggagtcgtgtttaccgataatagtttcctgtatctggcttggtacatgacaatgtcagttctgggccattacaacaacttcttctttgctgcgcacctcctcgacatcgccatggggttcaagaccctcagaacaatcctgagtagtgttacacacaacggcaagcagctcgtcctgaccgtcggtctgctcgccgtggtggtgtatctgtatactgtcgtagcttttaacttctttcgaaaattttacaacaagagtgaggacggggacacgcccgatatgaagtgcgacgacatgctaacctgttacatgttccacatgtacgttggcgttcgtgccggaggtggcataggcgatgagattgaggacccggcaggtgatgaatacgagatctaccgcatcatttttgatatcaccttttttttctttgtcatcgttattctgctagctattatccaggggctgataattgatgcatttggagagcttcgcgaccagcaggagcaggtgaaggaggacatggaaactaagtgctttatctgcggaattggcaatgactacttcgatactgtgccgcatgggtttgaaactcataccctccaggaacataatctggctaactatctgtttttcctgatgtatttaatcaacaaggatgagacggagcacaccggccaggagagttacgtgtggaaaatgtatcaggagcggtgctgggagttcttcccagccggagattgcttccggaagcagtacgaagaccagcttaactac

SEQ ID NO: 286257 - DNA, 15033 bp, Artificial Sequence
  derived and/or modified sequence
ctgggccctagatcctcatctaacaagctctcaaataaaaagatgatgaagtggttctgcagtgcaccgcaaccatccacaaagaacaacagaagctatgcttggcagcagaaggatttggcaacagactttgtttcttggagtccacttccaattccaagaatgtgcccccagacctctccatctgcacctttgtgctggagcagtccctctctgtccgggcgctgcaggagatgctggctaacaccgtggagaaatcagaaggggcaactagatatcattaaatggtcatttggtctaaagactgctcaaggtggtggtcatcgaacactcctctacggacatgccatattgctgcgccattcctatagtggcatgtatctgtgctgcctgtccacctcccggtcttcaactgataagctggcttttgatgttggcttgcaagaggacaccacaggggaggcttgttggtggaccatacaccctgcctctaagcagcgatcagaaggagaaaaagtacgagttggagatgacctcatcttagttagcgtgtcctctgaaaggtacttgcacttgtcttatggcaacggcagcttacacgtggatgccgctttccagcagactctctggagcgtggccccaatcagctcaggaagtgaggcagcccaagggtatctcattggtggtgatgtcctcaggttgctgcatggacacatggacgagtgtctcactgtcccttcaggagaacatggtgaagagcagcggagaactgttcattatgaaggtggcgctgtgtctgttcatgcacgttccctttggagactagagacgctaagagttgcgtggagtggaagccacataagatggggacagccattccgactacgccatgtcacaacaggaaaatacttgagtctcatggaagacaaaaaccttctactcatggacaaagagaaagctgatgtaaaatcaacagcatttaccttccggtcttccaaggaaaaattggatgtaggggtgagaaaagaagtagatggcatgggaacatctgaaataaaatacggtgactcagtatgctatatacaacatgtagacacaggcctatggcttacttaccagtctgtggacgtgaaatccgtgagaatgggatctatacaacgtaaggctattatgcatcatgaaggccacatggatgatggcataagtttgtcgagatcccagcatgaagaatcacgcacagcccgagttatccggagcacagtcttccttttcaatagatttataaggggccttgatgctctcagcaagaaagcgaaggcttccacagtcgatttgcctatagagtccgtaagcctaagtctgcaggatctcattggctacttccaccccccagatgagcatttagagcatgaagacaaacagaacagactacgagccctgaagaatcggcaaaatctcttccaggaagagggaatgatcaacctcgtgcttgagtgcatagaccgtttgcacgtctacagcagtgcagcacactttgctgatgttgctgggcgagaagcaggagagtcttggaaatccattctgaattctctgtatgagttgctggcggctctaattagaggaaatcgtaaaaactgtgctcaattttctggctccctcgactggttgatcagcagattggaaagactggaagcttcttcaggcattctggaagttttacactgtgttttagtagaaagtccagaagctctaaatattattaaagaaggacatattaaatctattatctcacttttagacaaacatggaagaaatcacaaggttctggatgtcttgtgctcactctgtgtttgccacggggttgcagtccgttctaaccagcatctcatctgtgacaatctcctaccaggaagagacttgttattgcagacacgtcttgtgaaccatgtcagcagcatgagacccaatatttttctgggcgtcagtgaaggttctgctcagtataagaaatggtactatgaattgatggtggaccacacagagccctttgtgacagctgaagcaactcacctgcgagtgggctgggcttccactgaaggatattctccctaccctggagggggcgaagagtggggtggaaatggtgttggagatgatctcttctcctatggatttgatggccttcatctctggtcaggttgtattgctcgtactgtaagctcaccaaaccaacatctgttaagaactgatgatgtcatcagttgctgtttagatctgagtgccccaagcatctcgttccgaattaatggacaacctgttcaaggaatgtttgagaatttcaacatcgatggcctcttctttccagtcgttagtttctctgcaggaataaaagtacgctttctgcttggagggcgacatggagaattcaaatttcttcctccacctgggtatgctccttgttatgaagctgttctgccaaaagaaaagttgaaagtggaacacagccgagagtacaagcaagaaagaacttacacacgcgacctgctgggccccacagtttccctgacgcaagctgccttcacacccatccctgtggataccagccagatcgtgttgcctcctcatctagaaagaataagagaaaaactggcagagaatatccatgaactctgggttatgaataaaattgagcttggctggcagtatggtccggttagagatgacaacaagagacaacacccatgcctggtggagttctccaagctgcctgaacaggagcgcaattacaacttacaaatgtcgcttgagaccctgaagactttgttggcattaggatgtcatgtgggtatatcagatgaacatgctgaagacaaggtgaaaaaaatgaagctacccaagaattaccagctgacaagtggatacaagcctgcccctatggacctgagctttatcaaactcaccccatcacaagaagcaatggtggacaagttggcagaaaatgcacataatgtgtgggcgcgggatcgaatccggcagggctggacttatggcatccaacaggacgtaaagaacagaagaaatcctcgccttgttccctacactcttctggatgaccgaaccaagaaatccaacaaggacagcctccgcgaggctgtgcgcacgctgctggggtacggctacaacttggaagcaccagatcaagatcatgcagccagagccgaagtgtgcagcggcaccggggaaaggttccgaatcttccgtgccgagaagacctatgcagtgaaggccggacggtggtattttgaatttgagacggtcactgctggagacatgagggttggttggagtcgtcctggttgtcaaccggatcaggagcttggctcagatgaacgtgcctttgcctttgatggcttcaaggcccagcggtggcatcagggcaatgaacactatgggcgctcttggcaagcaggcgatgtcgtggggtgtatggttgacatgaacgaacacaccatgatgttcacactgaatggtgaaatccttcttgatgattcaggctcagaactggctttcaaggactttgatgttggcgatggattcatacctgtgtgtagccttggagtggctcaagtgggtaggatgaactttggaaaggatgtcagcaccttgaaatatttcaccatctgtggcttacaagagggctatgaaccatttgccgttaatacaaacagggatattaccatgtggctgagcaagaggcttcctcagtttcttcaagttccatcaaaccatgaacatatagaggtgaccagaatagacggcaccatagacagttccccatgtttaaaggtcactcagaagtcttttggttctcagaacagcaacactgatatcatgttttatcgcctgagcatgccgatcgagtgcgcggaggtcttctccaagacggtggctggagggctccctggggctggcctttttgggcccaagaatgacttggaagattatgatgctgattctgactttgaggttctgatgaagacagctcatggccatctagtgcccgatcgtgttgacaaagacaaagaagctactaaaccagagtttaacaaccacaaagattatgcccaggaaaagccctctcgtctgaaacaaagatttttgcttagaagaacaaagccagattacagcacaagccattctgcaagactcaccgaagatgtccttgctgatgatcgggatgactatgatttcttgatgcaaacgtccacgtactattactcagtgagaatctttcctggacaagaacctgctaatgtctgggtgggctggattacatcagatttccatcagtatgacacaggctttgacttggacagagttcgcacagtaacagttactctaggagatgaaaaaggaaaagtgcatgaaagcatcaaacgcagcaactgctatatggtatgtgcgggtgagagcatgagccccgggcaaggacgcaacaataatggactggagattggctgtgtggtggatgctgccagcgggctgctcacattcattgccaatggcaaggaactgagcacatactatcaggtggaaccgagtacaaaattatttcctgcggtttttgcacaagctacaagtcccaatgttttccagtttgagttgggaagaataaagaatgtgatgcctctctcggcgggattattcaagagtgagcacaagaaccccgtgccgcagtgccccccgcgcctccacgtgcagttcctgtcacacgtcctgtggagcagaatgcccaaccagtttttgaaggtagatgtgtctcgaataagtgaacgccaaggctggttggtgcagtgtttggatcctctgcagttcatgtctcttcatatccctgaggaaaacagatctgttgacatcttagagttgacagagcaggaggaattgctgaaatttcactatcacactctccggctctactcagccgtctgtgctcttgggaaccaccgggtggcccatgccctgtgcagccatgtggatgaacctcagctcctctatgccattgagaacaagtacatgcctggtttgctgcgtgctggctactatgacctgctgattgacatccacctgagctcctatgccactgccaggctcatgatgaacaacgagtacattgtccccatgacggaggagacgaagagcatcaccctgttccctgatgagaacaaaaaacacggccttccagggatcggcctcagcacctccctcaggccacggatgcagttttcctcccccagttttgtaagcattagtaatgaatgttaccagtacagtccagagttcccactggacatcctcaagtccaaaaccatacagatgctgacagaagctgttaaagagggcagtcttcatgcccgggacccagttggagggactactgaattcctctttgtacctctcatcaagcttttctataccctgctgatcatgggcatctttcacaacgaggacttgaagcacatcttgcagttgattgagcccagtgtgtttaaagaagctgccactccggaggaggagagtgacacgctggagaaagagctcagtgtggacgatgcaaagctgcaaggagctggtgaggaagaagccaaggggggcaagcggcccaaggaaggcctgctccaaatgaaactgccagagccagttaaattgcagatgtgcctactgcttcagtacctctgtgactgccaggtccggcaccggatagaagccattgtagccttttcagatgattttgtggctaagctccaagacaatcaacgtttccgatacaacgaagtcatgcaagccttaaacatgtcagctgcactcacagccaggaagacaaaggaatttagatcaccacctcaagaacagatcaatatgcttctcaattttaaggatgacaaaagtgaatgtccatgtccagaagaaattcgtgaccaactattggatttccatgaagatttgatgacacattgtggaattgagctggatgaagatgggtctctggatggaaacagtgatttaacaattagagggcgtctgctatccctggtagaaaaggtgacatatctgaagaagaagcaagcagaaaaaccagttgagagtgactccaaaaagtcctccactctgcagcagctgatttctgagaccatggtccgatgggctcaggagtctgtcattgaagaccccgagctggtgagggccatgtttgtgttgctccatcggcagtatgacggcattgggggtcttgttcgggccctgccaaagacctacacgataaatggtgtgtccgtggaggacaccatcaacctgctggcatcccttggtcagattcggtccctgctgagtgtgagaatgggcaaagaagaagagaagctcatgattcgtggattaggggatattatgaataacaaagtgttttaccagcaccctaatctcatgagggcactggggatgcacgagactgtgatggaggtcatggtgaacgtccttggaggtggagagtccaaggaaatcacctttcccaagatggtggccaactgttgccgttttctctgttacttctgtcgtataagtaggcagaatcaaaaagctatgtttgatcatctcagttatttactggaaaacagcagtgttggtcttgcctccccagctatgagaggttcaacaccactggatgtggctgcagcttcggtgatggataataatgaactagcattagctctgcgtgagccggatctagaaaaggtagttcgttatttggctggttgtggactgcaaagttgccagatgctggtgtctaagggctatccagacattgggtggaacccagttgaaggagagagatatcttgactttcttagatttgctgtcttctgtaatggggagagtgtggaggaaaatgcaaatgtcgtggtgagattgctcattcggaggcctgagtgttttggtcctgctttgagaggagaaggtgggaatgggcttcttgcagcaatggaagaagccatcaaaatcgccgaggatccttcccgagatggtccctcaccaaatagcggatccagtaaaacacttgacacagaggaggaggaagatgacactatccacatggggaacgcgatcatgaccttctattcagctttgattgacctcttgggacgctgtgctcctgagatgcatttgattcatgccgggaagggagaagccatcagaattaggtccattttgagatccctcattcccctgggagatttggtgggcgttatcagcatcgcttttcagatgccaacaatagccaaagatgggaatgtggtggaacctgacatgtctgcggggttttgcccagatcacaaggcagccatggttttattccttgacagggtctatgggattgaggttcaagacttcctcctccatcttcttgaggttggctttctgccagatctccgggcggctgcttctttagatacggcagctttgagtgctacagacatggccttggccctcaatcggtacctttgcacagccgtcttgccattgttaacaagatgtgctcctctctttgctggcacagagcaccacgcttctctcattgactcattacttcatactgtgtatagactttctaagggctgttcacttaccaaagctcagcgggattccatagaagtttgtttactctctatttgtggacaactgagaccttctatgatgcagcacttactcagaagattagtatttgatgttccattattaaatgaacacgcaaagatgcctcttaaactgctgacaaatcattatgaaagatgctggaaatattactgcctgcctggagggtggggaaactttggtgctgcctcagaagaagaacttcatttatcaagaaagttgttctggggcatttttgatgccctgtctcaaaagaaatatgaacaagaacttttcaaactggcactgccttgcctgagtgcagttgcgggagctttgcctccagactacatggagtcaaattatgtcagtatgatggaaaaacagtcatcaatggattctgaagggaactttaacccacaacctgttgatacctcaaatattacaattcctgagaaattggaatacttcattaacaaatatgcagaacactcccatgacaaatggtcaatggacaagttggcaaatggatggatttatggagaaatatattcagactcttctaaggttcagccattaatgaagccatataagctattgtctgaaaaggaaaaagaaatttatcgctggccaatcaaagaatctttaaaaactatgctggcttggggctggagaattgaaagaactcgggagggagacagcatggccctttacaaccggactcgtcgtatttctcagacaagccaggtttctgtggacgctgcccatggttacagtccccgggccattgacatgagcaatgttacactatctagagacctgcatgctatggcagaaatgatggctgaaaactaccataatatatgggcaaagaaaaagaaaatggagttggagtccaaaggaggaggaaaccatcctctgctggtgccctatgatacactgacagccaaagagaaagccaaggatagagaaaaagcacaggacatcctcaagttcttgcagatcaatggatatgctgtatccagaggatttaaggacctggaactggacacgccttctattgagaaacgatttgcctatagtttcctccaacaactcattcgctatgtggatgaagcccatcagtatatcctggagtttgatggtggcagcagaggcaaaggagaacatttcccttatgaacaagaaatcaagttctttgcaaaagtcgttcttcctttaattgatcagtatttcaaaaaccatcgtttatacttcttatctgcagcaagcagacctctctgctctggaggacatgcttccaacaaagagaaagaaatggtgactagcctattctgcaaacttggagttcttgtcaggcataggatttcactatttggcaatgatgcaacatcaattgtcaactgtcttcatattttgggtcagactttggatgcaaggacagtgatgaagactggcctggagagtgttaaaagtgcactcagagcttttctggacaacgctgcagaggatctggagaagaccatggaaaacctcaagcagggccagttcactcacacccgaaaccagcccaaaggggttactcagattatcaattacaccacagtggccctgctgccaatgctgtcttcattatttgaacatattggccagcatcagttcggagaagacctaatattggaagatgtccaggtgtcttgttatagaattctgactagcttatatgctttgggaaccagcaagagtatttacgtggagaggcaacgttctgcattaggagaatgtctagctgcctttgctggtgcttttcctgtagcatttttggaaactcatctggacaaacataatatttactccatctacaataccaagtcttcacgagaaagagcagctctcagtttgccaactaatgtggaagatgtttgtccaaacataccgtctttggagaaactcatggaagaaatcgtggaattagccgagtccggcattcgctacactcaaatgccacatgtcatggaagtcatactgcccatgctttgcagctacatgtctcgttggtgggagcatggacctgagaacaatccagaacgggccgagatgtgctgcacagccctgaactcagagcacatgaacacacttctagggaacatattgaaaatcatatataataacttggggattgatgagggagcctggatgaagaggctagcagtgttttcccagcctataataaataaagtgaaacctcagctcttgaaaactcatttcttgccgttaatggagaaactcaagaaaaaggcagctacggtggtgtctgaggaagaccacctgaaagctgaggccaggggggacatgtcggaggcagaactcctcatcctagatgagttcaccacactggccagagatctctatgccttctaccctctcttgattagatttgtggactataacagggcaaagtggctaaaggagcctaacccagaagcagaggagctcttccgcatggtggctgaagtgtttatctactggtcgaagtcccataatttcaaaagagaagagcagaacttcgttgtacagaatgaaatcaacaatatgtctttccttattactgataccaagtcaaagatgtcaaaggcagctgtttctgatcaggaaaggaagaaaatgaagcgcaaaggagatcggtattccatgcagacctctctgattgtagcagctctgaagcggttactgcccattgggttgaacatctgtgcccctggggaccaggagctcattgctctggccaaaaatcgatttagcctgaaagataccgaggatgaagtacgagatataatccgcagcaatattcatttacaaggcaagttggaggatcctgctattagatggcaaatggctctttacaaagacttaccaaacaggactgatgatacctcagatccagagaagacggtagaaagagtattggatatagcaaatgtgctttttcatcttgaacagaagtctaaacgtgtgggtcggagacattactgtctggtggaacatcctcagagatctaaaaaggctgtatggcataaactactgtccaagcagaggaaaagggctgttgtagcctgcttccggatggcccccttatataatctgccaaggcatcgggctgtcaatctctttcttcagggatatgaaaagtcttggattgaaacagaagaacattactttgaagataaactgatagaagatttagcaaaacctggggctgaacctccagaagaagatgaaggcactaagagagttgatcctctacatcagctgatccttctgtttagtcggacagctttaacagagaaatgcaaactggaggaagattttttatatatggcctatgcagatattatggcaaagagttgtcatgatgaggaagatgacgatggtgaagaggaagtgaagagttttgaagtcacaggatcccaacgcagcaaggaaaaagaaatggaaaagcaaaagcttctataccagcaagcccgactccacgatcgtggcgcggctgagatggtgctacagacaatcagtgccagcaaaggtgaaactggaccaatggtagcagctactctgaaacttggaattgctattttaaatggtgggaactccacagtacagcagaaaatgcttgactacctcaaggagaaaaaggatgtgggcttctttcagagcctggccggcctgatgcagtcatgtagtgtccttgacctaaatgcatttgagcgacaaaacaaagctgaaggtcttgggatggtgacagaggaaggatcaggagaaaaggttctgcaggacgatgagttcacctgtgacctcttccgattcctgcaactactctgtgagggacacaactcagattttcagaattatctgagaactcagactggcaataatacaactgtcaacataattatctccactgtagactacctactgagagttcaggaatcaattagtgacttttattggtattactctgggaaagatgttattgatgaacaaggacaacggaatttctccaaagctatccaagtggcaaaacaagtctttaacactcttacagagtatattcagggtccttgcactgggaatcaacagagtttggcacacagcaggctgtgggatgctgtggtcggctttcttcatgtgtttgcccatatgcagatgaagctgtcgcaggattccagtcaaattgagctattaaaagaattaatggatctgcagaaggatatggtggtcatgttgctgtccatgttagaaggtaatgttgttaatggaacgattggcaaacagatggtggatatgcttgtggaatcttccaacaacgtggagatgattctcaaattttttgacatgttcttaaaactaaaggatttgacgtcgtctgatacttttaaagaatatgaccccgatggcaagggagtcatttccaagagggacttccacaaagcgatggagagccataagcactacacgcagtcagaaacggaatttcttttgtcttgtgcggagacggatgagaatgaaaccctcgactacgaagagttcgtcaaacgcttccacgaacctgcgaaggacatcggcttcaacgtcgccgtccttctgacaaacctctctgagcacatgcccaacgatacccgacttcagacttttctggaattagcagagagcgtcctgaattatttccagccctttctgggccgcatcgaaatcatgggaagcgccaaacgcatcgagagggtctattttgaaatcagtgagtccagccgaacccagtgggagaagccccaggtcaaggagtccaaaagacagttcatatttgacgtggtcaacgaaggcggagagaaagagaagatggaactctttgtgaacttctgcgaggacaccatctttgaaatgcagctggcggctcagatctcggagtcggacttgaacgagaggtcagcgaataaggaagaaagcgagaaggagaggccggaagagcaggggccgaggatggctttcttctccattctgacggtcaggtcggccctgtttgcgctcaggtacaatatcttgacccttatgcgaatgctcagtctgaagagcctgaagaagcagatgaaaaaagtaaaaaagatgaccgtgaaggacatggtcacggccttcttttcatcctactggagtattttcatgaccctcttgcacttcgtggccagcgttttcagaggctttttccgcatcatttgcagcctgctgcttgggggaagcctcgtcgaaggtgctaaaaagatcaaagttgcagaactgttagccaacatgccagaccccactcaggatgaggttagaggagatggggaggagggagagaggaaacccctggaagccgccctgccctccgaggatctgaccgacttaaaggagctgacagaggaaagtgaccttctttcggacatctttggcctggatctgaagagagaaggaggacagtacaaactgattcctcataatccaaatgctgggctcagtgacctcatgagcaacccagtccccatgcctgaggtgcaggaaaaatttcaggaacagaaggcaaaagaagaagaaaaggaagaaaaagaagaaaccaaatctgaacctgaaaaagccgagggagaagatggagaaaaagaagagaaagccaaggaagacaagggcaaacaaaagttgaggcagcttcacacacacagatacggagaaccagaagtgccagagtcagcattctggaagaaaatcatagcatatcaacagaaacttctaaactattttgctcgcaacttttacaacatgagaatgttagccttatttgtcgcatttgctatcaatttcatcttgctcttttataaggtctccacttcttctgtggttgaaggaaaggagctccccacgagaagttcaagtgaaaatgccaaagtgacaagcctggacagcagctcccatagaatcatcgcagttcactatgtactagaggagagcagcggctacatggagcccacgttgcgtatcttagctattctgcacacggtcatttctttcttctgcatcattggatactactgcttgaaagtcccattggttatttttaagcgagaaaaggaagtggcacggaaattggaatttgatgggctttatattacagaacagccttcagaagatgatattaaaggccagtgggatagactcgtaatcaacacacagtcatttcccaacaactactgggacaaatttgttaaaagaaaggttatggataaatatggagagttctacggccgagacagaatcagtgaattacttggcatggacaaggcagctctggacttcagtgatgccagagaaaagaagaagccaaagaaagacagctccttatcagctgtactgaactccattgatgtgaagtatcagatgtggaaactaggagtcgttttcactgacaactccttcctctacctagcctggtatatgactatgtctgttcttggacactataacaactttttttttgccgctcaccttctcgacattgctatgggattcaagacattaagaaccatcttgtcctcagtaactcacaatggcaaacagctcgtattaaccgttggcttattagctgttgttgtatacctatacactgtggtggcattcaattttttccgaaaattctacaataaaagtgaagatggtgatacaccagatatgaaatgtgacgatatgctaacatgctatatgttccacatgtatgttggagttcgtgctggaggagggatcggggatgaaatcgaagacccagcaggagatgaatatgagatctatcgaatcatctttgacatcactttcttcttctttgttattgtcattctcttggccataatacaaggtctaattattgatgcttttggagaactaagagaccaacaggaacaagtcaaagaagacatggagaccaaatgcttcatctgtgggataggcaatgattacttcgacacagtgccacatggctttgaaacccacactttacaggagcacaacttggctaattacttgttttttctgatgtatcttataaacaaagatgaaacagaacacacaggacaggaatcttatgtctggaagatgtatcaagaaaggtgttgggaatttttcccagcaggggattgcttccggaaacagtatgaagaccagctaaattaaactcagacccaatcacctctaaaaaccaaaaccctacccctctctctccctctctcaatttctctgctctcttggaaacattttgctgattttgtgaattgccagcgttgt

SEQ ID NO: 286258 - DNA, 4343 bp, Artificial Sequence
  derived and/or modified sequence
agcctattctgcaaacttggagttcttgtcaggcataggatttcactatttggcaatgatgcaacatcaattgtcaactgtcttcatattttgggtcagactttggatgcaaggacagtgatgaagactggcctggagagtgttaaaagtgcactcagagcttttctggacaacgctgcagaggatctggagaagaccatggaaaacctcaagcagggccagttcactcacacccgaaaccagcccaaaggggttactcagattatcaattacaccacagtggccctgctgccaatgctgtcttcattatttgaacatattggccagcatcagttcggagaagacctaatattggaagatgtccaggtgtcttgttatagaattctgactagcttatatgctttgggaaccagcaagagtatttacgtggagaggcaacgttctgcattaggagaatgtctagctgcctttgctggtgcttttcctgtagcatttttggaaactcatctggacaaacataatatttactccatctacaataccaagtcttcacgagaaagagcagctctcagtttgccaactaatgtggaagatgtttgtccaaacataccgtctttggagaaactcatggaagaaatcgtggaattagccgagtccggcattcgctacactcaaatgccacatgtcatggaagtcatactgcccatgctttgcagctacatgtctcgttggtgggagcatggacctgagaacaatccagaacgggccgagatgtgctgcacagccctgaactcagagcacatgaacacacttctagggaacatattgaaaatcatatataataacttggggattgatgagggagcctggatgaagaggctagcagtgttttcccagcctataataaataaagtgaaacctcagctcttgaaaactcatttcttgccgttaatggagaaactcaagaaaaaggcagctacggtggtgtctgaggaagaccacctgaaagctgaggccaggggggacatgtcggaggcagaactcctcatcctagatgagttcaccacactggccagagatctctatgccttctaccctctcttgattagatttgtggactataacagggcaaagtggctaaaggagcctaacccagaagcagaggagctcttccgcatggtggctgaagtgtttatctactggtcgaagtcccataatttcaaaagagaagagcagaacttcgttgtacagaatgaaatcaacaatatgtctttccttattactgataccaagtcaaagatgtcaaaggcagctgtttctgatcaggaaaggaagaaaatgaagcgcaaaggagatcggtattccatgcagacctctctgattgtagcagctctgaagcggttactgcccattgggttgaacatctgtgcccctggggaccaggagctcattgctctggccaaaaatcgatttagcctgaaagataccgaggatgaagtacgagatataatccgcagcaatattcatttacaaggcaagttggaggatcctgctattagatggcaaatggctctttacaaagacttaccaaacaggactgatgatacctcagatccagagaagacggtagaaagagtattggatatagcaaatgtgctttttcatcttgaacagaagtctaaacgtgtgggtcggagacattactgtctggtggaacatcctcagagatctaaaaaggctgtatggcataaactactgtccaagcagaggaaaagggctgttgtagcctgcttccggatggcccccttatataatctgccaaggcatcgggctgtcaatctctttcttcagggatatgaaaagtcttggattgaaacagaagaacattactttgaagataaactgatagaagatttagcaaaacctggggctgaacctccagaagaagatgaaggcactaagagagttgatcctctacatcagctgatccttctgtttagtcggacagctttaacagagaaatgcaaactggaggaagattttttatatatggcctatgcagatattatggcaaagagttgtcatgatgaggaagatgacgatggtgaagaggaagtgaagagttttgaacacgatattatcaaagatttaagaaacaaatttgccagcctcggcgagaactctctggaaaaagaaatggaaaagcaaaagcttctataccagcaagcccgactccacgatcgtggcgcggctgagatggtgctacagacaatcagtgccagcaaaggtgaaactggaccaatggtagcagctactctgaaacttggaattgctattttaaatggtgggaactccacagtacagcagaaaatgcttgactacctcaaggagaaaaaggatgtgggcttctttcagagcctggccggcctgatgcagtcatgtagtgtccttgacctaaatgcatttgagcgacaaaacaaagctgaaggtcttgggatggtgacagaggaaggatcaggagaaaaggttctgcaggacgatgagttcacctgtgacctcttccgattcctgcaactactctgtgagggacacaactcagattttcagaattatctgagaactcagactggcaataatacaactgtcaacataattatctccactgtagactacctactgagagttcaggaatcaattagtgacttttattggtattactctgggaaagatgttattgatgaacaaggacaacggaatttctccaaagctatccaagtggcaaaacaagtctttaacactcttacagagtatattcagggtccttgcactgggaatcaacagagtttggcacacagcaggctgtgggatgctgtggtcggctttcttcatgtgtttgcccatatgcagatgaagctgtcgcaggattccagtcaaattgagctattaaaagaattaatggatctgcagaaggatatggtggtcatgttgctgtccatgttagaaggtaatgttgttaatggaacgattggcaaacagatggtggatatgcttgtggaatcttccaacaacgtggagatgattctcaaattttttgacatgttcttaaaactaaaggatttgacgtcgtctgatacttttaaagaatatgaccccgatggcaagggagtcatttccaagagggacttccacaaagcgatggagagccataagcactacacgcagtcagaaacggaatttcttttgtcttgtgcggagacggatgagaatgaaaccctcgactacgaagagttcgtcaaacgcttccacgaacctgcgaaggacatcggcttcaacgtcgccgtccttctgacaaacctctctgagcacatgcccaacgatacccgacttcagacttttctggaattagcagagagcgtcctgaattatttccagccctttctgggccgcatcgaaatcatgggaagcgccaaacgcatcgagagggtctattttgaaatcagtgagtccagccgaacccagtgggagaagccccaggtcaaggagtccaaaagacagttcatatttgacgtggtcaacgaaggcggagagaaagagaagatggaactctttgtgaacttctgcgaggacaccatctttgaaatgcagctggcggctcagatctcggagtcggacttgaacgagaggtcagcgaataaggaagaaagcgagaaggagaggccggaagagcaggggccgaggatggctttcttctccattctgacggtcaggtcggccctgtttgcgctcaggtacaatatcttgacccttatgcgaatgctcagtctgaagagcctgaagaagcagatgaaaaaagtaaaaaagatgaccgtgaaggacatggtcacggccttcttttcatcctactggagtattttcatgaccctcttgcacttcgtggccagcgttttcagaggctttttccgcatcatttgcagcctgctgcttgggggaagcctcgtcgaaggtgctaaaaagatcaaagttgcagaactgttagccaacatgccagaccccactcaggatgaggttagaggagatggggaggagggagagaggaaacccctggaagccgccctgccctccgaggatctgaccgacttaaaggagctgacagaggaaagtgaccttctttcggacatctttggcctggatctgaagagagaaggaggacagtacaaactgattcctcataatccaaatgctgggctcagtgacctcatgagcaacccagtccccatgcctgaggtgcaggaaaaatttcaggtaatttatctagttttataaggaacagaagaaaaagaaga

SEQ ID NO: 286259 - DNA, 14922 bp, Artificial Sequence
  derived and/or modified sequence
ctgggccccagaagcagcagcaacaagctgagcaacaagaagatgatgaagtggttctgcagcgccccccagcccagcaccaagaacaacagaagctacgcctggcagcagaaggacctggccaccgacttcgtgagctggagccccctgcccatccccagaatgtgcccccagaccagccccagcgcccccctgtgctggagcagccccagcctgagcggcagatgcagaagatgctggctgaccccctggagaaaccagaagggccagctggacatcatcaagtggagcttcggcctgaagaccgcccagggcggcggccacagaaccctgctgtacggccacgccatcctgctgagacacagctacagcggcatgtacctgtgctgcctgagcaccagcagaagcagcaccgacaagctggccttcgacgtgggcctgcaggaggacaccaccggcgaggcctgctggtggaccatccaccccgccagcaagcagagaagcgagggcgagaaggtgagagtgggcgacgacctgatcctggtgagcgtgagcagcgagagatacctgcacctgagctacggcaacggcagcctgcacgtggacgccgccttccagcagaccctgtggagcgtggcccccatcagcagcggcagcgaggccgcccagggctacctgatcggcggcgacgtgctgagactgctgcacggccacatggacgagtgcctgaccgtgcccagcggcgagcacggcgaggagcagagaagaaccgtgcactacgagggcggcgccgtgagcgtgcacgccagaagcctgtggagactggagaccctgagagtggcctggagcggcagccacatcagatggggccagcccttcagactgagacacgtgaccaccggcaagtacctgagcctgatggaggacaagaacctgctgctgatggacaaggagaaggccgacgtgaagagcaccgccttcaccttcagaagcagcaaggagaagctggacgtgggcgtgagaaaggaggtggacggcatgggcaccagcgagatcaagtacggcgacagcgtgtgctacatccagcacgtggacaccggcctgtggctgacctaccagagcgtggacgtgaagagcgtgagaatgggcagcatccagagaaaggccatcatgcaccacgagggccacatggacgacggcatcagcctgagcagaagccagcacgaggagagcagaaccgccagagtgatcagaagcaccgtgttcctgttcaacagattcatcagaggcctggacgccctgagcaagaaggccaaggccagcaccgtggacctgcccatcgagagcgtgagcctgagcctgcaggacctgatcggctacttccacccccccgacgagcacctggagcacgaggacaagcagaacagactgagagccctgaagaacagacagaacctgttccaggaggagggcatgatcaacctggtgctggagtgcatcgacagactgcacgtgtacagcagcgccgcccacttcgccgacgtggccggcagagaggccggcgagagctggaagagcatcctgaacagcctgtacgagctgctggccgccctgatcagaggcaacagaaagaactgcgcccagttcagcggcagcctggactggctgatcagcagactggagagactggaggccagcagcggcatcctggaggtgctgcactgcgtgctggtggagagccccgaggccctgaacatcatcaaggagggccacatcaagagcatcatcagcctgctggacaagcacggcagaaaccacaaggtgctggacgtgctgtgcagcctgtgcgtgtgccacggcgtggccgtgagaagcaaccagcacctgatctgcgacaacctgctgcccggcagagacctgctgctgcagaccagactggtgaaccacgtgagcagcatgagacccaacatcttcctgggcgtgagcgagggcagcgcccagtacaagaagtggtactacgagctgatggtggaccacaccgagcccttcgtgaccgccgaggccacccacctgagagtgggctgggccagcaccgagggctacagcccctaccccggcggcggcgaggagtggggcggcaacggcgtgggcgacgacctgttcagctacggcttcgacggcctgcacctgtggagcggctgcatcgccagaaccgtgagcagccccaaccagcacctgctgagaaccgacgacgtgatcagctgctgcctggacctgagcgcccccagcatcagcttcagaatcaacggccagcccgtgcagggcatgttcgagaacttcaacatcgacggcctgttcttccccgtggtgagcttcagcgccggcatcaaggtgagattcctgctgggcggcagacacggcgagttcaagttcctgcccccccccggctacgccccctgctacgaggccgtgctgcccaaggagaagctgaaggtggagcacagcagagagtacaagcaggagagaacctacaccagagacctgctgggccccaccgtgagcctgacccaggccgccttcacccccatccccgtggacaccagccagatcgtgctgcccccccacctggagagaatcagagagaagctggccgagaacatccacgagctgtgggtgatgaacaagatcgagctgggctggcagtacggccccgtgagagacgacaacaagagacagcacccctgcctggtggagttcagcaagctgcccgagcaggagagaaactacaacctgcagatgagcctggagaccctgaagaccctgctggccctgggctgccacgtgggcatcagcgacgagcacgccgaggacaaggtgaagaagatgaagctgcccaagaactaccagctgaccagcggctacaagcccgcccccatggacctgagcttcatcaagctgacccccagccaggaggccatggtggacaagctggccgagaacgcccacaacgtgtgggccagagacagaatcagacagggctggacctacggcatccagcaggacgtgaagaacagaagaaaccccagactggtgccctacaccctgctggacgacagaaccaagaagagcaacaaggacagcctgagagaggccgtgagaaccctgctgggctacggctacaacctggaggcccccgaccaggaccacgccgccagagccgaggtgtgcagcggcaccggcgagagattcagaatcttcagagccgagaagacctacgccgtgaaggccggcagatggtacttcgagttcgagaccgtgaccgccggcgacatgagagtgggctggagcagacccggctgccagcccgaccaggagctgggcagcgacgagagagccttcgccttcgacggcttcaaggcccagagatggcaccagggcaacgagcactacggcagaagctggcaggccggcgacgtggtgggctgcatggtggacatgaacgagcacaccatgatgttcaccctgaacggcgagatcctgctggacgacagcggcagcgagctggccttcaaggacttcgacgtgggcgacggcttcatccccgtgtgcagcctgggcgtggcccaggtgggcagaatgaacttcggcaaggacgtgagcaccctgaagtacttcaccatctgcggcctgcaggagggctacgagcccttcgccgtgaacaccaacagagacatcaccatgtggctgagcaagagactgccccagttcctgcaggtgcccagcaaccacgagcacatcgaggtgaccagaatcgacggcaccatcgacagcagcccctgcctgaaggtgacccagaagagcttcggcagccagaacagcaacaccgacatcatgttctacagactgagcatgcccatcgagtgcgccgaggtgttcagcaagaccgtggccggcggcctgcccggcgccggcctgttcggccccaagaacgacctggaggactacgacgccgacagcgacttcgaggtgctgatgaagaccgcccacggccacctggtgcccgacagagtggacaaggacaaggaggccaccaagcccgagttcaacaaccacaaggactacgcccaggagaagcccagcagactgaagcagagattcctgctgagaagaaccaagcccgactacagcaccagccacagcgccagactgaccgaggacgtgctggccgacgacagagacgactacgacttcctgatgcagaccagcacctactactacagcgtgagaatcttccccggccaggagcccgccaacgtgtgggtgggctggatcaccagcgacttccaccagtacgacaccggcttcgacctggacagagtgagaaccgtgaccgtgaccctgggcgacgagaagggcaaggtgcacgagagcatcaagagaagcaactgctacatggtgtgcgccggcgagagcatgagccccggccagggcagaaacaacaacggcctggagatcggctgcgtggtggacgccgccagcggcctgctgaccttcatcgccaacggcaaggagctgagcacctactaccaggtggagcccagcaccaagctgttccccgccgtgttcgcccaggccaccagccccaacgtgttccagttcgagctgggcagaatcaagaacgtgatgcccctgagcgccggcctgttcaagagcgagcacaagaaccccgtgccccagtgcccccccagactgcacgtgcagttcctgagccacgtgctgtggagcagaatgcccaaccagttcctgaaggtggacgtgagcagaatcagcgagagacagggctggctggtgcagtgcctggaccccctgcagttcatgagcctgcacatccccgaggagaacagaagcgtggacatcctggagctgaccgagcaggaggagctgctgaagttccactaccacaccctgagactgtacagcgccgtgtgcgccctgggcaaccacagagtggcccacgccctgtgcagccacgtggacgagccccagctgctgtacgccatcgagaacaagtacatgcccggcctgctgagagccggctactacgacctgctgatcgacatccacctgagcagctacgccaccgccagactgatgatgaacaacgagtacatcgtgcccatgaccgaggagaccaagagcatcaccctgttccccgacgagaacaagaagcacggcctgcccggcatcggcctgagcaccagcctgagacccagaatgcagttcagcagccccagcttcgtgagcatcagcaacgagtgctaccagtacagccccgagttccccctggacatcctgaagagcaagaccatccagatgctgaccgaggccgtgaaggagggcagcctgcacgccagagaccccgtgggcggcaccaccgagttcctgttcgtgcccctgatcaagctgttctacaccctgctgatcatgggcatcttccacaacgaggacctgaagcacatcctgcagctgatcgagcccagcgtgttcaaggaggccgccacccccgaggaggagagcgacaccctggagaaggagctgagcgtggacgacgccaagctgcagggcgccggcgaggaggaggccaagggcggcaagagacccaaggagggcctgctgcagatgaagctgcccgagcccgtgaagctgcagatgtgcctgctgctgcagtacctgtgcgactgccaggtgagacacagaatcgaggccatcgtggccttcagcgacgacttcgtggccaagctgcaggacaaccagagattcagatacaacgaggtgatgcaggccctgaacatgagcgccgccctgaccgccagaaagaccaaggagttcagaagccccccccaggagcagatcaacatgctgctgaacttcaaggacgacaagagcgagtgcccctgccccgaggagatcagagaccagctgctggacttccacgaggacctgatgacccactgcggcatcgagctggacgaggacggcagcctggacggcaacagcgacctgaccatcagaggcagactgctgagcctggtggagaaggtgacctacctgaagaagaagcaggccgagaagcccgtggagagcgacagcaagaagagcagcaccctgcagcagctgatcagcgagaccatggtgagatgggcccaggagagcgtgatcgaggaccccgagctggtgagagccatgttcgtgctgctgcacagacagtacgacggcatcggcggcctggtgagagccctgcccaagacctacaccatcaacggcgtgagcgtggaggacaccatcaacctgctggccagcctgggccagatcagaagcctgctgagcgtgagaatgggcaaggaggaggagaagctgatgatcagaggcctgggcgacatcatgaacaacaaggtgttctaccagcaccccaacctgatgagagccctgggcatgcacgagaccgtgatggaggtgatggtgaacgtgctgggcggcggcgagagcaaggagatcaccttccccaagatggtggccaactgctgcagattcctgtgctacttctgcagaatcagcagacagaaccagaaggccatgttcgaccacctgagctacctgctggagaacagcagcgtgggcctggccagccccgccatgagaggcagcacccccctggacgtggccgccgccagcgtgatggacaacaacgagctggccctggccctgagagagcccgacctggagaaggtggtgagatacctggccggctgcggcctgcagagctgccagatgctggtgagcaagggctaccccgacatcggctggaaccccgtggagggcgagagatacctggacttcctgagattcgccgtgttctgcaacggcgagagcgtggaggagaacgccaacgtggtggtgagactgctgatcagaagacccgagtgcttcggccccgccctgagaggcgagggcggcaacggcctgctggccgccatggaggaggccatcaagatcgccgaggaccccagcagagacggccccagccccaacagcggcagcagcaagaccctggacaccgaggaggaggaggacgacaccatccacatgggcaacgccatcatgaccttctacagcgccctgatcgacctgctgggcagatgcgcccccgagatgcacctgatccacgccggcaagggcgaggccatcagaatcagaagcatcctgagaagcctgatccccctgggcgacctggtgggcgtgatcagcatcgccttccagatgcccaccatcgccaaggacggcaacgtggtggagcccgacatgagcgccggcttctgccccgaccacaaggccgccatggtgctgttcctggacagagtgtacggcatcgaggtgcaggacttcctgctgcacctgctggaggtgggcttcctgcccgacctgagagccgccgccagcctggacaccgccgccctgagcgccaccgacatggccctggccctgaacagatacctgtgcaccgccgtgctgcccctgctgaccagatgcgcccccctgttcgccggcaccgagcaccacgccagcctgatcgacagcctgctgcacaccgtgtacagactgagcaagggctgcagcctgaccaaggcccagagagacagcatcgaggtgtgcctgctgagcatctgcggccagctgagacccagcatgatgcagcacctgctgagaagactggtgttcgacgtgcccctgctgaacgagcacgccaagatgcccctgaagctgctgaccaaccactacgagagatgctggaagtactactgcctgcccggcggctggggcaacttcggcgccgccagcgaggaggagctgcacctgagcagaaagctgttctggggcatcttcgacgccctgagccagaagaagtacgagcaggagctgttcaagctggccctgccctgcctgagcgccgtggccggcgccctgccccccgactacatggagagcaactacgtgagcatgatggagaagcagagcagcatggacagcgagggcaacttcaacccccagcccgtggacaccagcaacatcaccatccccgagaagctggagtacttcatcaacaagtacgccgagcacagccacgacaagtggagcatggacaagctggccaacggctggatctacggcgagatctacagcgacagcagcaaggtgcagcccctgatgaagccctacaagctgctgagcgagaaggagaaggagatctacagatggcccatcaaggagagcctgaagaccatgctggcctggggctggagaatcgagagaaccagagagggcgacagcatggccctgtacaacagaaccagaagaatcagccagaccagccaggtgagcgtggacgccgcccacggctacagccccagagccatcgacatgagcaacgtgaccctgagcagagacctgcacgccatggccgagatgatggccgagaactaccacaacatctgggccaagaagaagaagatggagctggagagcaagggcggcggcaaccaccccctgctggtgccctacgacaccctgaccgccaaggagaaggccaaggacagagagaaggcccaggacatcctgaagttcctgcagatcaacggctacgccgtgagcagaggcttcaaggacctggagctggacacccccagcatcgagaagagattcgcctacagcttcctgcagcagctgatcagatacgtggacgaggcccaccagtacatcctggagttcgacggcggcagcagaggcaagggcgagcacttcccctacgagcaggagatcaagttcttcgccaaggtggtgctgcccctgatcgaccagtacttcaagaaccacagactgtacttcctgagcgccgccagcagacccctgtgcagcggcggccacgccagcaacaaggagaaggagatggtgaccagcctgttctgcaagctgggcgtgctggtgagacacagaatcagcctgttcggcaacgacgccaccagcatcgtgaactgcctgcacatcctgggccagaccctggacgccagaaccgtgatgaagaccggcctggagagcgtgaagagcgccctgagagccttcctggacaacgccgccgaggacctggagaagaccatggagaacctgaagcagggccagttcacccacaccagaaaccagcccaagggcgtgacccagatcatcaactacaccaccgtggccctgctgcccatgctgagcagcctgttcgagcacatcggccagcaccagttcggcgaggacctgatcctggaggacgtgcaggtgagctgctacagaatcctgaccagcctgtacgccctgggcaccagcaagagcatctacgtggagagacagagaagcgccctgggcgagtgcctggccgccttcgccggcgccttccccgtggccttcctggagacccacctggacaagcacaacatctacagcatctacaacaccaagagcagcagagagagagccgccctgagcctgcccaccaacgtggaggacgtgtgccccaacatccccagcctggagaagctgatggaggagatcgtggagctggccgagagcggcatcagatacacccagatgccccacgtgatggaggtgatcctgcccatgctgtgcagctacatgagcagatggtgggagcacggccccgagaacaaccccgagagagccgagatgtgctgcaccgccctgaacagcgagcacatgaacaccctgctgggcaacatcctgaagatcatctacaacaacctgggcatcgacgagggcgcctggatgaagagactggccgtgttcagccagcccatcatcaacaaggtgaagccccagctgctgaagacccacttcctgcccctgatggagaagctgaagaagaaggccgccaccgtggtgagcgaggaggaccacctgaaggccgaggccagaggcgacatgagcgaggccgagctgctgatcctggacgagttcaccaccctggccagagacctgtacgccttctaccccctgctgatcagattcgtggactacaacagagccaagtggctgaaggagcccaaccccgaggccgaggagctgttcagaatggtggccgaggtgttcatctactggagcaagagccacaacttcaagagagaggagcagaacttcgtggtgcagaacgagatcaacaacatgagcttcctgatcaccgacaccaagagcaagatgagcaaggccgccgtgagcgaccaggagagaaagaagatgaagagaaagggcgacagatacagcatgcagaccagcctgatcgtggccgccctgaagagactgctgcccatcggcctgaacatctgcgcccccggcgaccaggagctgatcgccctggccaagaacagattcagcctgaaggacaccgaggacgaggtgagagacatcatcagaagcaacatccacctgcagggcaagctggaggaccccgccatcagatggcagatggccctgtacaaggacctgcccaacagaaccgacgacaccagcgaccccgagaagaccgtggagagagtgctggacatcgccaacgtgctgttccacctggagcagaagagcaagagagtgggcagaagacactactgcctggtggagcacccccagagaagcaagaaggccgtgtggcacaagctgctgagcaagcagagaaagagagccgtggtggcctgcttcagaatggcccccctgtacaacctgcccagacacagagccgtgaacctgttcctgcagggctacgagaagagctggatcgagaccgaggagcactacttcgaggacaagctgatcgaggacctggccaagcccggcgccgagccccccgaggaggacgagggcaccaagagagtggaccccctgcaccagctgatcctgctgttcagcagaaccgccctgaccgagaagtgcaagctggaggaggacttcctgtacatggcctacgccgacatcatggccaagagctgccacgacgaggaggacgacgacggcgaggaggaggtgaagagcttcgaggtgaccggcagccagagaagcaaggagaaggagatggagaagcagaagctgctgtaccagcaggccagactgcacgacagaggcgccgccgagatggtgctgcagaccatcagcgccagcaagggcgagaccggccccatggtggccgccaccctgaagctgggcatcgccatcctgaacggcggcaacagcaccgtgcagcagaagatgctggactacctgaaggagaagaaggacgtgggcttcttccagagcctggccggcctgatgcagagctgcagcgtgctggacctgaacgccttcgagagacagaacaaggccgagggcctgggcatggtgaccgaggagggcagcggcgagaaggtgctgcaggacgacgagttcacctgcgacctgttcagattcctgcagctgctgtgcgagggccacaacagcgacttccagaactacctgagaacccagaccggcaacaacaccaccgtgaacatcatcatcagcaccgtggactacctgctgagagtgcaggagagcatcagcgacttctactggtactacagcggcaaggacgtgatcgacgagcagggccagagaaacttcagcaaggccatccaggtggccaagcaggtgttcaacaccctgaccgagtacatccagggcccctgcaccggcaaccagcagagcctggcccacagcagactgtgggacgccgtggtgggcttcctgcacgtgttcgcccacatgcagatgaagctgagccaggacagcagccagatcgagctgctgaaggagctgatggacctgcagaaggacatggtggtgatgctgctgagcatgctggagggcaacgtggtgaacggcaccatcggcaagcagatggtggacatgctggtggagagcagcaacaacgtggagatgatcctgaagttcttcgacatgttcctgaagctgaaggacctgaccagcagcgacaccttcaaggagtacgaccccgacggcaagggcgtgatcagcaagagagacttccacaaggccatggagagccacaagcactacacccagagcgagaccgagttcctgctgagctgcgccgagaccgacgagaacgagaccctggactacgaggagttcgtgaagagattccacgagcccgccaaggacatcggcttcaacgtggccgtgctgctgaccaacctgagcgagcacatgcccaacgacaccagactgcagaccttcctggagctggccgagagcgtgctgaactacttccagcccttcctgggcagaatcgagatcatgggcagcgccaagagaatcgagagagtgtacttcgagatcagcgagagcagcagaacccagtgggagaagccccaggtgaaggagagcaagagacagttcatcttcgacgtggtgaacgagggcggcgagaaggagaagatggagctgttcgtgaacttctgcgaggacaccatcttcgagatgcagctggccgcccagatcagcgagagcgacctgaacgagagaagcgccaacaaggaggagagcgagaaggagagacccgaggagcagggccccagaatggccttcttcagcatcctgaccgtgagaagcgccctgttcgccctgagatacaacatcctgaccctgatgagaatgctgagcctgaagagcctgaagaagcagatgaagaaggtgaagaagatgaccgtgaaggacatggtgaccgccttcttcagcagctactggagcatcttcatgaccctgctgcacttcgtggccagcgtgttcagaggcttcttcagaatcatctgcagcctgctgctgggcggcagcctggtggagggcgccaagaagatcaaggtggccgagctgctggccaacatgcccgaccccacccaggacgaggtgagaggcgacggcgaggagggcgagagaaagcccctggaggccgccctgcccagcgaggacctgaccgacctgaaggagctgaccgaggagagcgacctgctgagcgacatcttcggcctggacctgaagagagagggcggccagtacaagctgatcccccacaaccccaacgccggcctgagcgacctgatgagcaaccccgtgcccatgcccgaggtgcaggagaagttccaggagcagaaggccaaggaggaggagaaggaggagaaggaggagaccaagagcgagcccgagaaggccgagggcgaggacggcgagaaggaggagaaggccaaggaggacaagggcaagcagaagctgagacagctgcacacccacagatacggcgagcccgaggtgcccgagagcgccttctggaagaagatcatcgcctaccagcagaagctgctgaactacttcgccagaaacttctacaacatgagaatgctggccctgttcgtggccttcgccatcaacttcatcctgctgttctacaaggtgagcaccagcagcgtggtggagggcaaggagctgcccaccagaagcagcagcgagaacgccaaggtgaccagcctggacagcagcagccacagaatcatcgccgtgcactacgtgctggaggagagcagcggctacatggagcccaccctgagaatcctggccatcctgcacaccgtgatcagcttcttctgcatcatcggctactactgcctgaaggtgcccctggtgatcttcaagagagagaaggaggtggccagaaagctggagttcgacggcctgtacatcaccgagcagcccagcgaggacgacatcaagggccagtgggacagactggtgatcaacacccagagcttccccaacaactactgggacaagttcgtgaagagaaaggtgatggacaagtacggcgagttctacggcagagacagaatcagcgagctgctgggcatggacaaggccgccctggacttcagcgacgccagagagaagaagaagcccaagaaggacagcagcctgagcgccgtgctgaacagcatcgacgtgaagtaccagatgtggaagctgggcgtggtgttcaccgacaacagcttcctgtacctggcctggtacatgaccatgagcgtgctgggccactacaacaacttcttcttcgccgcccacctgctggacatcgccatgggcttcaagaccctgagaaccatcctgagcagcgtgacccacaacggcaagcagctggtgctgaccgtgggcctgctggccgtggtggtgtacctgtacaccgtggtggccttcaacttcttcagaaagttctacaacaagagcgaggacggcgacacccccgacatgaagtgcgacgacatgctgacctgctacatgttccacatgtacgtgggcgtgagagccggcggcggcatcggcgacgagatcgaggaccccgccggcgacgagtacgagatctacagaatcatcttcgacatcaccttcttcttcttcgtgatcgtgatcctgctggccatcatccagggcctgatcatcgacgccttcggcgagctgagagaccagcaggagcaggtgaaggaggacatggagaccaagtgcttcatctgcggcatcggcaacgactacttcgacaccgtgccccacggcttcgagacccacaccctgcaggagcacaacctggccaactacctgttcttcctgatgtacctgatcaacaaggacgagaccgagcacaccggccaggagagctacgtgtggaagatgtaccaggagagatgctgggagttcttccccgccggcgactgcttcagaaagcagtacgaggaccagctgaactag

SEQ ID NO: 286260 - protein, 328 aa, Artificial Sequence
  derived and/or modified sequence
MEPTLRILAILHTVISFFCIIGYYCLKVPLVIFKREKEVARKLEFDGLYITEQPSEDDIKGQWDRLVINTQSFPNNYWDKFVKRKVMDKYGEFYGRDRISELLGMDKAALDFSDAREKKKPKKDSSLSAVLNSIDVKYQMWKLGVVFTDNSFLYLAWYMTMSVLGHYNNFFFAAHLLDIAMGFKTLRTILSSVTHNGKQLVLTVGLLAVVVYLYTVVAFNFFRKFYNKSEDGDTPDMKCDDMLTCYMFHMYVGVRAGGGIGDEIEDPAGDEYEIYRIIFDITFFFFVIVILLAIIQGLIIDAFGELRDQQEQVKEDMEVFSDVSYKQR

SEQ ID NO: 286261 - protein, 1421 aa, Artificial Sequence
  derived and/or modified sequence
MKTGLESVKSALRAFLDNAAEDLEKTMENLKQGQFTHTRNQPKGVTQIINYTTVALLPMLSSLFEHIGQHQFGEDLILEDVQVSCYRILTSLYALGTSKSIYVERQRSALGECLAAFAGAFPVAFLETHLDKHNIYSIYNTKSSRERAALSLPTNVEDVCPNIPSLEKLMEEIVELAESGIRYTQMPHVMEVILPMLCSYMSRWWEHGPENNPERAEMCCTALNSEHMNTLLGNILKIIYNNLGIDEGAWMKRLAVFSQPIINKVKPQLLKTHFLPLMEKLKKKAATVVSEEDHLKAEARGDMSEAELLILDEFTTLARDLYAFYPLLIRFVDYNRAKWLKEPNPEAEELFRMVAEVFIYWSKSHNFKREEQNFVVQNEINNMSFLITDTKSKMSKAAVSDQERKKMKRKGDRYSMQTSLIVAALKRLLPIGLNICAPGDQELIALAKNRFSLKDTEDEVRDIIRSNIHLQGKLEDPAIRWQMALYKDLPNRTDDTSDPEKTVERVLDIANVLFHLEQKSKRVGRRHYCLVEHPQRSKKAVWHKLLSKQRKRAVVACFRMAPLYNLPRHRAVNLFLQGYEKSWIETEEHYFEDKLIEDLAKPGAEPPEEDEGTKRVDPLHQLILLFSRTALTEKCKLEEDFLYMAYADIMAKSCHDEEDDDGEEEVKSFEHDIIKDLRNKFASLGENSLEKEMEKQKLLYQQARLHDRGAAEMVLQTISASKGETGPMVAATLKLGIAILNGGNSTVQQKMLDYLKEKKDVGFFQSLAGLMQSCSVLDLNAFERQNKAEGLGMVTEEGSGEKVLQDDEFTCDLFRFLQLLCEGHNSDFQNYLRTQTGNNTTVNIIISTVDYLLRVQESISDFYWYYSGKDVIDEQGQRNFSKAIQVAKQVFNTLTEYIQGPCTGNQQSLAHSRLWDAVVGFLHVFAHMQMKLSQDSSQIELLKELMDLQKDMVVMLLSMLEGNVVNGTIGKQMVDMLVESSNNVEMILKFFDMFLKLKDLTSSDTFKEYDPDGKGVISKRDFHKAMESHKHYTQSETEFLLSCAETDENETLDYEEFVKRFHEPAKDIGFNVAVLLTNLSEHMPNDTRLQTFLELAESVLNYFQPFLGRIEIMGSAKRIERVYFEISESSRTQWEKPQVKESKRQFIFDVVNEGGEKEKMELFVNFCEDTIFEMQLAAQISESDLNERSANKEESEKERPEEQGPRMAFFSILTVRSALFALRYNILTLMRMLSLKSLKKQMKKVKKMTVKDMVTAFFSSYWSIFMTLLHFVASVFRGFFRIICSLLLGGSLVEGAKKIKVAELLANMPDPTQDEVRGDGEEGERKPLEAALPSEDLTDLKELTEESDLLSDIFGLDLKREGGQYKLIPHNPNAGLSDLMSNPVPMPEVQEKFQEQKAKEEEKEEKEETKSEPEKAEGEDG

SEQ ID NO: 286262 - DNA, 4266 bp, Artificial Sequence
  derived and/or modified sequence
atgaagaccgggctggaatccgtgaaaagtgctctgcgggcctttctggataacgctgccgaagatctagagaagaccatggaaaacctgaagcaggggcagttcacacatacccgtaaccagcctaaaggagtaacgcagatcatcaattacacgacagtggccctcctcccaatgttaagtagtctctttgagcatatcgggcagcatcaattcggagaagacctcatccttgaggacgtacaggtgtcttgctatagaatcctcacaagcctctacgctctaggcacgtctaagtccatctatgtcgagagacagcggagtgcacttggggaatgtcttgcagcctttgccggagcctttcccgttgctttcttggagacacacctcgacaagcataacatctattccatctataatacaaagagtagcagggagagggcagctcttagcctgcccaccaatgtggaagacgtgtgcccaaacattccctcactggagaagctgatggaagagattgtggagttggccgaaagcgggataagatatacccagatgccacacgtcatggaagtgatattgccaatgctttgcagttatatgagcaggtggtgggagcatggacctgagaacaaccctgagagggcggaaatgtgctgtaccgccctgaacagcgagcatatgaacacattactcgggaatatcctcaaaatcatctacaataacctcggcatcgatgagggcgcctggatgaaaagattagcagtgtttagtcaacctattatcaataaggtaaagccgcagctcctgaagacccatttcctcccactgatggaaaagctgaagaaaaaggctgcaaccgtcgtgagtgaggaggatcaccttaaggctgaggccagaggtgacatgtccgaggctgagctgctgatcctggacgagttcaccaccctcgctagagatttatacgctttctatcctctgctgataaggttcgtggactataaccgcgccaagtggttaaaagagcccaaccccgaagccgaagagttattcagaatggtggcggaggtctttatatattggagtaagagccacaacttcaaaagagaagagcagaattttgtggtacagaatgaaatcaataacatgtcattcctcattacagatacgaaaagtaaaatgagcaaggccgccgtgtcagatcaggagcggaaaaaaatgaaacgaaaaggcgatcgatattcaatgcagacctccttgattgtggccgctctgaaacggctcctgccaataggcctgaatatctgtgcccccggagatcaagagctgattgccctggccaagaacaggttctcgttgaaagataccgaggatgaggtccgggacatcatccgcagcaacatccacttgcaggggaagctggaggatcctgcaattcgctggcagatggcgctctataaagatctgccgaatcggaccgacgatacaagtgaccccgaaaagaccgtggagcgagttctggacattgctaatgttttgttccatctggaacaaaaaagtaaaagagtaggtaggagacactactgcctcgtggaacacccccagaggtcgaaaaaggccgtctggcataagctgctgtctaagcagaggaagcgggctgtggtcgcttgtttccggatggcccccttgtacaacttgccacgccaccgtgccgtgaacctgttcctccagggctatgagaagtcttggatcgaaaccgaggagcactactttgaggataaattgattgaggacctcgccaagcccggtgccgagcctccagaagaagatgaaggcaccaagagagtggatcccctccatcaactcattctgctcttcagccggacagccctgactgagaagtgcaaactagaagaggactttctttatatggcctacgcagatatcatggccaaatcctgtcatgatgaggaggatgatgatggggaggaggaagtgaagtccttcgagcatgatatcatcaaggatctcaggaacaaattcgcatctctgggggaaaattcactggagaaggagatggagaaacagaagctattgtaccaacaggcccgcctgcacgatagaggcgcggctgagatggtgctgcagacaatctcagcatccaaaggggaaacaggacccatggtggctgcgaccctgaaactagggatcgccatccttaacggaggcaactcaaccgtgcagcaaaaaatgttggactacttaaaggaaaagaaggacgtgggatttttccagtctctcgcgggcctgatgcaatcatgcagcgtactcgatctgaatgcttttgaacgtcagaacaaagcagagggactgggaatggttaccgaggaaggctcaggcgagaaggttttacaggacgacgagtttacctgtgatctcttcaggttcctgcagctactctgtgaaggacataacagtgactttcaaaattacctgaggacccagacagggaacaataccacggtaaacatcatcatctcaactgtagattacttacttcgagttcaggaatctataagcgatttttactggtactatagcggcaaagatgtcatcgatgaacaggggcagagaaactttagtaaagctattcaggtggccaagcaggtgttcaacacccttactgagtacattcagggaccatgtacaggcaaccagcagtcactggcccacagcaggctgtgggatgctgtcgttggcttcctgcatgttttcgctcacatgcagatgaagctgagccaggacagctcacaaattgaactgcttaaggaattgatggacttgcaaaaggacatggtggtgatgcttttgtcgatgctggaaggcaacgttgttaatggcactattggaaaacaaatggtggacatgttagttgaatcatcaaataacgtggagatgatactcaagttcttcgacatgtttttgaaactgaaggatctgacaagctcagacacattcaaggaatacgaccccgatggtaagggagtgattagcaagagagattttcacaaagctatggaatctcataagcactacacacaatcggagaccgagttcttgttgagttgcgctgagactgatgagaatgagaccctggattatgaggaatttgtcaagaggtttcacgagcctgccaaggacattggattcaatgtggctgtgctgttgacgaacttgtctgaacatatgcccaacgatactcgcctacaaactttcctcgagttagctgagagcgtcttgaactacttccaaccatttctaggccgaatcgagatcatggggtccgctaaaagaatcgaaagggtgtattttgaaatctcagaaagctccaggacgcaatgggagaagccccaggtgaaggagagtaaacggcagttcatctttgatgtggtgaacgaaggaggcgagaaggaaaaaatggagctgttcgtgaacttttgtgaggataccatttttgaaatgcagctggccgcacagattagcgagagcgacctgaacgaaaggtctgccaataaggaagagtcagagaaggagcgaccagaggagcaggggccaaggatggcctttttctccatcctcacagtgagaagtgcacttttcgctctgaggtacaatatcctgacactcatgcggatgctcagtctgaagagtctcaagaagcagatgaaaaaggtgaagaagatgacagtgaaagacatggttaccgcttttttttcttcgtactggtcaatttttatgactttactccattttgtagccagtgtttttaggggcttcttccgaatcatttgctcgctcctgctggggggttccctggtggagggagctaagaaaattaaggtagccgaattgttagccaacatgcccgaccccacccaggacgaagtccggggagatggagaagagggtgaaagaaagcctctcgaggctgctcttcccagcgaagatttgactgacttgaaggagttaaccgaagagtccgatttgcttagcgatatttttggactcgacctgaaaagagagggcggtcaatacaaactcattccacacaaccccaatgctgggctgtccgatctgatgagtaacccagtgccaatgcccgaggtacaggaaaagtttcaggaacagaaggctaaagaggaagaaaaggaagagaaagaagaaactaaatcagaacccgagaaggcagagggtgaggatggatag

SEQ ID NO: 286263 - DNA, 4266 bp, Artificial Sequence
  derived and/or modified sequence
atgaagacaggcctggagagcgtgaagagcgccctgcgggccttcctggacaatgctgctgaggacctggagaagaccatggagaacctgaagcagggccagttcacccacaccaggaaccagcccaagggcgtgacccagatcatcaactacaccaccgtggccctgctgcccatgctgagcagcctgtttgagcacatcggccagcaccagtttggagaggacctgatcctggaggatgtgcaggtgtcctgctaccgcatcctgaccagcctgtatgccctgggcaccagcaagagcatctacgtggagcggcagaggtctgccctgggggagtgcctggccgcctttgctggggccttccctgtggccttcctggagacccacctggacaagcacaacatctacagcatctacaacaccaagagcagccgggagcgggccgccctgagcctgcccaccaacgtggaggatgtgtgccccaacatccccagcctggagaagctgatggaggagatcgtggagctggccgagagcggcatccgctacacccagatgccccacgtgatggaggtgatcctgcccatgctgtgcagctacatgagccgctggtgggagcacggccctgagaacaaccctgagcgggcagagatgtgctgcacagccctgaacagcgagcacatgaacaccctgctgggcaacatcctgaagatcatctacaacaacctgggcattgatgagggcgcctggatgaagaggctggccgtgttcagccagcccatcatcaacaaggtgaagccccagctgctgaagacccacttcctgcccctgatggagaagctgaagaagaaggccgccaccgtggtgtctgaggaggaccacctgaaggccgaggcccggggggacatgtctgaggccgagctgctgatcctggatgagttcaccaccctggcccgggacctgtatgccttctaccccctgctgatccgctttgtggactacaacagagccaagtggctgaaggagcccaaccctgaggccgaggagctgttcaggatggtggccgaggtgttcatctactggagcaagagccacaacttcaagcgggaggagcagaactttgtggtgcagaatgagatcaacaacatgtccttcctgatcacagacaccaagagcaagatgagcaaggctgctgtgtctgaccaggagaggaagaagatgaagaggaagggggaccgctacagcatgcagaccagcctgattgtggccgccctgaagaggctgctgcccatcggcctgaacatctgtgcccctggggaccaggagctgattgccctggccaagaaccgcttcagcctgaaggacacagaagatgaggtgcgggacatcatccgcagcaacatccacctgcagggcaagctggaggaccctgccatccgctggcagatggccctgtacaaggacctgcccaacagaacagatgacaccagtgaccctgagaagacagtggagcgggtgctggacatcgccaacgtgctcttccacctggagcagaagagcaagagggtgggcagaagacactactgcctggtggagcacccccagaggagcaagaaggctgtgtggcacaagctgctgagcaagcagaggaagagagctgtggtggcctgcttcaggatggcccccctgtacaacctgcccaggcacagagctgtgaacctcttcctgcagggctatgagaagtcctggattgaaacagaggagcactactttgaggacaagctgattgaggacctggccaagccaggagctgagcccccagaagaagatgagggcaccaagagggtggaccccctgcaccagctgatcctgctcttcagcaggacagccctgacagagaagtgcaagctggaggaggacttcctgtacatggcctatgctgacatcatggccaagagctgccatgatgaggaggatgatgatggagaggaggaggtgaagagctttgaacatgacatcatcaaggacctgaggaacaagtttgccagcctgggggagaacagcctggagaaggagatggagaagcagaagctgctgtaccagcaggcccggctgcatgacagaggagctgctgagatggtgctgcagaccatcagcgccagcaagggggagaccggccccatggtggccgccaccctgaagctgggcatcgccatcctgaatggaggcaacagcacagtgcagcagaagatgctggactacctgaaggagaagaaggatgtgggcttcttccagagcctggccggcctgatgcagagctgcagcgtgctggacctgaatgcctttgagcggcagaacaaggccgagggcctgggcatggtgacagaggagggcagcggggagaaggtgctgcaggatgatgagttcacctgtgacctcttccgcttcctgcagctgctgtgtgagggccacaacagcgacttccagaactacctgcggacccagacaggcaacaacaccaccgtgaacatcatcatcagcacagtggactacctgctgcgggtgcaggagagcatcagtgacttctactggtactacagcggcaaggatgtgattgatgagcagggccagaggaacttcagcaaggccatccaggtggccaagcaggtgttcaacaccctgacagagtacatccagggcccctgcaccggcaaccagcagagcctggcccacagccggctgtgggatgctgtggtgggcttcctgcacgtgtttgcccacatgcagatgaagctgagccaggacagcagccagatcgagctgctgaaggagctgatggacctgcagaaggacatggtggtgatgctgctgtccatgctggagggcaatgtggtgaatggcaccatcggcaagcagatggtggacatgctggtggagagcagcaacaacgtggagatgatcctgaagttctttgacatgttcctgaagctgaaggacctgaccagcagtgacaccttcaaggagtatgaccctgatggcaagggcgtcatcagcaagagggacttccacaaggccatggagagccacaagcactacacccagagcgagacagagttcctgctgagctgtgccgagacagatgaaaatgagaccctggactatgaggagtttgtgaagcgcttccacgagcccgccaaggacatcggcttcaacgtggccgtgctgctgaccaacctgtctgagcacatgcccaatgacacccggctgcagaccttcctggagctggccgagagcgtgctgaactacttccagcccttcctgggccgcatcgagatcatgggcagcgccaagagaattgagcgggtgtactttgagatcagcgagagcagcaggacccagtgggagaagccccaggtgaaggagagcaagaggcagttcatctttgatgtggtgaatgaaggaggagagaaggagaagatggagctgtttgtgaacttctgtgaggacaccatctttgagatgcagctggccgcccagatcagcgagagtgacctgaatgaaagaagtgccaacaaggaggagagcgagaaggagaggcctgaggagcagggccccaggatggccttcttcagcatcctgactgtgcgcagcgccctgtttgccctgcgctacaacatcctgaccctgatgaggatgctgagcctgaagagcctgaagaagcagatgaagaaggtgaagaagatgacagtgaaggacatggtgacagccttcttcagcagctactggagcatcttcatgaccctgctgcactttgtggccagcgtcttccggggcttcttccgcatcatctgcagcctgctgctgggcggcagcctggtggagggcgccaagaagatcaaggtggccgagctgctggccaacatgccagaccccacccaggatgaggtgagaggagatggagaggagggggagaggaagcccctggaggccgccctgcccagcgaggacctgacagacctgaaggagctgacagaggagagtgacctgctgagtgacatcttcggcctggacctgaagcgggagggcggccagtacaagctgatcccccacaaccccaatgccggcctgagtgacctgatgagcaaccctgtgcccatgcctgaggtgcaggagaagttccaggagcagaaggccaaggaggaggagaaggaggagaaggaggagaccaagtctgagcctgagaaggccgagggagaagatggatag

SEQ ID NO: 286264 - DNA, 4266 bp, Artificial Sequence
  derived and/or modified sequence
atgaagaccggcctggagagcgtgaagagcgccctgcgggccttccttgataatgcggctgaggatttagaaaagactatggagaacctcaagcagggacagttcacacatacaaggaaccaacccaagggagttacacagatcattaactatactaccgtggctctgttgccaatgctcagtagcctattcgagcatatcggccaacaccaatttggcgaggatctcatccttgaggacgtgcaggtttcttgttacaggatcctcacctcgctctacgccctcggcacctctaaatccatttacgtcgaacggcaaaggtcagccctcggggaatgtttggcagcttttgctggagcttttcccgtagctttcctggagacgcatctggacaaacacaacatttatagcatttataatactaaatctagtagggagcgagctgcactgtcactcccaaccaatgttgaagacgtctgcccaaatatcccatccttagagaagctgatggaggaaatcgtggagctggccgaaagcgggattcggtatacgcaaatgcctcatgtaatggaggttattctccctatgctttgctcgtacatgagtcgatggtgggaacacggcccagagaacaatcccgaaagagcagaaatgtgttgcacagcattgaactccgaacatatgaacacactgctcggcaatattctcaaaattatctacaataacttaggcattgatgagggcgcttggatgaaaagattggccgtgttttcccagcctattatcaataaggtcaagccacaacttttgaagacccatttcctgccattaatggaaaagctgaaaaaaaaagctgctaccgtggtttctgaggaggaccatctgaaggccgaggccaggggcgatatgtctgaggctgagctcctcattctggatgagttcactacactcgcgagagatttatatgccttttatccactgctgattaggtttgtcgactacaacagagcaaagtggctgaaagaacccaatcccgaagccgaagaattattccgaatggtggccgaagtgttcatttactggtctaagtcccacaatttcaagcgggaagagcaaaacttcgtggtgcagaacgagataaacaacatgagctttctcattacagataccaaaagtaaaatgtctaaggcagctgtctctgatcaggagagaaaaaagatgaagagaaagggagatcggtatagcatgcagacttccctgatagtcgcagcacttaagcgattgctacccatcggcttgaacatttgtgcacccggagaccaggagttgattgccctagccaaaaatagattttccttgaaggatacagaggacgaggttcgcgatattatccgctcgaatatacacttgcagggaaagctcgaggatcccgctatccgctggcaaatggccctctacaaggaccttcccaacagaacggatgacacttccgacccagagaaaactgtcgaacgcgtgttggacatcgctaatgtgttgtttcatctggagcaaaagagtaagcgtgtggggaggcgccactactgtctggttgagcacccccagcggtccaaaaaagctgtatggcacaagctgctgagcaaacagagaaaacgggcagtcgttgcctgcttcagaatggcccccttgtacaatttacccagacacagggctgttaatctgtttctccagggctatgagaagtcgtggatcgaaaccgaggagcactattttgaggacaaattgatagaggatctggcaaagcccggggctgagcctcctgaagaggacgaaggtacaaagagggtcgatccactacaccagctcatcttactctttagcagaaccgctctcaccgagaagtgtaaactcgaagaggatttcttatacatggcctacgcggatatcatggctaaaagctgccacgatgaggaagatgatgatggagaggaagaggtcaaaagttttgagcacgacattattaaggacttacgcaacaagttcgcctcgttgggcgaaaacagtctggagaaggagatggagaagcagaagctgctgtatcagcaagcccgcctgcacgataggggggcggccgagatggtccttcaaacaataagcgcttcgaaaggagaaaccggtccaatggttgcagccacactcaagctgggtattgccatcctgaacgggggcaacagtacggtgcagcagaaaatgctcgactaccttaaggaaaaaaaggacgtgggcttcttccaatcactcgcagggctgatgcagagctgcagcgtgttggatctgaatgcattcgagcgccaaaacaaagcagaagggctgggaatggtgaccgaggaaggctccggagaaaaggttttacaggatgacgagttcacttgtgacttgtttcgttttctgcaactgttatgtgaggggcacaattcagactttcagaactatttgcggacacagaccgggaacaacaccaccgtcaacataatcatcagcactgtggattatttgctcagggtgcaggaatccattagtgacttctattggtattacagcggcaaagacgtcattgatgagcagggacagaggaatttctccaaggctatccaagtcgctaagcaggtcttcaacacactgactgaatacatacagggtccgtgtacagggaaccagcagagtttggcccactcgcggctgtgggacgctgtagtgggctttttgcacgtatttgcacacatgcagatgaagttatcgcaggacagctcacagattgaactgctgaaagagctgatggaccttcagaaagatatggtcgtcatgctgctgagtatgctggaagggaacgtcgtgaacggcactatagggaagcagatggtggatatgctggtagagtcctcaaataacgttgagatgattctgaagttttttgatatgtttctcaagctaaaagatctgactagctcagacaccttcaaagagtatgatcccgatggcaagggggtcatttctaagcgggattttcataaggcgatggagagccataaacactatactcagtccgagaccgagttcctattgagttgtgcagaaacggacgaaaacgaaacacttgactacgaagaattcgttaaacgcttccatgaacccgctaaagacatagggttcaatgtcgctgtacttctgactaacctatccgaacacatgcctaacgatacccggctccagacttttcttgagcttgcggaatcagtcttaaactatttccagccgttcttgggtcgcatagagattatgggctcggcaaaacggatcgagcgggtgtacttcgaaataagtgagtccagcagaactcagtgggagaaacctcaagtgaaagaaagcaagcgtcagttcatattcgacgtggtaaatgagggaggggagaaggagaaaatggagctctttgtcaacttttgcgaggacactatcttcgaaatgcagcttgcagcccagatcagcgaatcagacctaaatgaaaggtccgccaataaagaagagagcgagaaagagcgccctgaggaacaaggaccccggatggccttcttcagtatcctgacggtaagatccgccctcttcgcccttcgctacaatattttaaccttgatgaggatgctgagtctgaagagcttgaagaagcagatgaagaaagtgaagaaaatgacagtcaaagacatggtgaccgcctttttttcctcctattggtcgatattcatgacccttctgcactttgtcgcctcagtgttccgaggattcttcaggataatctgctccctgctgctaggtggttccctcgtggagggagctaaaaaaataaaagtagccgaactgttggccaacatgcccgaccctacccaggatgaagtcagaggcgatggagaagagggagagcgcaagcccctggaggctgccttgcccagtgaagacctcaccgatcttaaggagctgactgaggagagcgatttactgagcgacatctttggtttagacctgaagcgcgaggggggacagtacaaactaatcccacacaatcctaacgcgggcctgtctgacctcatgtcgaaccctgtgcctatgccagaagtgcaggaaaaattccaagaacagaaagccaaagaagaagaaaaggaagagaaagaggagacgaagagcgagccagagaaagccgagggcgaggacggctag

SEQ ID NO: 286265 - DNA, 4266 bp, Artificial Sequence
  derived and/or modified sequence
atgaagactggtttggagagcgtgaagtccgcgctcagagccttcctagacaacgctgccgaagacttggagaaaacaatggagaatctcaaacaaggtcaattcacccacaccaggaatcagccaaagggcgtgacccagatcattaattacactactgttgctctgctgcctatgcttagttcactcttcgagcacatcgggcagcaccagtttggcgaggaccttatactggaggacgtccaggttagctgttacaggatcctgacctccctatacgccttaggcacatcaaagagtatttacgtagagagacagcggtccgccctgggcgaatgcttggccgcattcgcgggtgcctttcccgtcgcttttttggaaacccatctggacaaacacaacatatacagtatttacaacacaaaaagcagcagagaaagagccgctctgtctctgcctactaatgtagaggacgtctgtcccaacattccgtcactggagaagctgatggaggaaatagtggaactggctgaatccggcatcaggtatacacaaatgccccacgtaatggaagtcattctacctatgctgtgctcttatatgagtaggtggtgggagcacgggcctgaaaataaccccgaacgagccgagatgtgctgtacagccttaaattctgagcatatgaacaccctcctgggcaacattcttaagataatctacaataatctcggcatcgatgagggtgcatggatgaaaaggcttgccgtcttctcccaaccgatcattaataaggttaagcctcaacttctcaagacacactttttgccgctcatggagaaactgaaaaaaaaagccgctactgtagtgtcagaggaggaccaccttaaggcagaagcaagaggagacatgtccgaggcagagcttctcatcctggacgagttcacaacactagccagggatctgtatgctttctatccccttttgatcaggtttgtcgattacaatcgcgcaaagtggctcaaagagcccaacccagaggctgaggagctttttaggatggtggccgaggtgttcatctactggagtaaatcccataactttaagagagaggaacaaaatttcgtcgtgcaaaatgaaattaacaatatgtcgtttctgatcaccgacactaaatctaagatgtccaaggctgcagtgtcagatcaggaacggaagaaaatgaagcgtaagggcgaccgctactctatgcagaccagcctcattgtggctgctctgaagaggctactgccgattggcttaaatatatgcgctcccggagatcaggaacttatagcactagctaaaaataggttttcgcttaaagacacagaggatgaagtgcgtgatattattcgcagcaacatccatcttcaagggaaacttgaggaccccgcaattagatggcaaatggccctgtataaagatctccctaatcgcactgatgatacatctgacccggaaaagactgttgagcgggtcctggacattgccaatgtgctgttccatcttgagcagaaatcgaaacgagttgggcgtagacattattgtctggtggaacatccacaacgaagcaagaaggctgtgtggcataagcttttatctaagcagcgcaaaagggcagttgtggcttgctttagaatggcgccactgtataatctgcctagacatcgagccgttaacttattcttacagggttacgagaagtcctggattgaaactgaggagcactacttcgaggataagctcatcgaggacctagctaagcctggcgcagagccaccagaagaggatgaggggacaaagcgggtggatcctttgcatcaactaattctgctgtttagcagaaccgcgctgacggaaaaatgcaaattggaggaggattttctgtacatggcttatgcagacatcatggccaagagctgtcacgatgaggaagacgacgacggtgaggaagaggtgaagtcctttgagcatgacatcataaaggatttgcgcaataagtttgcttctctgggcgagaactcgctggaaaaagagatggagaagcagaagctgctctatcaacaggcacgcctgcacgaccggggtgccgcagaaatggtgttgcagacgataagtgcttctaagggggaaaccggacctatggtggcagccacgttgaaattggggattgccattctgaatggcggaaatagcaccgtgcagcagaagatgctggattatctaaaggaaaagaaggatgtggggttcttccagtccctggcaggccttatgcagtcttgcagcgtgttggatctgaacgcattcgagcgacagaataaagcagaaggcctcgggatggtgactgaggagggctctggagagaaggtgttgcaggacgatgaattcacatgcgatcttttccgattcctccaattactatgcgagggtcataacagtgactttcagaactacctgaggactcaaacggggaataataccacggttaatattatcataagtaccgtggattatttgctgcgcgtgcaggagtcaatctcagatttctactggtactattccggcaaggatgttatagatgagcagggccaacggaacttcagcaaggccatccaagtggctaagcaagtatttaacacccttaccgagtacatccaggggccatgcaccggcaaccaacagtccctggcacattcacgactatgggacgccgtggtcgggtttctgcatgtcttcgctcatatgcagatgaagctgtcacaggactcaagccagatcgagctgcttaaggaacttatggacttacagaaagatatggtggtcatgctgctgtctatgctcgaagggaacgtggtaaatggtaccatcggtaaacagatggttgatatgctcgtggagtcaagcaacaatgttgaaatgattctgaagtttttcgacatgtttcttaagctgaaggatctcacatcaagcgatacattcaaggagtacgaccctgatggcaaaggagtgatctctaagcgggactttcacaaagccatggaatctcataaacattatacccagtcagagacagagttccttctgtcttgtgccgaaactgacgagaatgagacacttgactacgaagagtttgtaaagagattccacgagcctgccaaggatatcggttttaatgtggcagtgctgctgactaatctgagtgagcatatgcccaacgataccagactccagacattcctcgagctggccgaatctgtattaaattactttcagcccttcctggggaggatagaaataatgggttccgcaaagcgcatcgaaagggtgtacttcgagatcagcgaatcctctcggacgcaatgggagaagccacaggttaaagaaagcaagcggcagttcatattcgacgttgtgaacgagggaggagaaaaggagaaaatggagctcttcgtaaatttctgcgaggatacaatctttgagatgcaactggctgcgcagatcagcgagagcgacctgaatgaacgatccgccaacaaggaagaaagcgagaaggaaagacccgaagagcaggggcctcgaatggcattcttcagcatactaacagtgcggagcgccctttttgctttacgctacaacattctgaccctaatgcgtatgctgagcctgaaaagcctcaagaagcaaatgaagaaggtgaaaaaaatgacagtaaaggatatggtcaccgcattcttctcgtcctactggtctattttcatgaccttattacattttgtggcttctgtgtttagggggttctttaggattatttgctctctcctgcttggaggctcacttgtcgaaggagccaagaagattaaagtagctgagctgctggcaaatatgcctgaccctacccaggacgaagtcaggggcgacggggaagaaggcgaacgcaaacctctggaagcagcacttccctctgaagaccttacagacctgaaagagcttaccgaggaatccgacctcctttccgatatcttcgggctcgatttgaaacgcgaagggggacagtacaaactgatccctcacaatccaaacgctggcctgagtgacttgatgtcgaaccctgtgcctatgcccgaggtgcaagaaaaatttcaagaacagaaagccaaagaggaggaaaaagaagagaaggaggaaactaaatccgagcccgagaaagcagaaggagaggacgggtag

SEQ ID NO: 286266 - DNA, 4536 bp, Artificial Sequence
  derived and/or modified sequence
tattgagaaacgatttgcctatagtttcctccaacaactcattcgctatgtggatgaagcccatcagtatatcctggagtttggtcgttcttcctttaattgatcagtatttcaaaaaccatcgtttatacttcttatctgcagcaagcagacctctctgctctggaggacatgcttccaacaaagagaaagaaatggtgactaggcaatgatgcaacatcaattgtcaactgtcttcatattttgggtcagactttggatgcaaggacagtgatgaagactggcctggagagtgttaaaagtgcactcagagcttttctggacaacgctgcagaggatctggagaagaccatggaaaacctcaagcagggccagttcactcacacccgaaaccagcccaaaggggttactcagattatcaattacaccacagtggccctgctgccaatgctgtcttcattatttgaacatattggccagcatcagttcggagaagacctaatattggaagatgtccaggtgtcttgttatagaattctgactagcttatatgctttgggaaccagcaagagtatttacgtggagaggcaacgttctgcattaggagaatgtctagctgcctttgctggtgcttttcctgtagcatttttggaaactcatctggacaaacataatatttactccatctacaataccaagtcttcacgagaaagagcagctctcagtttgccaactaatgtggaagatgtttgtccaaacataccgtctttggagaaactcatggaagaaatcgtggaattagccgagtccggcattcgctacactcaaatgccacatgtcatggaagtcatactgcccatgctttgcagctacatgtctcgttggtgggagcatggacctgagaacaatccagaacgggccgagatgtgctgcacagccctgaactcagagcacatgaacacacttctagggaacatattgaaaatcatatataataacttggggattgatgagggagcctggatgaagaggctagcagtgttttcccagcctataataaataaagtgaaacctcagctcttgaaaactcatttcttgccgttaatggagaaactcaagaaaaaggcagctacggtggtgtctgaggaagaccacctgaaagctgaggccaggggggacatgtcggaggcagaactcctcatcctagatgagttcaccacactggccagagatctctatgccttctaccctctcttgattagatttgtggactataacagggcaaagtggctaaaggagcctaacccagaagcagaggagctcttccgcatggtggctgaagtgtttatctactggtcgaagtcccataatttcaaaagagaagagcagaacttcgttgtacagaatgaaatcaacaatatgtctttccttattactgataccaagtcaaagatgtcaaaggcagctgtttctgatcaggaaaggaagaaaatgaagcgcaaaggagatcggtattccatgcagacctctctgattgtagcagctctgaagcggttactgcccattgggttgaacatctgtgcccctggggaccaggagctcattgctctggccaaaaatcgatttagcctgaaagataccgaggatgaagtacgagatataatccgcagcaatattcatttacaaggcaagttggaggatcctgctattagatggcaaatggctctttacaaagacttaccaaacaggactgatgatacctcagatccagagaagacggtagaaagagtattggatatagcaaatgtgctttttcatcttgaacagaagtctaaacgtgtgggtcggagacattactgtctggtggaacatcctcagagatctaaaaaggctgtatggcataaactactgtccaagcagaggaaaagggctgttgtagcctgcttccggatggcccccttatataatctgccaaggcatcgggctgtcaatctctttcttcagggatatgaaaagtcttggattgaaacagaagaacattactttgaagataaactgatagaagatttagcaaaacctggggctgaacctccagaagaagatgaaggcactaagagagttgatcctctacatcagctgatccttctgtttagtcggacagctttaacagagaaatgcaaactggaggaagattttttatatatggcctatgcagatattatggcaaagagttgtcatgatgaggaagatgacgatggtgaagaggaagtgaagagttttgaacacgatattatcaaagatttaagaaacaaatttgccagcctcggcgagaactctctggaaaaagaaatggaaaagcaaaagcttctataccagcaagcccgactccacgatcgtggcgcggctgagatggtgctacagacaatcagtgccagcaaaggtgaaactggaccaatggtagcagctactctgaaacttggaattgctattttaaatggtgggaactccacagtacagcagaaaatgcttgactacctcaaggagaaaaaggatgtgggcttctttcagagcctggccggcctgatgcagtcatgtagtgtccttgacctaaatgcatttgagcgacaaaacaaagctgaaggtcttgggatggtgacagaggaaggatcaggagaaaaggttctgcaggacgatgagttcacctgtgacctcttccgattcctgcaactactctgtgagggacacaactcagattttcagaattatctgagaactcagactggcaataatacaactgtcaacataattatctccactgtagactacctactgagagttcaggaatcaattagtgacttttattggtattactctgggaaagatgttattgatgaacaaggacaacggaatttctccaaagctatccaagtggcaaaacaagtctttaacactcttacagagtatattcagggtccttgcactgggaatcaacagagtttggcacacagcaggctgtgggatgctgtggtcggctttcttcatgtgtttgcccatatgcagatgaagctgtcgcaggattccagtcaaattgagctattaaaagaattaatggatctgcagaaggatatggtggtcatgttgctgtccatgttagaaggtaatgttgttaatggaacgattggcaaacagatggtggatatgcttgtggaatcttccaacaacgtggagatgattctcaaattttttgacatgttcttaaaactaaaggatttgacgtcgtctgatacttttaaagaatatgaccccgatggcaagggagtcatttccaagagggacttccacaaagcgatggagagccataagcactacacgcagtcagaaacggaatttcttttgtcttgtgcggagacggatgagaatgaaaccctcgactacgaagagttcgtcaaacgcttccacgaacctgcgaaggacatcggcttcaacgtcgccgtccttctgacaaacctctctgagcacatgcccaacgatacccgacttcagacttttctggaattagcagagagcgtcctgaattatttccagccctttctgggccgcatcgaaatcatgggaagcgccaaacgcatcgagagggtctattttgaaatcagtgagtccagccgaacccagtgggagaagccccaggtcaaggagtccaaaagacagttcatatttgacgtggtcaacgaaggcggagagaaagagaagatggaactctttgtgaacttctgcgaggacaccatctttgaaatgcagctggcggctcagatctcggagtcggacttgaacgagaggtcagcgaataaggaagaaagcgagaaggagaggccggaagagcaggggccgaggatggctttcttctccattctgacggtcaggtcggccctgtttgcgctcaggtacaatatcttgacccttatgcgaatgctcagtctgaagagcctgaagaagcagatgaaaaaagtaaaaaagatgaccgtgaaggacatggtcacggccttcttttcatcctactggagtattttcatgaccctcttgcacttcgtggccagcgttttcagaggctttttccgcatcatttgcagcctgctgcttgggggaagcctcgtcgaaggtgctaaaaagatcaaagttgcagaactgttagccaacatgccagaccccactcaggatgaggttagaggagatggggaggagggagagaggaaacccctggaagccgccctgccctccgaggatctgaccgacttaaaggagctgacagaggaaagtgaccttctttcggacatctttggcctggatctgaagagagaaggaggacagtacaaactgattcctcataatccaaatgctgggctcagtgacctcatgagcaacccagtccccatgcctgaggtgcaggaaaaatttcaggaacagaaggcaaaagaagaagaaaaggaagaaaaagaagaaaccaaatctgaacctgaaaaagccgagggagaagatgga

SEQ ID NO: 286267 - DNA, 4266 bp, Artificial Sequence
  derived and/or modified sequence
atgaagaccggcctggagagcgtgaagagcgccctgagagccttcctggacaacgccgccgaggacctggagaagaccatggagaacctgaagcagggccagttcacccacaccagaaaccagcccaagggcgtgacccagatcatcaactacaccaccgtggccctgctgcccatgctgagcagcctgttcgagcacatcggccagcaccagttcggcgaggacctgatcctggaggacgtgcaggtgagctgctacagaatcctgaccagcctgtacgccctgggcaccagcaagagcatctacgtggagagacagagaagcgccctgggcgagtgcctggccgccttcgccggcgccttccccgtggccttcctggagacccacctggacaagcacaacatctacagcatctacaacaccaagagcagcagagagagagccgccctgagcctgcccaccaacgtggaggacgtgtgccccaacatccccagcctggagaagctgatggaggagatcgtggagctggccgagagcggcatcagatacacccagatgccccacgtgatggaggtgatcctgcccatgctgtgcagctacatgagcagatggtgggagcacggccccgagaacaaccccgagagagccgagatgtgctgcaccgccctgaacagcgagcacatgaacaccctgctgggcaacatcctgaagatcatctacaacaacctgggcatcgacgagggcgcctggatgaagagactggccgtgttcagccagcccatcatcaacaaggtgaagccccagctgctgaagacccacttcctgcccctgatggagaagctgaagaagaaggccgccaccgtggtgagcgaggaggaccacctgaaggccgaggccagaggcgacatgagcgaggccgagctgctgatcctggacgagttcaccaccctggccagagacctgtacgccttctaccccctgctgatcagattcgtggactacaacagagccaagtggctgaaggagcccaaccccgaggccgaggagctgttcagaatggtggccgaggtgttcatctactggagcaagagccacaacttcaagagagaggagcagaacttcgtggtgcagaacgagatcaacaacatgagcttcctgatcaccgacaccaagagcaagatgagcaaggccgccgtgagcgaccaggagagaaagaagatgaagagaaagggcgacagatacagcatgcagaccagcctgatcgtggccgccctgaagagactgctgcccatcggcctgaacatctgcgcccccggcgaccaggagctgatcgccctggccaagaacagattcagcctgaaggacaccgaggacgaggtgagagacatcatcagaagcaacatccacctgcagggcaagctggaggaccccgccatcagatggcagatggccctgtacaaggacctgcccaacagaaccgacgacaccagcgaccccgagaagaccgtggagagagtgctggacatcgccaacgtgctgttccacctggagcagaagagcaagagagtgggcagaagacactactgcctggtggagcacccccagagaagcaagaaggccgtgtggcacaagctgctgagcaagcagagaaagagagccgtggtggcctgcttcagaatggcccccctgtacaacctgcccagacacagagccgtgaacctgttcctgcagggctacgagaagagctggatcgagaccgaggagcactacttcgaggacaagctgatcgaggacctggccaagcccggcgccgagccccccgaggaggacgagggcaccaagagagtggaccccctgcaccagctgatcctgctgttcagcagaaccgccctgaccgagaagtgcaagctggaggaggacttcctgtacatggcctacgccgacatcatggccaagagctgccacgacgaggaggacgacgacggcgaggaggaggtgaagagcttcgagcacgacatcatcaaggacctgagaaacaagttcgccagcctgggcgagaacagcctggagaaggagatggagaagcagaagctgctgtaccagcaggccagactgcacgacagaggcgccgccgagatggtgctgcagaccatcagcgccagcaagggcgagaccggccccatggtggccgccaccctgaagctgggcatcgccatcctgaacggcggcaacagcaccgtgcagcagaagatgctggactacctgaaggagaagaaggacgtgggcttcttccagagcctggccggcctgatgcagagctgcagcgtgctggacctgaacgccttcgagagacagaacaaggccgagggcctgggcatggtgaccgaggagggcagcggcgagaaggtgctgcaggacgacgagttcacctgcgacctgttcagattcctgcagctgctgtgcgagggccacaacagcgacttccagaactacctgagaacccagaccggcaacaacaccaccgtgaacatcatcatcagcaccgtggactacctgctgagagtgcaggagagcatcagcgacttctactggtactacagcggcaaggacgtgatcgacgagcagggccagagaaacttcagcaaggccatccaggtggccaagcaggtgttcaacaccctgaccgagtacatccagggcccctgcaccggcaaccagcagagcctggcccacagcagactgtgggacgccgtggtgggcttcctgcacgtgttcgcccacatgcagatgaagctgagccaggacagcagccagatcgagctgctgaaggagctgatggacctgcagaaggacatggtggtgatgctgctgagcatgctggagggcaacgtggtgaacggcaccatcggcaagcagatggtggacatgctggtggagagcagcaacaacgtggagatgatcctgaagttcttcgacatgttcctgaagctgaaggacctgaccagcagcgacaccttcaaggagtacgaccccgacggcaagggcgtgatcagcaagagagacttccacaaggccatggagagccacaagcactacacccagagcgagaccgagttcctgctgagctgcgccgagaccgacgagaacgagaccctggactacgaggagttcgtgaagagattccacgagcccgccaaggacatcggcttcaacgtggccgtgctgctgaccaacctgagcgagcacatgcccaacgacaccagactgcagaccttcctggagctggccgagagcgtgctgaactacttccagcccttcctgggcagaatcgagatcatgggcagcgccaagagaatcgagagagtgtacttcgagatcagcgagagcagcagaacccagtgggagaagccccaggtgaaggagagcaagagacagttcatcttcgacgtggtgaacgagggcggcgagaaggagaagatggagctgttcgtgaacttctgcgaggacaccatcttcgagatgcagctggccgcccagatcagcgagagcgacctgaacgagagaagcgccaacaaggaggagagcgagaaggagagacccgaggagcagggccccagaatggccttcttcagcatcctgaccgtgagaagcgccctgttcgccctgagatacaacatcctgaccctgatgagaatgctgagcctgaagagcctgaagaagcagatgaagaaggtgaagaagatgaccgtgaaggacatggtgaccgccttcttcagcagctactggagcatcttcatgaccctgctgcacttcgtggccagcgtgttcagaggcttcttcagaatcatctgcagcctgctgctgggcggcagcctggtggagggcgccaagaagatcaaggtggccgagctgctggccaacatgcccgaccccacccaggacgaggtgagaggcgacggcgaggagggcgagagaaagcccctggaggccgccctgcccagcgaggacctgaccgacctgaaggagctgaccgaggagagcgacctgctgagcgacatcttcggcctggacctgaagagagagggcggccagtacaagctgatcccccacaaccccaacgccggcctgagcgacctgatgagcaaccccgtgcccatgcccgaggtgcaggagaagttccaggagcagaaggccaaggaggaggagaaggaggagaaggaggagaccaagagcgagcccgagaaggccgagggcgaggacggctag

SEQ ID NO: 286268 - DNA, 129 bp, Artificial Sequence
  derived and/or modified sequence
aagttcaaacatcagtattaaccttgaacatcaatggcctacatgcatcacttaaaacatacagacaggcaaattgggttaagaaaacaaacaagcaaacaaaacatgttccaaacatttgttggctat

SEQ ID NO: 286269 - DNA, 219 bp, Artificial Sequence
  derived and/or modified sequence
atgagctaccagcagcagcagtgcaagcagccctgccagcccccccccgtgtgccctactccaaaatgtcctgagccatgcccacctcccaagtgccccgaaccatgtccctctcccaagtgtccacagccctgtcctcctcagcagtgccagcagaagtatccccccgtcacccctagtcctccttgccaacctaagtgccctcccaaatcaaaatag

SEQ ID NO: 286270 - DNA, 861 bp, Artificial Sequence
  derived and/or modified sequence
atgcacgtgttcatcgacgagcacggcgagatcagaagctgctacctgaagagcggcaaccagaaggagggccccctgcagcccctgcccagcaacaacgactgcctgagccaggccagagagatgcaggtgagcagcagcagcaccaccaccagcgagagccaggaccccagcagcggcgaccccgccgtgagcgccctgcagcagcagctgctgctgatggtggccagaagaacccagagcgagacccccagacacgtgagccaggacctggaggccagcagctgcagcagcacccagggcaagttcaacagagagcagttctacaagttcatcatcttccccggcaagtggatcaaggtgtggtacgacagactgaccctgctggccctgctggacagaaccgaggacatcaaggagaacgtgctggccatcctgctgatcgtgctggtgagcctgctgggcttcctgaccctgagccagggcttctgcaaggacatgtgggtgctgctgttctgcctggtgatggccagctgccagtacagcctgctgaagagcgtgcagcccgaccccgccagccccatccacggccacaaccagatcatcacctacagcagacccatctacttctgcgtgctgtgcggcctgatcctgctgctggacaccggcgccaaggccagacacccccccagctacgtggtgtacggcctgaagctgttcagccccgtgttcctgcagagcgccagagactacctgatcggcaagatcatgaacagccacaaggacttcttcaccagcgagaagaagaaggacaagatcatcagcgccatcagcagcgtgatcttcctgaagagctggtag

SEQ ID NO: 286271 - DNA, 861 bp, Artificial Sequence
  derived and/or modified sequence
atgcacgtcttcattgacgagcatggcgaaattcggagctgttatttaaagagcggcaaccaaaaggaaggacccttacagcctttaccaagcaacaatgattgcctaagtcaggcccgcgagatgcaggtcagctccagttctactacaactagcgagtcccaggacccttctagtggcgatcccgccgtgtctgcactgcagcagcaactactcctgatggtggctcggcggactcaaagcgaaacgcctagacacgtctcacaggacttggaagcttctagttgctcgtccacccagggtaagttcaaccgagagcagttctataagtttataatcttccctggtaagtggatcaaggtgtggtatgataggcttacactgctcgcccttttggaccggacagaggatattaaggaaaacgtgctggccatactgctgatcgttcttgtgtccttgctgggtttcctgacattgagccagggcttttgtaaagacatgtgggtgctcctcttctgcctagtgatggcaagctgccagtatagcctgctgaaatcagttcagcctgatcccgcctcccctatccatggccacaatcagataatcacctacagccgacccatttatttctgtgtgttgtgtggcctaattcttcttctagataccggtgctaaggctcgacaccccccctcctatgttgtctacggcctaaagctcttctctcccgtgtttctgcagtccgcccgcgactacttgatcggaaaaataatgaattcacacaaagattttttcaccagtgaaaagaaaaaagacaaaataatctcagctatctcatctgttatctttctgaagtcttggtag

SEQ ID NO: 286272 - DNA, 861 bp, Artificial Sequence
  derived and/or modified sequence
atgcacgtgttcattgatgagcacggggagatccgcagctgctacctgaagagcggcaaccagaaggagggccccctgcagcccctgcccagcaacaatgactgcctgagccaggcccgggagatgcaggtgagcagcagcagcaccaccaccagcgagagccaggaccccagcagcggggaccctgctgtgtctgccctgcagcagcagctgctgctgatggtggcccggaggacccagagcgagacccccaggcatgtgtcccaggacctggaggccagcagctgcagcagcacccagggcaagttcaaccgggagcagttctacaagttcatcatcttccctgggaagtggatcaaggtgtggtatgaccggctgaccctgctggccctgctggacagaacagaggacatcaaggaaaatgtgctggccatcctgctgattgtgctggtgtccctgctgggcttcctgaccctgagccagggcttctgcaaggacatgtgggtgctgctcttctgcctggtgatggccagctgccagtacagcctgctgaagtctgtgcagcctgaccctgccagccccatccacggccacaaccagatcatcacctacagccggcccatctacttctgtgtgctgtgtggcctcatcctgctgctggacaccggggccaaggcccggcaccccccatcctatgtggtgtatggcctgaagctgttcagccctgtgttcctgcagagcgcccgggactacctgattggcaagatcatgaacagccacaaggacttcttcaccagcgagaagaagaaggacaagatcatcagcgccatcagcagcgtcatcttcctgaagtcctggtag

SEQ ID NO: 286273 - DNA, 861 bp, Artificial Sequence
  derived and/or modified sequence
atgcacgtgttcatcgacgagcacggcgagatccggagctgctacctcaagtccggcaatcagaaggaggggcccttgcagccactcccatctaacaacgactgtttgtcccaggcccgcgaaatgcaagtctccagcagcagcacaacaacttccgagtctcaggacccctcctcaggtgatccagccgttagcgccctccagcagcagcttctcttgatggtggctcgccgtacacagagtgaaacccctaggcatgtgagccaggacttggaggccagttcatgttcttccactcaagggaagtttaaccgcgagcaattctacaagttcattatctttccgggtaagtggatcaaggtgtggtacgaccgactgacactcctggcacttttagaccgcacagaggacatcaaagagaatgtgttggccatattgttgatcgtgctagtctctttattagggttccttactctcagccaggggttctgcaaggatatgtgggtacttcttttctgcctagttatggctagttgtcagtactccctgcttaagtccgttcagccagatcccgccagccctattcacggacataaccagatcattacatacagccgcccaatctacttttgcgtcctatgtgggctaatcctcctgctggatacaggagcaaaggcgcggcatcctccctcgtatgtcgtatatggattaaaactgttcagtccagtctttcttcagtcagcacgggattatctcatcgggaagatcatgaactctcataaggacttcttcacttctgagaagaaaaaagacaaaatcatatcagcaatcagttccgtcattttcttgaaatcctggtag

SEQ ID NO: 286274 - DNA, 3199 bp, Artificial Sequence
  derived and/or modified sequence
tggcgctcacctgcccggccgcagcagccggctccggcgccgcggttcgcgggtccgggcggaagagcagctccagcttcaaacgtggggtggaaggaggcggcgggggcgacggcggcggcgacggcgggggcgcggcccgcgggcccgggtgttagacctgagggagcctggagatccggccggggcgcgcagggtgcagcggggcgctcaccagccccggggcgcagccggcatggtgtcccaggtgctgcagctgctccggcagggcgtgtgggccgcgctcaccgggggctggtaccacgacccggagcagagcaagttcaccaacagctgccacctctacctgtggctgttcctcctgctgctgcccctggccctgcacctggcttttcctccaaatgcgatcattgtatttttctactgcagtgcagtgactatattcttcacaataatcaaactggtcagttatcgcctacacctcatgtttgacaaaggagaagtaattcagcaaaagccctccagaaaggaagaaaagccaaataaagacaaggaggccaaaggtgaacacataactaatcacagaaatccaagcaataataggcagattcacaatggcaaaaaggaagaggccagtcgaaacctctccacgcctcccctccgctgcagctccagagggcaaagcataacctctcatcactcttctgggccattggagttgtcagcacaggaaactgtagaagatctcaaaggtgtcattctattagaagaccatcccatagcaccagtgtcatctacctcacctggtatcaaagtggaaagcttacctgcgtctcaagcacacatgctggaaaccacgaccaagtcagtaatacctgtaaaaccagttgccacagaaactctcatcaatggtaaaggaaaggaaagaggaggcaaggggcagcctcctttgcgccacagatccgagggtggcttagtggataagggacccttgaagaagttgccccacctgtctttgtctcagtatgacttactagaaacagacgtttctttccagccgtgggggagtgagaattcagtcctgattccagaacctgtcagttgtccccggggctccataagggaacgggtacaaagcaagtcacctcaggacagcctgagcagcagctgccctcaatgtgacaccatcgtggccaagcctgtggaggagccagcagacacatcctgtcaggtagatacctcctgccagggggacctgcccttgcaccaggaagtggactcctcagatagtgaggtagctgttactctcatcgatacttctcaacccggagacccactgagtctacatgagcccataaaaattgttatcacgatgagcagtaccccaaactccatgacagatttggaaagctccctccacctgagggtggttggcacagagaagaccagtgtaaagtctgacgctgagcccactaacccaggggcggccggttctccaaatgccgagcagatctcaattcctgtaatcaccctggacctgcctgagggtgggggaggaggtgttccctgtcccgaaggcaatggaagtgaaaggactccagagagactgaagacgagggtatccaccaatcagtgttctggctacggatctggggaggggggaaatgccatcaaggatcacagttcttcatcacgggaaccctgggaatcggtgtcccggcttacacctgatacaggctccgagtctaaggtggggaaggaaggccagactaaccttgacccatcgtcttgtaagtccagccatgaaaagaggcatgcccgggtgctcagtgtggacagtgggacagatgtcttcttgagtaaaagttctgcagaaattgttaacgatacagagaaaacaatgccaacttccaaatctgacctagaggctaaggaaggacaaatgccaaatgagtccaacttcctggaatttgtctccctgttagaatccattaatacttccaagatgacggcatccagtcaactgaatggctcagctgagcagaatgaagaaagtgggcttctccgagataactgttcccaggaaaaaaaggaggaaatcctggaaaatgaaaagcccagtggacacagttctaagcaaggaaaaccagatttgcaaagtcaagaccatactagcaccggccccgcatgcactcagcctgccaagaccacagccttttttcagggcaatagacaaagacagataatctacagggtaacttcccaacaagatagttctgtcttgcaagtcatcagtgggcctgaaacatctgtacaagaagagatatctgtggatgctatgcatgtcttcattgatgaacatggggaaattagatcctgttatttaaaatctggaaatcagaaagaaggccctttacagcctctaccatcaaataatgactgtctctctcaggctcgagagatgcaggtcagctcctccagtaccacaacttctgagagtcaagatccgtcttctggggaccctgccgtcagtgcccttcagcaacagctgttactgatggtggctcgcaggacccagtcggaaaccccacggcatgtgagtcaggatctggaagcctcgtcatgttcttcaacacaaggaaaatttaaccgagagcagttttacaaatttatcattttccctggcaagtggattaaagtctggtatgatcgactgaccttgctggcattacttgatcgaactgaagacatcaaggagaatgtactggcgattttactcattgtcctggtttccctccttggatttctgaccttgagccaaggcttttgcaaagatatgtgggtgctcctcttctgcctcgtcatggccagctgccagtactccctgctaaagagtgttcagcctgaccccgcctcaccaatacacggacacaaccaaatcataacatatagcagaccaatctatttttgtgtgctgtgtggccttattttgcttcttgatacaggggccaaagccaggcaccctcccagttacgttgtgtatggcctgaagctcttctctccagtgtttctacaatcagctagggactacttaatagggaaaattatgaacagccacaaagacttttttacttctgaaaaaaaaaaggacaaaataatttcagcaatttcaagtgtcattttcctgaagtcctggtaa

SEQ ID NO: 286275 - DNA, 861 bp, Artificial Sequence
  derived and/or modified sequence
atgcatgtttttatagatgaacacggggaaattcgctcatgttacctgaagagcgggaatcagaaagagggaccgttgcaaccgctgcccagcaacaacgattgcctgtctcaggccagagagatgcaggtctcctctagttctaccactaccagcgagagccaggatccttcctccggggaccctgccgtatcagccttacagcaacagctgttattaatggtggcgaggcggactcagagcgaaacgcctcggcacgtgtcccaggatctcgaggcatcctcttgttctagcacccaaggaaagtttaacagggaacagttttataaattcattatctttccaggcaaatggattaaagtctggtatgatcgacttactcttctggctctgctggatcggaccgaggatattaaagaaaacgtcctcgccatactgctcattgtactggtttcgctcctggggttcttgactctctcccagggcttttgtaaagacatgtgggttctactcttttgtcttgtgatggcttcatgccaatacagtttgctgaagagcgtgcaaccagacccggctagccctatacacgggcacaatcagatcattacatactctaggcccatctacttctgcgtcttgtgtggactaatcctcctgttagacaccggagcaaaggcgaggcacccgccatcatatgtggtctatgggctgaagctgttctccccagttttcctccaaagcgctcgtgactatctgatcgggaaaataatgaattctcataaggacttctttaccagtgaaaagaaaaaggacaaaatcattagcgcaataagctctgtgatctttctcaagtcttggtag

SEQ ID NO: 286276 - protein, 295 aa, Artificial Sequence
  derived and/or modified sequence
  misc_feature (1)..(1): Xaa can be any naturally occurring amino acid
XTKLATGSKDTTVIIWQVDPDTHLLKLLKTLEGHAYGVSYIAWSPDDNYLVACGPDDCSELWLWNVQTGELRTKMSQSHEDSLTSVAWNPDGKRFVTGGQRGQFYQCDLDGNLLDSWEGVRVQCLWCLSDGKTVLASDTHQRIRGYNFEDLTDRNIVQEDHPIMSFTISKNGRLALLNVATQGVHLWDLQDRVLVRKYQGVTQGFYTIHSCFGGHNEDFIASGSEDHKVYIWHKRSELPIAELTGHTRTVNCVSWNPQIPSMMASASDDGTVRIWGPAPFIDHQNIEEECSSMDS

SEQ ID NO: 286277 - protein, 194 aa, Artificial Sequence
  derived and/or modified sequence
MDDDLMLALRLQEEWNLQEAERDHAQESLSLVDASWELVDPTPDLQALFVQFNDQFFWGQLEAVEVKWSVRMTLCAGICSYEGKGGMCSIRLSEPLLKLRPRKDLVEVYHTFHDEVDEYRRHWWRCNGPCQHRPPYYGYVKRATNREPSAHDYWWAEHQKTCGGTYIKIKEPENYKKRQRKGKTRKGTSIGRRE

SEQ ID NO: 286278 - DNA, 2282 bp, Artificial Sequence
  derived and/or modified sequence
gtcgcggcgtaactggggagccagcctgacgccggcggaccccgcctgtgatcctggcaacgatggatgatgacttgatgttggcactgcggcttcaggaggagtggaacttgcaggaggcggagcgcgatcatgcccaggagtccctgtcgctagtggacgcgtcgtgggagttggtggaccccacaccggacttgcaggcactgtttgttcagtttaacgaccaattcttctggggccagctggaggccgtcgaggtgaagtggagcgtgcgaatgaccctgtgtgctgggatatgcagctatgaagggaagggtggaatgtgttccatccgtctcagcgaaccccttttgaagttgaggccaagaaaggatcttgtagaggtataccatacttttcacgatgaggtggatgagtatcggcgacactggtggcgctgcaatgggccgtgccagcacaggccaccgtattacggctatgtcaaacgagctactaacagggaaccctctgctcatgactattggtgggctgagcaccagaaaacctgtggaggcacttacataaaaatcaaggaaccagagaattacaaaaaaaggcaaaggaaaggcaaaactaggaaaggaaccagtattggccgcagagaataaagataaacccaacagaggtgaggcccagctagtaatcccttttagtgggaaaggatatgttctaggagaaacaagcaatttaccttcacctgggaaactgatcacttcacatgccattaataaaacccaagatcttttaaatcaaaaccattcagcaaatgctgtaagacctaattctaaaatcaaggtgaaatttgaacagaatggttcaagtaaaaattctcatctggtctcccctgctgttagtaacagtcaccaaaatgttctaagcaactactttcctagagtatcatttgccaaccaaaaggctttcagaggtgtgaatggatctccaaggataagtgtaacagttggcaacatccctaaaaactcagtctcttctagttctcagagaagggtttcatcttctaagatatccctaagaaattcttcaaaagtaacggaatcagcatctgtgatgccatcccaggatgtgagtgggtctgaagatacattcccaaataaacgacctaggctagaagataagactgtttttgacaatttttttatcaagaaagagcaaataaaaagcagtggtaatgatccaaagtatagtacaaccacagctcagaattccagcagttcatccagtcagagcaaaatggttaattgcccagtttgtcagaatgaagttctggagtctcagattaatgagcacttggactggtgccttgaaggtgacagcatcaaagtcaaaagcgaagaaagtctttgaaaaaggtttcaaagtctcaagtaccacctgtattatctcactaatgtgctatgtcagccagtcaggaagttctggttaatactaagatttgtaggttataatctagttcacataaccaatagaaagtgtcctattttatatatacgcatataagattgtaattttaagatgttttgtgtctcagggtgctacattcactcttgccttaggtatactgtaacccaggttctgcctgtcgtgtataagttttagatacttttgttctttcttgctcttaaggattttaaaaacctgttaatctttttatttgtatactttcctaaaaatattcatatggggaatcctgtcaggtgtttggttatattgactatttattaatagtattagaactcattccctgaactgatgtaaatcttcatagtgtcagacatactgaccaaaaccacaatctagactacaaagtatattgttttagagtactcaaattgtattatttattaatttttttgtttgcaaaatcttaacaggaactgtattttctatattttaaagaattttatttgtcccacttttactaaacagtggcagcagattttaagttaaagaatatggaatatagtaaaataagtaaatttcttttggaatatttttagtaacaaatagccactataattctgtaggccaaattttatattgagtttagctgttttctcaaaatttagcagagtggttaaaattctgtgctgataagtaactgatacatataacataaacataacaaagttgcctagttgatgtaacagtggaaagttatctggaaatagtattttgaactttaagccaagtttaaaacattataataaaaggaataccatttgtgc

SEQ ID NO: 286279 - protein, 5602 aa, Artificial Sequence
  derived and/or modified sequence
MLVIRGASLKDAGEYTCEVEASKSTASLHVEEKANCFTEELTNLQVEEKGTAVFTCKTEHPAATVTWRKGLLELRASGKHQPSQEGLTLRLTISALEKADSDTYTCDIGQAQSRAQLLVQGRRVHIIEDLEDVDVQEGSSATFRCRISPANYEPVHWFLDKTPLHANELNEIDAQPGGYHVLTLRQLALKDSGTIYFEAGDQRASAALRVTEKPSVFSRELTDATITEGEDLTLVCETSTCDIPVCWTKDGKTLRGSARCQLSHEGHRAQLLITGATLQDSGRYKCEAGGACSSSIVRVHARPVRFQEALKDLEVLEGGAATLRCVLSSVAAPVKWCYGNNVLRPGDKYSLRQEGAMLELVVRNLRPQDSGRYSCSFGDQTTSATLTVTALPAQFIGKLRNKEATEGATATLRCELSKAAPVEWRKGSETLRDGDRYCLRQDGAMCELQIRGLAMVDAAEYSCVCGEERTSASLTIRPMPAHFIGRLRHQESIEGATATLRCELSKAAPVEWRKGRESLRDGDRHSLRQDGAVCELQICGLAVADAGEYSCVCGEERTSATLTVKALPAKFTEGLRNEEAVEGATAMLWCELSKVAPVEWRKGPENLRDGDRYILRQEGTRCELQICGLAMADAGEYLCVCGQERTSATLTIRALPARFIEDVKNQEAREGATAVLQCELNSAAPVEWRKGSETLRDGDRYSLRQDGTKCELQIRGLAMADTGEYSCVCGQERTSAMLTVRALPIKFTEGLRNEEATEGATAVLRCELSKMAPVEWWKGHETLRDGDRHSLRQDGARCELQIRGLVAEDAGEYLCMCGKERTSAMLTVRAMPSKFIEGLRNEEATEGDTATLWCELSKAAPVEWRKGHETLRDGDRHSLRQDGSRCELQIRGLAVVDAGEYSCVCGQERTSATLTVRALPARFIEDVKNQEAREGATAVLQCELSKAAPVEWRKGSETLRGGDRYSLRQDGTRCELQIHGLSVADTGEYSCVCGQERTSATLTVRALPARFTQDLKTKEASEGATATLQCELSKVAPVEWKKGPETLRDGGRYSLKQDGTRCELQIHDLSVADAGEYSCMCGQERTSATLTVRALPARFTEGLRNEEAMEGATATLQCELSKAAPVEWRKGLEALRDGDKYSLRQDGAVCELQIHGLAMADNGVYSCVCGQERTSATLTVRALPARFIEDMRNQKATEGATVTLQCKLRKAAPVEWRKGPNTLKDGDRYSLKQDGTSCELQIRGLVIADAGEYSCICEQERTSATLTVRALPARFIEDVRNHEATEGATAVLQCELSKAAPVEWRKGSETLRDGDRYSLRQDGTRCELQIRGLAVEDTGEYLCVCGQERTSATLTVRALPARFIDNMTNQEAREGATATLHCELSKVAPVEWRKGPETLRDGDRHSLRQDGTRCELQIRGLSVADAGEYSCVCGQERTSATLTIREATEGATAMLQCELSKVAPVEWRKGPETLRDGDRYNLRQDGTRCELQIHGLSVADTGEYSCVCGQEKTSATLTVKAPQPVFREPLQSLQAEEGSTATLQCELSEPTATVVWSKGGLQLQANGRREPRLQGCTAELVLQDLQREDTGEYTCTCGSQATSATLTVTAAPVRFLRELQHQEVDEGGTAHLCCELSRAGASVEWRKGSLQLFPCAKYQMVQDGAAAELLVRGVEQEDAGDYTCDTGHTQSMASLSVRVPRPKFKTRLQSLEQETGDIARLCCQLSDAESGAVVQWLKEGVELHAGPKYEMRSQGATRELLIHQLEAKDTGEYACVTGGQKTAASLRVTEPEVTIVRGLVDAEVTADEDVEFSCEVSRAGATGVQWCLQGLPLQSNEVTEVAVRDGRIHTLRLKGVTPEDAGTVSFHLGNHASSAQLTVRAPEVTILEPLQDVQLSEGQDASFQCRLSRASGQEARWALGGVPLQANEMNDITVEQGTLHLLTLHKVTLEDAGTVSFHVGTCSSEAQLKVTAKNTVVRGLENVEALEGGEALFECQLSQPEVAAHTWLLDDEPVHTSENAEVVFFENGLRHLLLLKNLRPQDSCRVTFLAGDMVTSAFLTVRGWRLEILEPLKNAAVRAGAQACFTCTLSEAVPVGEASWYINGAAVQPDDSDWTVTADGSHHALLLRSAQPHHAGEVTFACRDAVASARLTVLGLPDPPEDAEVVARSSHTVTLSWAAPMSDGGGGLCGYRVEVKEGATGQWRLCHELVPGPECVVDGLAPGETYRFRVAAVGPVGAGEPVHLPQTVRLAEPPKPVPPQPSAPESRQVAAGEDVSLELEVVAEAGEVIWHKGMERIQPGGRFEVVSQGRQQMLVIKGFTAEDQGEYHCGLAQGSICPAAATFQVALSPASVDEAPQPSLPPEAAQEGDLHLLWEALARKRRMSREPTLDSISELPEEDGRSQRLPQEAEEVAPDLSEGYSTADELARTGDADLSHTSSDDESRAGTPSLVTYLKKAGRPGTSPLASKVGAPAAPSVKPQQQQEPLAAVRPPLGDLSTKDLGDPSMDKAAVKIQAAFKGYKVRKEMKQQEGPMFSHTFGDTEAQVGDALRLECVVASKADVRARWLKDGVELTDGRHHHIDQLGDGTCSLLITGLDRADAGCYTCQVSNKFGQVTHSACVVVSGSESEAESSSGGELDDAFRRAARRLHRLFRTKSPAEVSDEELFLSADEGPAEPEEPADWQTYREDEHFICIRFEALTEARQAVTRFQEMFATLGIGVEIKLVEQGPRRVEMCISKETPAPVVPPEPLPSLLTSDAAPVFLTELQNQEVQDGYPVSFDCVVTGQPMPSVRWFKDGKLLEEDDHYMINEDQQGGHQLIITAVVPADMGVYRCLAENSMGVSSTKAELRVDLTSTDYDTAADATESSSYFSAQGYLSSREQEGTESTTDEGQLPQVVEELRDLQVAPGTRLAKFQLKVKGYPAPRLYWFKDGQPLTASAHIRMTDKKILHTLEIISVTREDSGQYAAYISNAMGAAYSSARLLVRGPDEPEEKPASDVHEQLVPPRMLERFTPKKVKKGSSITFSVKVEGRPVPTVHWLREEAERGVLWIGPDTPGYTVASSAQQHSLVLLDVGRQHQGTYTCIASNAAGQALCSASLHVSGLPKVEEQEKVKEALISTFLQGTTQAISAQGLETASFADLGGQRKEEPLAAKEALGHLSLAEVGTEEFLQKLTSQITEMVSAKITQAKLQVPGGDSDEDSKTPSASPRHGRSRPSSSIQESSSESEDGDARGEIFDIYVVTADYLPLGAEQDAITLREGQYVEVLDAAHPLRWLVRTKPTKSSPSRQGWVSPAYLDRRLKLSPEWGAAEAPEFPGEAVSEDEYKARLSSVIQELLSSEQAFVEELQFLQSHHLQHLERCPHVPIAVAGQKAVIFRNVRDIGRFHSSFLQELQQCDTDDDVAMCFIKNQAAFEQYLEFLVGRVQAESVVVSTAIQEFYKKYAEEALLAGDPSQPPPPPLQHYLEQPVERVQRYQALLKELIRNKARNRQNCALLEQAYAVVSALPQRAENKLHVSLMENYPGTLQALGEPIRQGHFIVWEGAPGARMPWKGHNRHVFLFRNHLVICKPRRDSRTDTVSYVFRNMMKLSSIDLNDQVEGDDRAFEVWQEREDSVRKYLLQARTAIIKSSWVKEICGIQQRLALPVWRPPDFEEELADCTAELGETVKLACRVTGTPKPVISWYKDGKAVQVDPHHILIEDPDGSCALILDSLTGVDSGQYMCFAASAAGNCSTLGKILVQVPPRFVNKVRASPFVEGEDAQFTCTIEGAPYPQIRWYKDGALLTTGNKFQTLSEPRSGLLVLVIRAASKEDLGLYECELVNRLGSARASAELRIQSPMLQAQEQCHREQLVAAVEDTTLERADQEVTSVLKRLLGPKAPGPSTGDLTGPGPCPRGAPALQETGSQPPVTGTSEAPAVPPRVPQPLLHEGPEQEPEAIARAQEWTVPIRMEGAAWPGAGTGELLWDVHSHVVRETTQRTYTYQAIDTHTARPPSMQVTIEDVQAQTGGTAQFEAIIEGDPQPSVTWYKDSVQLVDSTRLSQQQEGTTYSLVLRHVASKDAGVYTCLAQNTGGQVLCKAELLVLGGDNEPDSEKQSHRRKLHSFYEVKEEIGRGVFGFVKRVQHKGNKILCAAKFIPLRSRTRAQAYRERDILAALSHPLVTGLLDQFETRKTLILILELCSSEELLDRLYRKGVVTEAEVKVYIQQLVEGLHYLHSHGVLHLDIKPSNILMVHPAREDIKICDFGFAQNITPAELQFSQYGSPEFVSPEIIQQNPVSEASDIWAMGVISYLSLTCSSPFAGESDRATLLNVLEGRVSWSSPMAAHLSEDAKDFIKATLQRAPQARPSAAQCLSHPWFLKSMPAEEAHFINTKQLKFLLARSRWQRSLMSYKSILVMRSIPELLRGPPDSPSLGVARHLCRDTGGSSSSSSSSDNELAPFARAKSLPPSPVTHSPLLHPRGFLRPSASLPEEAEASERSTEAPAPPASPEGAGPPAAQGCVPRHSVIRSLFYHQAGESPEHGALAPGSRRHPARRRHLLKGGYIAGALPGLREPLMEHRVLEEEAAREEQATLLAKAPSFETALRLPASGTHLAPGHSHSLEHDSPSTPRPSSEACGEAQRLPSAPSGGAPIRDMGHPQGSKQLPSTGGHPGTAQPERPSPDSPWGQPAPFCHPKQGSAPQEGCSPHPAVAPCPPGSFPPGSCKEAPLVPSSPFLGQPQAPPAPAKASPPLDSKMGPGDISLPGRPKPGPCSSPGSASQASSSQVSSLRVGSSQVGTEPGPSLDAEGWTQEAEDLSDSTPTLQRPQEQATMRKFSLGGRGGYAGVAGYGTFAFGGDAGGMLGQGPMWARIAWAVSQSEEEEQEEARAESQSEEQQEARAESPLPQVSARPVPEVGRAPTRSSPEPTPWEDIGQVSLVQIRDLSGDAEAADTISLDISEVDPAYLNLSDLYDIKYLPFEFMIFRKVPKSAQPEPPSPMAEEELAEFPEPTWPWPGELGPHAGLEITEESEDVDALLAEAAVGRKRKWSSPSRSLFHFPGRHLPLDEPAELGLRERVKASVEHISRILKGRPEGLEKEGPPRKKPGLASFRLSGLKSWDRAPTFLRELSDETVVLGQSVTLACQVSAQPAAQATWSKDGAPLESSSRVLISATLKNFQLLTILVVVAEDLGVYTCSVSNALGTVTTTGVLRKAERPSSSPCPDIGEVYADGVLLVWKPVESYGPVTYIVQCSLEGGSWTTLASDIFDCCYLTSKLSRGGTYTFRTACVSKAGMGPYSSPSEQVLLGGPSHLASEEESQGRSAQPLPSTKTFAFQTQIQRGRFSVVRQCWEKASGRALAAKIIPYHPKDKTAVLREYEALKGLRHPHLAQLHAAYLSPRHLVLILELCSGPELLPCLAERASYSESEVKDYLWQMLSATQYLHNQHILHLDLRSENMIITEYNLLKVVDLGNAQSLSQEKVLPSDKFKDYLETMAPELLEGQGAVPQTDIWAIGVTAFIMLSAEYPVSSEGARDLQRGLRKGLVRLSRCYAGLSGGAVAFLRSTLCAQPWGRPCASSCLQCPWLTEEGPACSRPAPVTFPTARLRVFVRNREKRRALLYKRHNLAQVR

SEQ ID NO: 286280 - DNA, 16809 bp, Artificial Sequence
  derived and/or modified sequence
atgctggtgatcagaggcgccagcctgaaggacgccggcgagtacacctgcgaggtggaggccagcaagagcaccgccagcctgcacgtggaggagaaggccaactgcttcaccgaggagctgaccaacctgcaggtggaggagaagggcaccgccgtgttcacctgcaagaccgagcaccccgccgccaccgtgacctggagaaagggcctgctggagctgagagccagcggcaagcaccagcccagccaggagggcctgaccctgagactgaccatcagcgccctggagaaggccgacagcgacacctacacctgcgacatcggccaggcccagagcagagcccagctgctggtgcagggcagaagagtgcacatcatcgaggacctggaggacgtggacgtgcaggagggcagcagcgccaccttcagatgcagaatcagccccgccaactacgagcccgtgcactggttcctggacaagacccccctgcacgccaacgagctgaacgagatcgacgcccagcccggcggctaccacgtgctgaccctgagacagctggccctgaaggacagcggcaccatctacttcgaggccggcgaccagagagccagcgccgccctgagagtgaccgagaagcccagcgtgttcagcagagagctgaccgacgccaccatcaccgagggcgaggacctgaccctggtgtgcgagaccagcacctgcgacatccccgtgtgctggaccaaggacggcaagaccctgagaggcagcgccagatgccagctgagccacgagggccacagagcccagctgctgatcaccggcgccaccctgcaggacagcggcagatacaagtgcgaggccggcggcgcctgcagcagcagcatcgtgagagtgcacgccagacccgtgagattccaggaggccctgaaggacctggaggtgctggagggcggcgccgccaccctgagatgcgtgctgagcagcgtggccgcccccgtgaagtggtgctacggcaacaacgtgctgagacccggcgacaagtacagcctgagacaggagggcgccatgctggagctggtggtgagaaacctgagaccccaggacagcggcagatacagctgcagcttcggcgaccagaccaccagcgccaccctgaccgtgaccgccctgcccgcccagttcatcggcaagctgagaaacaaggaggccaccgagggcgccaccgccaccctgagatgcgagctgagcaaggccgcccccgtggagtggagaaagggcagcgagaccctgagagacggcgacagatactgcctgagacaggacggcgccatgtgcgagctgcagatcagaggcctggccatggtggacgccgccgagtacagctgcgtgtgcggcgaggagagaaccagcgccagcctgaccatcagacccatgcccgcccacttcatcggcagactgagacaccaggagagcatcgagggcgccaccgccaccctgagatgcgagctgagcaaggccgcccccgtggagtggagaaagggcagagagagcctgagagacggcgacagacacagcctgagacaggacggcgccgtgtgcgagctgcagatctgcggcctggccgtggccgacgccggcgagtacagctgcgtgtgcggcgaggagagaaccagcgccaccctgaccgtgaaggccctgcccgccaagttcaccgagggcctgagaaacgaggaggccgtggagggcgccaccgccatgctgtggtgcgagctgagcaaggtggcccccgtggagtggagaaagggccccgagaacctgagagacggcgacagatacatcctgagacaggagggcaccagatgcgagctgcagatctgcggcctggccatggccgacgccggcgagtacctgtgcgtgtgcggccaggagagaaccagcgccaccctgaccatcagagccctgcccgccagattcatcgaggacgtgaagaaccaggaggccagagagggcgccaccgccgtgctgcagtgcgagctgaacagcgccgcccccgtggagtggagaaagggcagcgagaccctgagagacggcgacagatacagcctgagacaggacggcaccaagtgcgagctgcagatcagaggcctggccatggccgacaccggcgagtacagctgcgtgtgcggccaggagagaaccagcgccatgctgaccgtgagagccctgcccatcaagttcaccgagggcctgagaaacgaggaggccaccgagggcgccaccgccgtgctgagatgcgagctgagcaagatggcccccgtggagtggtggaagggccacgagaccctgagagacggcgacagacacagcctgagacaggacggcgccagatgcgagctgcagatcagaggcctggtggccgaggacgccggcgagtacctgtgcatgtgcggcaaggagagaaccagcgccatgctgaccgtgagagccatgcccagcaagttcatcgagggcctgagaaacgaggaggccaccgagggcgacaccgccaccctgtggtgcgagctgagcaaggccgcccccgtggagtggagaaagggccacgagaccctgagagacggcgacagacacagcctgagacaggacggcagcagatgcgagctgcagatcagaggcctggccgtggtggacgccggcgagtacagctgcgtgtgcggccaggagagaaccagcgccaccctgaccgtgagagccctgcccgccagattcatcgaggacgtgaagaaccaggaggccagagagggcgccaccgccgtgctgcagtgcgagctgagcaaggccgcccccgtggagtggagaaagggcagcgagaccctgagaggcggcgacagatacagcctgagacaggacggcaccagatgcgagctgcagatccacggcctgagcgtggccgacaccggcgagtacagctgcgtgtgcggccaggagagaaccagcgccaccctgaccgtgagagccctgcccgccagattcacccaggacctgaagaccaaggaggccagcgagggcgccaccgccaccctgcagtgcgagctgagcaaggtggcccccgtggagtggaagaagggccccgagaccctgagagacggcggcagatacagcctgaagcaggacggcaccagatgcgagctgcagatccacgacctgagcgtggccgacgccggcgagtacagctgcatgtgcggccaggagagaaccagcgccaccctgaccgtgagagccctgcccgccagattcaccgagggcctgagaaacgaggaggccatggagggcgccaccgccaccctgcagtgcgagctgagcaaggccgcccccgtggagtggagaaagggcctggaggccctgagagacggcgacaagtacagcctgagacaggacggcgccgtgtgcgagctgcagatccacggcctggccatggccgacaacggcgtgtacagctgcgtgtgcggccaggagagaaccagcgccaccctgaccgtgagagccctgcccgccagattcatcgaggacatgagaaaccagaaggccaccgagggcgccaccgtgaccctgcagtgcaagctgagaaaggccgcccccgtggagtggagaaagggccccaacaccctgaaggacggcgacagatacagcctgaagcaggacggcaccagctgcgagctgcagatcagaggcctggtgatcgccgacgccggcgagtacagctgcatctgcgagcaggagagaaccagcgccaccctgaccgtgagagccctgcccgccagattcatcgaggacgtgagaaaccacgaggccaccgagggcgccaccgccgtgctgcagtgcgagctgagcaaggccgcccccgtggagtggagaaagggcagcgagaccctgagagacggcgacagatacagcctgagacaggacggcaccagatgcgagctgcagatcagaggcctggccgtggaggacaccggcgagtacctgtgcgtgtgcggccaggagagaaccagcgccaccctgaccgtgagagccctgcccgccagattcatcgacaacatgaccaaccaggaggccagagagggcgccaccgccaccctgcactgcgagctgagcaaggtggcccccgtggagtggagaaagggccccgagaccctgagagacggcgacagacacagcctgagacaggacggcaccagatgcgagctgcagatcagaggcctgagcgtggccgacgccggcgagtacagctgcgtgtgcggccaggagagaaccagcgccaccctgaccatcagagaggccaccgagggcgccaccgccatgctgcagtgcgagctgagcaaggtggcccccgtggagtggagaaagggccccgagaccctgagagacggcgacagatacaacctgagacaggacggcaccagatgcgagctgcagatccacggcctgagcgtggccgacaccggcgagtacagctgcgtgtgcggccaggagaagaccagcgccaccctgaccgtgaaggccccccagcccgtgttcagagagcccctgcagagcctgcaggccgaggagggcagcaccgccaccctgcagtgcgagctgagcgagcccaccgccaccgtggtgtggagcaagggcggcctgcagctgcaggccaacggcagaagagagcccagactgcagggctgcaccgccgagctggtgctgcaggacctgcagagagaggacaccggcgagtacacctgcacctgcggcagccaggccaccagcgccaccctgaccgtgaccgccgcccccgtgagattcctgagagagctgcagcaccaggaggtggacgagggcggcaccgcccacctgtgctgcgagctgagcagagccggcgccagcgtggagtggagaaagggcagcctgcagctgttcccctgcgccaagtaccagatggtgcaggacggcgccgccgccgagctgctggtgagaggcgtggagcaggaggacgccggcgactacacctgcgacaccggccacacccagagcatggccagcctgagcgtgagagtgcccagacccaagttcaagaccagactgcagagcctggagcaggagaccggcgacatcgccagactgtgctgccagctgagcgacgccgagagcggcgccgtggtgcagtggctgaaggagggcgtggagctgcacgccggccccaagtacgagatgagaagccagggcgccaccagagagctgctgatccaccagctggaggccaaggacaccggcgagtacgcctgcgtgaccggcggccagaagaccgccgccagcctgagagtgaccgagcccgaggtgaccatcgtgagaggcctggtggacgccgaggtgaccgccgacgaggacgtggagttcagctgcgaggtgagcagagccggcgccaccggcgtgcagtggtgcctgcagggcctgcccctgcagagcaacgaggtgaccgaggtggccgtgagagacggcagaatccacaccctgagactgaagggcgtgacccccgaggacgccggcaccgtgagcttccacctgggcaaccacgccagcagcgcccagctgaccgtgagagcccccgaggtgaccatcctggagcccctgcaggacgtgcagctgagcgagggccaggacgccagcttccagtgcagactgagcagagccagcggccaggaggccagatgggccctgggcggcgtgcccctgcaggccaacgagatgaacgacatcaccgtggagcagggcaccctgcacctgctgaccctgcacaaggtgaccctggaggacgccggcaccgtgagcttccacgtgggcacctgcagcagcgaggcccagctgaaggtgaccgccaagaacaccgtggtgagaggcctggagaacgtggaggccctggagggcggcgaggccctgttcgagtgccagctgagccagcccgaggtggccgcccacacctggctgctggacgacgagcccgtgcacaccagcgagaacgccgaggtggtgttcttcgagaacggcctgagacacctgctgctgctgaagaacctgagaccccaggacagctgcagagtgaccttcctggccggcgacatggtgaccagcgccttcctgaccgtgagaggctggagactggagatcctggagcccctgaagaacgccgccgtgagagccggcgcccaggcctgcttcacctgcaccctgagcgaggccgtgcccgtgggcgaggccagctggtacatcaacggcgccgccgtgcagcccgacgacagcgactggaccgtgaccgccgacggcagccaccacgccctgctgctgagaagcgcccagccccaccacgccggcgaggtgaccttcgcctgcagagacgccgtggccagcgccagactgaccgtgctgggcctgcccgacccccccgaggacgccgaggtggtggccagaagcagccacaccgtgaccctgagctgggccgcccccatgagcgacggcggcggcggcctgtgcggctacagagtggaggtgaaggagggcgccaccggccagtggagactgtgccacgagctggtgcccggccccgagtgcgtggtggacggcctggcccccggcgagacctacagattcagagtggccgccgtgggccccgtgggcgccggcgagcccgtgcacctgccccagaccgtgagactggccgagccccccaagcccgtgcccccccagcccagcgcccccgagagcagacaggtggccgccggcgaggacgtgagcctggagctggaggtggtggccgaggccggcgaggtgatctggcacaagggcatggagagaatccagcccggcggcagattcgaggtggtgagccagggcagacagcagatgctggtgatcaagggcttcaccgccgaggaccagggcgagtaccactgcggcctggcccagggcagcatctgccccgccgccgccaccttccaggtggccctgagccccgccagcgtggacgaggccccccagcccagcctgccccccgaggccgcccaggagggcgacctgcacctgctgtgggaggccctggccagaaagagaagaatgagcagagagcccaccctggacagcatcagcgagctgcccgaggaggacggcagaagccagagactgccccaggaggccgaggaggtggcccccgacctgagcgagggctacagcaccgccgacgagctggccagaaccggcgacgccgacctgagccacaccagcagcgacgacgagagcagagccggcacccccagcctggtgacctacctgaagaaggccggcagacccggcaccagccccctggccagcaaggtgggcgcccccgccgcccccagcgtgaagccccagcagcagcaggagcccctggccgccgtgagaccccccctgggcgacctgagcaccaaggacctgggcgaccccagcatggacaaggccgccgtgaagatccaggccgccttcaagggctacaaggtgagaaaggagatgaagcagcaggagggccccatgttcagccacaccttcggcgacaccgaggcccaggtgggcgacgccctgagactggagtgcgtggtggccagcaaggccgacgtgagagccagatggctgaaggacggcgtggagctgaccgacggcagacaccaccacatcgaccagctgggcgacggcacctgcagcctgctgatcaccggcctggacagagccgacgccggctgctacacctgccaggtgagcaacaagttcggccaggtgacccacagcgcctgcgtggtggtgagcggcagcgagagcgaggccgagagcagcagcggcggcgagctggacgacgccttcagaagagccgccagaagactgcacagactgttcagaaccaagagccccgccgaggtgagcgacgaggagctgttcctgagcgccgacgagggccccgccgagcccgaggagcccgccgactggcagacctacagagaggacgagcacttcatctgcatcagattcgaggccctgaccgaggccagacaggccgtgaccagattccaggagatgttcgccaccctgggcatcggcgtggagatcaagctggtggagcagggccccagaagagtggagatgtgcatcagcaaggagacccccgcccccgtggtgccccccgagcccctgcccagcctgctgaccagcgacgccgcccccgtgttcctgaccgagctgcagaaccaggaggtgcaggacggctaccccgtgagcttcgactgcgtggtgaccggccagcccatgcccagcgtgagatggttcaaggacggcaagctgctggaggaggacgaccactacatgatcaacgaggaccagcagggcggccaccagctgatcatcaccgccgtggtgcccgccgacatgggcgtgtacagatgcctggccgagaacagcatgggcgtgagcagcaccaaggccgagctgagagtggacctgaccagcaccgactacgacaccgccgccgacgccaccgagagcagcagctacttcagcgcccagggctacctgagcagcagagagcaggagggcaccgagagcaccaccgacgagggccagctgccccaggtggtggaggagctgagagacctgcaggtggcccccggcaccagactggccaagttccagctgaaggtgaagggctaccccgcccccagactgtactggttcaaggacggccagcccctgaccgccagcgcccacatcagaatgaccgacaagaagatcctgcacaccctggagatcatcagcgtgaccagagaggacagcggccagtacgccgcctacatcagcaacgccatgggcgccgcctacagcagcgccagactgctggtgagaggccccgacgagcccgaggagaagcccgccagcgacgtgcacgagcagctggtgccccccagaatgctggagagattcacccccaagaaggtgaagaagggcagcagcatcaccttcagcgtgaaggtggagggcagacccgtgcccaccgtgcactggctgagagaggaggccgagagaggcgtgctgtggatcggccccgacacccccggctacaccgtggccagcagcgcccagcagcacagcctggtgctgctggacgtgggcagacagcaccagggcacctacacctgcatcgccagcaacgccgccggccaggccctgtgcagcgccagcctgcacgtgagcggcctgcccaaggtggaggagcaggagaaggtgaaggaggccctgatcagcaccttcctgcagggcaccacccaggccatcagcgcccagggcctggagaccgccagcttcgccgacctgggcggccagagaaaggaggagcccctggccgccaaggaggccctgggccacctgagcctggccgaggtgggcaccgaggagttcctgcagaagctgaccagccagatcaccgagatggtgagcgccaagatcacccaggccaagctgcaggtgcccggcggcgacagcgacgaggacagcaagacccccagcgccagccccagacacggcagaagcagacccagcagcagcatccaggagagcagcagcgagagcgaggacggcgacgccagaggcgagatcttcgacatctacgtggtgaccgccgactacctgcccctgggcgccgagcaggacgccatcaccctgagagagggccagtacgtggaggtgctggacgccgcccaccccctgagatggctggtgagaaccaagcccaccaagagcagccccagcagacagggctgggtgagccccgcctacctggacagaagactgaagctgagccccgagtggggcgccgccgaggcccccgagttccccggcgaggccgtgagcgaggacgagtacaaggccagactgagcagcgtgatccaggagctgctgagcagcgagcaggccttcgtggaggagctgcagttcctgcagagccaccacctgcagcacctggagagatgcccccacgtgcccatcgccgtggccggccagaaggccgtgatcttcagaaacgtgagagacatcggcagattccacagcagcttcctgcaggagctgcagcagtgcgacaccgacgacgacgtggccatgtgcttcatcaagaaccaggccgccttcgagcagtacctggagttcctggtgggcagagtgcaggccgagagcgtggtggtgagcaccgccatccaggagttctacaagaagtacgccgaggaggccctgctggccggcgaccccagccagcccccccccccccccctgcagcactacctggagcagcccgtggagagagtgcagagataccaggccctgctgaaggagctgatcagaaacaaggccagaaacagacagaactgcgccctgctggagcaggcctacgccgtggtgagcgccctgccccagagagccgagaacaagctgcacgtgagcctgatggagaactaccccggcaccctgcaggccctgggcgagcccatcagacagggccacttcatcgtgtgggagggcgcccccggcgccagaatgccctggaagggccacaacagacacgtgttcctgttcagaaaccacctggtgatctgcaagcccagaagagacagcagaaccgacaccgtgagctacgtgttcagaaacatgatgaagctgagcagcatcgacctgaacgaccaggtggagggcgacgacagagccttcgaggtgtggcaggagagagaggacagcgtgagaaagtacctgctgcaggccagaaccgccatcatcaagagcagctgggtgaaggagatctgcggcatccagcagagactggccctgcccgtgtggagaccccccgacttcgaggaggagctggccgactgcaccgccgagctgggcgagaccgtgaagctggcctgcagagtgaccggcacccccaagcccgtgatcagctggtacaaggacggcaaggccgtgcaggtggacccccaccacatcctgatcgaggaccccgacggcagctgcgccctgatcctggacagcctgaccggcgtggacagcggccagtacatgtgcttcgccgccagcgccgccggcaactgcagcaccctgggcaagatcctggtgcaggtgccccccagattcgtgaacaaggtgagagccagccccttcgtggagggcgaggacgcccagttcacctgcaccatcgagggcgccccctacccccagatcagatggtacaaggacggcgccctgctgaccaccggcaacaagttccagaccctgagcgagcccagaagcggcctgctggtgctggtgatcagagccgccagcaaggaggacctgggcctgtacgagtgcgagctggtgaacagactgggcagcgccagagccagcgccgagctgagaatccagagccccatgctgcaggcccaggagcagtgccacagagagcagctggtggccgccgtggaggacaccaccctggagagagccgaccaggaggtgaccagcgtgctgaagagactgctgggccccaaggcccccggccccagcaccggcgacctgaccggccccggcccctgccccagaggcgcccccgccctgcaggagaccggcagccagccccccgtgaccggcaccagcgaggcccccgccgtgccccccagagtgccccagcccctgctgcacgagggccccgagcaggagcccgaggccatcgccagagcccaggagtggaccgtgcccatcagaatggagggcgccgcctggcccggcgccggcaccggcgagctgctgtgggacgtgcacagccacgtggtgagagagaccacccagagaacctacacctaccaggccatcgacacccacaccgccagaccccccagcatgcaggtgaccatcgaggacgtgcaggcccagaccggcggcaccgcccagttcgaggccatcatcgagggcgacccccagcccagcgtgacctggtacaaggacagcgtgcagctggtggacagcaccagactgagccagcagcaggagggcaccacctacagcctggtgctgagacacgtggccagcaaggacgccggcgtgtacacctgcctggcccagaacaccggcggccaggtgctgtgcaaggccgagctgctggtgctgggcggcgacaacgagcccgacagcgagaagcagagccacagaagaaagctgcacagcttctacgaggtgaaggaggagatcggcagaggcgtgttcggcttcgtgaagagagtgcagcacaagggcaacaagatcctgtgcgccgccaagttcatccccctgagaagcagaaccagagcccaggcctacagagagagagacatcctggccgccctgagccaccccctggtgaccggcctgctggaccagttcgagaccagaaagaccctgatcctgatcctggagctgtgcagcagcgaggagctgctggacagactgtacagaaagggcgtggtgaccgaggccgaggtgaaggtgtacatccagcagctggtggagggcctgcactacctgcacagccacggcgtgctgcacctggacatcaagcccagcaacatcctgatggtgcaccccgccagagaggacatcaagatctgcgacttcggcttcgcccagaacatcacccccgccgagctgcagttcagccagtacggcagccccgagttcgtgagccccgagatcatccagcagaaccccgtgagcgaggccagcgacatctgggccatgggcgtgatcagctacctgagcctgacctgcagcagccccttcgccggcgagagcgacagagccaccctgctgaacgtgctggagggcagagtgagctggagcagccccatggccgcccacctgagcgaggacgccaaggacttcatcaaggccaccctgcagagagccccccaggccagacccagcgccgcccagtgcctgagccacccctggttcctgaagagcatgcccgccgaggaggcccacttcatcaacaccaagcagctgaagttcctgctggccagaagcagatggcagagaagcctgatgagctacaagagcatcctggtgatgagaagcatccccgagctgctgagaggcccccccgacagccccagcctgggcgtggccagacacctgtgcagagacaccggcggcagcagcagcagcagcagcagcagcgacaacgagctggcccccttcgccagagccaagagcctgccccccagccccgtgacccacagccccctgctgcaccccagaggcttcctgagacccagcgccagcctgcccgaggaggccgaggccagcgagagaagcaccgaggcccccgccccccccgccagccccgagggcgccggcccccccgccgcccagggctgcgtgcccagacacagcgtgatcagaagcctgttctaccaccaggccggcgagagccccgagcacggcgccctggcccccggcagcagaagacaccccgccagaagaagacacctgctgaagggcggctacatcgccggcgccctgcccggcctgagagagcccctgatggagcacagagtgctggaggaggaggccgccagagaggagcaggccaccctgctggccaaggcccccagcttcgagaccgccctgagactgcccgccagcggcacccacctggcccccggccacagccacagcctggagcacgacagccccagcacccccagacccagcagcgaggcctgcggcgaggcccagagactgcccagcgcccccagcggcggcgcccccatcagagacatgggccacccccagggcagcaagcagctgcccagcaccggcggccaccccggcaccgcccagcccgagagacccagccccgacagcccctggggccagcccgcccccttctgccaccccaagcagggcagcgccccccaggagggctgcagcccccaccccgccgtggccccctgcccccccggcagcttcccccccggcagctgcaaggaggcccccctggtgcccagcagccccttcctgggccagccccaggccccccccgcccccgccaaggccagcccccccctggacagcaagatgggccccggcgacatcagcctgcccggcagacccaagcccggcccctgcagcagccccggcagcgccagccaggccagcagcagccaggtgagcagcctgagagtgggcagcagccaggtgggcaccgagcccggccccagcctggacgccgagggctggacccaggaggccgaggacctgagcgacagcacccccaccctgcagagaccccaggagcaggccaccatgagaaagttcagcctgggcggcagaggcggctacgccggcgtggccggctacggcaccttcgccttcggcggcgacgccggcggcatgctgggccagggccccatgtgggccagaatcgcctgggccgtgagccagagcgaggaggaggagcaggaggaggccagagccgagagccagagcgaggagcagcaggaggccagagccgagagccccctgccccaggtgagcgccagacccgtgcccgaggtgggcagagcccccaccagaagcagccccgagcccaccccctgggaggacatcggccaggtgagcctggtgcagatcagagacctgagcggcgacgccgaggccgccgacaccatcagcctggacatcagcgaggtggaccccgcctacctgaacctgagcgacctgtacgacatcaagtacctgcccttcgagttcatgatcttcagaaaggtgcccaagagcgcccagcccgagccccccagccccatggccgaggaggagctggccgagttccccgagcccacctggccctggcccggcgagctgggcccccacgccggcctggagatcaccgaggagagcgaggacgtggacgccctgctggccgaggccgccgtgggcagaaagagaaagtggagcagccccagcagaagcctgttccacttccccggcagacacctgcccctggacgagcccgccgagctgggcctgagagagagagtgaaggccagcgtggagcacatcagcagaatcctgaagggcagacccgagggcctggagaaggagggcccccccagaaagaagcccggcctggccagcttcagactgagcggcctgaagagctgggacagagcccccaccttcctgagagagctgagcgacgagaccgtggtgctgggccagagcgtgaccctggcctgccaggtgagcgcccagcccgccgcccaggccacctggagcaaggacggcgcccccctggagagcagcagcagagtgctgatcagcgccaccctgaagaacttccagctgctgaccatcctggtggtggtggccgaggacctgggcgtgtacacctgcagcgtgagcaacgccctgggcaccgtgaccaccaccggcgtgctgagaaaggccgagagacccagcagcagcccctgccccgacatcggcgaggtgtacgccgacggcgtgctgctggtgtggaagcccgtggagagctacggccccgtgacctacatcgtgcagtgcagcctggagggcggcagctggaccaccctggccagcgacatcttcgactgctgctacctgaccagcaagctgagcagaggcggcacctacaccttcagaaccgcctgcgtgagcaaggccggcatgggcccctacagcagccccagcgagcaggtgctgctgggcggccccagccacctggccagcgaggaggagagccagggcagaagcgcccagcccctgcccagcaccaagaccttcgccttccagacccagatccagagaggcagattcagcgtggtgagacagtgctgggagaaggccagcggcagagccctggccgccaagatcatcccctaccaccccaaggacaagaccgccgtgctgagagagtacgaggccctgaagggcctgagacacccccacctggcccagctgcacgccgcctacctgagccccagacacctggtgctgatcctggagctgtgcagcggccccgagctgctgccctgcctggccgagagagccagctacagcgagagcgaggtgaaggactacctgtggcagatgctgagcgccacccagtacctgcacaaccagcacatcctgcacctggacctgagaagcgagaacatgatcatcaccgagtacaacctgctgaaggtggtggacctgggcaacgcccagagcctgagccaggagaaggtgctgcccagcgacaagttcaaggactacctggagaccatggcccccgagctgctggagggccagggcgccgtgccccagaccgacatctgggccatcggcgtgaccgccttcatcatgctgagcgccgagtaccccgtgagcagcgagggcgccagagacctgcagagaggcctgagaaagggcctggtgagactgagcagatgctacgccggcctgagcggcggcgccgtggccttcctgagaagcaccctgtgcgcccagccctggggcagaccctgcgccagcagctgcctgcagtgcccctggctgaccgaggagggccccgcctgcagcagacccgcccccgtgaccttccccaccgccagactgagagtgttcgtgagaaacagagagaagagaagagccctgctgtacaagagacacaacctggcccaggtgagatag

SEQ ID NO: 286281 - DNA, 16809 bp, Artificial Sequence
  derived and/or modified sequence
atgttagtgatacgcggagccagcttgaaggatgccggagagtacacatgcgaggtcgaggcaagcaagagcactgctagccttcacgttgaggaaaaggctaactgtttcaccgaggagctgactaatctgcaggttgaagaaaaaggcaccgctgtgtttacctgtaaaaccgaacaccccgcggctactgtcacctggagaaaggggctgctggaattgcgtgcttcgggtaaacatcaacccagccaagaaggcctgacactgcggttaaccatcagtgcgctggagaaggccgattctgatacatacacctgcgacattggccaggcacaaagcagggcccaactgttggtgcaggggcgtcgggttcacatcatcgaggacctagaagatgtggatgtccaggagggatcttcggcaacattcaggtgcagaatcagcccagcaaattatgagcccgtgcattggtttctggacaagacacccctgcacgctaatgagttgaacgagatcgacgcacagccaggtggatatcacgttctgaccctgcgccagctggcactgaaggacagcggaacgatttattttgaggccggcgaccagcgggcgtctgccgccctgcgagttactgagaagcccagcgtgttttccagagagctgacagacgctacgattaccgagggtgaagacctgactctagtgtgtgaaacctcgacctgcgacatccccgtctgctggaccaaagatggtaaaactcttagaggcagcgcccgctgtcaactatctcatgagggccatagggctcaactgctgatcaccggagccactcttcaggactcaggccgttataaatgcgaagctggcggggcttgctcaagctccattgtgcgggtacacgcacgacccgtacgatttcaggaagccttgaaagacctcgaggtgctggaggggggagccgccaccttaaggtgtgtgctgagttccgtggccgcgccagtgaaatggtgttacggcaacaatgtgcttaggccaggggacaagtactcgcttcgccaggagggagctatgctggagctggttgtcaggaatcttagaccgcaggatagtggtcgttactcttgtagcttcggggaccagaccacttccgccacgttaactgtgacagcgctgcctgcacagtttatcggaaaactcaggaacaaagaagccaccgagggagcaaccgccactctgaggtgcgagctgtccaaggctgcaccagtggaatggaggaagggaagcgaaactctaagggacggtgatagatattgcttaaggcaggatggcgctatgtgtgagctacagatccggggtcttgccatggtggacgccgcggaatattcttgtgtttgtggtgaagaaaggacctccgcctccttaacaatcaggcccatgcccgcgcactttattggaagacttagacaccaggagtcaattgagggtgctacggctacgttgagatgcgagctgtccaaggccgcccccgtggagtggagaaaaggaagggagtctctgcgcgatggtgatcgccacagtctccgccaggatggcgcagtctgcgagcttcaaatttgtgggctggcagtggcagatgccggagagtattcatgtgtctgtggggaggagagaacatccgcaactctgacagtgaaagccctcccagcaaaatttacagagggccttcgcaacgaggaggcggtggagggggccactgctatgctatggtgcgaactttctaaggtagcccccgttgagtggaggaaaggtcccgaaaacctgcgagacggtgatagatacatcctgaggcaagagggaactaggtgtgaactacaaatctgcggacttgcaatggctgatgctggggaatacctatgtgtctgtgggcaagagcgcactagcgcaactcttacaattagggccctgcccgcccggtttatcgaggatgtgaagaaccaggaggcccgagagggcgctaccgccgtgctgcagtgtgagctgaacagtgccgcccccgtggagtggcgaaaagggagcgaaactctccgggatggagaccgctattcgttgagacaggacgggaccaagtgcgaattacaaatccgcggtctggcaatggcagacacaggcgagtatagctgcgtttgtggtcaggaacgcacttctgctatgctcactgttagagcgttacccattaagtttacagaaggacttagaaacgaggaagccaccgagggcgccacggccgtactcaggtgcgagctctcgaagatggctcctgtggaatggtggaaggggcatgagacccttagagatggcgatcgccactcccttcggcaggacggtgctcgctgtgagcttcagattaggggccttgtggctgaagatgcgggggagtacctttgcatgtgtggaaaagaacgtacctcggctatgctaactgtcagggctatgccttctaagttcatcgagggcctccgcaacgaagaagcgaccgagggtgacacagccactctgtggtgcgaactgtctaaggccgcgccagttgagtggcgcaagggccacgaaacattgagggacggagatcggcatagtctgcggcaggacgggtcccgttgcgagctgcaaatcagaggccttgctgtggtggacgcaggcgagtactcctgtgtttgcggacaggagaggactagcgctacactgacggtgagagctttaccagccaggtttatagaggacgtgaaaaaccaagaagcacgcgaaggtgcgaccgccgtccttcaatgtgaactgagcaaagccgctcctgtggaatggaggaaaggctcagagacgctgaggggcggagacagatattctctgagacaagacgggaccaggtgcgaattgcagattcacggccttagcgtcgctgacactggtgaatattcctgtgtgtgcggccaggaaaggacttccgccacgcttactgtcagggcgttacctgcgcgctttacccaggacttaaagaccaaagaagcatcggagggtgctacagctacactgcagtgtgaattgagcaaagtggcccctgtagagtggaaaaaaggacctgaaacactgagggacggtggtaggtattcgctgaagcaggatggtactcggtgcgagctgcagatccacgacctctccgtcgctgatgcgggcgagtactcttgtatgtgcgggcaggagcggacaagtgcgaccctaacagtgcgagcccttccggctcgctttaccgagggcctgcggaatgaagaagcaatggagggtgccaccgcaacgctgcagtgcgagctcagcaaagcagcccccgtcgagtggagaaagggattagaagctctcagggacggggataaatactctctgcggcaggatggcgcagtctgcgagctacaaatccacggcctcgcaatggctgataacggagtctattcttgcgtgtgcggccaggagcgaactagcgccaccctgaccgtgcgcgctctgcccgctcggttcattgaagatatgcggaatcagaaggcaaccgagggagccacagtgacgctccagtgtaaactgagaaaggccgcacccgtcgaatggaggaaagggccaaacaccctaaaggatggcgacaggtactctctgaaacaagacggaaccagctgcgagttgcaaattagaggcctggttatcgccgatgctggagaatactcctgtatttgtgaacaggaacgcacgagcgcaacattgactgtgagggctctccccgcacgcttcatagaggatgtgcgcaaccacgaggctactgaaggagcgactgccgtcctccagtgcgagctcagcaaggcagctccagtcgaatggcggaagggctctgagaccttacgcgatggcgaccgctactcactacgtcaggacggcacaagatgcgaactgcaaatccgcggccttgcagtggaagacactggcgaatacttatgcgtatgcggacaggagcgtacctcagctacgttaactgtgagagccctacctgcccgcttcatagacaacatgacgaatcaggaagcccgggaaggagccactgcaacattgcattgtgagttgtccaaagtggcgcctgtagagtggagaaaaggaccagaaaccttgagggatggcgatagacatagcctgaggcaggacggcacgcgctgcgagttacagatcaggggcctaagcgtcgcagacgccggtgaatacagctgcgtttgtggtcaggaacggacctcagcgactctgaccatcagagaagctaccgaaggagccacagccatgctgcaatgcgagctgtccaaggtggctccagtggagtggcggaaaggaccggagacactgagggacggtgaccgctataatttgaggcaggatggcacacgctgtgaactccagattcacggtttgtcagttgcagatacgggcgagtactcttgcgtctgcggacaagaaaagaccagcgcaactctgactgttaaagccccccagcccgtttttcgggaaccactccagtccttacaagccgaggagggttctaccgctacgttgcaatgcgaacttagcgagcctaccgctacagtggtctggagtaaaggcgggctccagctgcaggccaacgggcgcagagagccacgactgcagggctgtaccgctgaacttgtgcttcaagacctgcaacgggaggatactggcgaatacacttgcacctgcgggagtcaggcgacttccgcaactctgaccgttacagccgctcctgtgcggtttctgcgcgaactccagcaccaagaagtggatgaaggtgggacagctcacctttgttgcgagctttcgagggcaggcgcatccgtcgagtggcgaaaaggctccctgcaactcttcccatgcgccaagtaccagatggtgcaagacggtgcagcagccgaactcctggtgcgcggggtcgagcaggaagacgccggtgattacacctgtgatacaggacatacacaaagcatggcatctctgtctgtcagagtcccacgacctaagttcaagacacggctccagtcactggagcaggagacaggtgatattgccaggctgtgctgccaactctccgacgccgaatccggcgccgtcgtgcagtggctcaaagaaggagtggagctgcacgccggtcccaagtatgagatgcgatctcaaggtgccactagagagcttctgatccatcagcttgaagctaaagatacaggagaatacgcatgcgtcactggagggcaaaagaccgccgcgagccttcgcgtgactgaacccgaagtgactatagtgagaggtctcgtggacgctgaggttactgctgacgaggacgtcgaattcagctgcgaggtttccagagccggggccacaggcgtacagtggtgcctgcaagggctgcccttgcaaagcaatgaagttactgaggtcgccgtccgggacggtaggatacacactctgcggttgaagggagtgacccccgaagatgctgggactgtctcttttcatctgggcaaccatgcatcctccgcacaactcaccgtccgagctcccgaggtgactatcttggaacccctgcaagatgtgcaactctccgaaggacaggacgctagctttcagtgtagactgagtagggcctctggacaagaggcaagatgggccttgggaggtgtacctctgcaagcaaatgaaatgaacgatatcactgtggagcagggtaccttgcacctcctcacactgcataaagtgacgttggaagatgcaggcactgtgagtttccatgtaggaacgtgttcctcagaagctcagttgaaggtgactgccaaaaacaccgtagtgagaggacttgagaatgtggaggctctggaaggtggcgaggccctcttcgagtgtcagcttagtcagcccgaggtggctgctcatacctggttactggacgatgagccagtccatacgtccgagaacgccgaggtggtgttttttgaaaacggtctgcgccacctcctccttctcaagaacctgcggcctcaggacagctgtcgggtcacttttctcgctggagatatggttacatcagcctttctcacagtcaggggatggcggctggaaattctagaacccctcaaaaacgctgccgtgcgagccggggcccaggcctgtttcacatgcacgctgtccgaggctgtcccagtaggggaagccagctggtatattaacggcgcagcggtgcagcctgacgatagcgattggactgtgaccgcagacggctctcatcatgcccttctgttgcggagcgcacagcctcatcatgcaggtgaagtgacattcgcctgtcgggacgccgtcgctagcgcccgtctcaccgtcttagggcttccagaccctccagaagacgccgaagtcgtcgcccgcagcagccataccgtcacactctcatgggcagcaccaatgtctgatgggggcggtggtttatgcggttatagagtggaggtgaaggagggagccaccggccagtggcgcctttgccacgagttggtgcctggtccagagtgtgtggtcgatgggctcgcacccggggagacatatagatttcgcgttgccgctgtggggcccgttggcgctggcgagccagtacacctgccccagacagtgcgtttggctgagccacctaaaccagtgcccccacagccgtctgcccctgagagccggcaagtggctgcgggagaagacgtgtccctcgagctggaggtggttgccgaggcaggcgaggtcatctggcacaaggggatggaacggatccaacccggcggacggtttgaggtggttagccagggccgacagcaaatgctcgtgattaagggtttcacagccgaggaccagggggaatatcactgtggtctagcgcagggcagcatctgtccagcagccgccactttccaggtcgccctctcgcctgcgagtgtggatgaggctccccagcctagtctgccgcccgaggcagcgcaggagggagatctgcacctgctgtgggaagctctggcacgcaagcggagaatgtcccgcgaacctacactggactctattagcgaactgccggaggaagatggccgttctcagcgcttaccccaggaagccgaggaggtggctcctgacctcagtgaaggatattccaccgcagatgaactcgcccgcacgggtgacgcagatctatcacatacaagcagtgacgacgaatctagagccggtaccccaagcctggtgacgtatttaaagaaggccggtcgtcccggcacatccccactagctagcaaggtgggcgcgcctgcagcaccgtccgtaaagccgcagcaacagcaggagcctctcgcggctgtcaggccgcccttgggagacctgtctaccaaagatttgggcgacccaagcatggataaggcagctgtgaagatccaggctgcgtttaagggctataaagtcagaaaagagatgaagcaacaggagggccctatgttctcccacacattcggcgacacagaagctcaggtcggagatgctctccgactggaatgcgttgtcgcttccaaagctgacgtccgggcacgatggttaaaggatggagtggaactgactgatgggcgacaccaccatattgatcagctcggcgacggaacctgctctctgttgatcacaggactggaccgcgcggacgcaggatgctatacatgtcaggtgtcgaacaagtttggccaagtaacacacagtgcttgcgttgtcgtttccgggagtgagtctgaggctgagtcctcatccggaggcgagctggatgacgcatttagaagagcggcccgtaggctccataggttgtttagaacaaagtccccggctgaggtgagcgacgaggagcttttcctgagcgcggatgaggggcccgccgagcctgaggagcctgccgactggcaaacatacagagaagatgagcattttatctgtatcagatttgaggccttgaccgaggcccgccaggccgtgacccgatttcaggaaatgtttgctacgcttggaattggggtagaaatcaagctggtggaacagggaccgcgcagggtcgaaatgtgcatttcgaaagaaactccagcgcccgttgtgcctccagaacccctccccagtttgctgacctccgatgcggccccagtgtttctgaccgaactccagaaccaagaagttcaggatggctacccagtaagtttcgactgtgtggtgaccggccagccgatgccttcagtcaggtggttcaaggatgggaagctgcttgaagaggatgatcactatatgatcaatgaagatcagcagggtggccatcagctgatcatcacagcagtagtccccgccgatatgggtgtctacagatgtctggccgagaactctatgggagtctcaagcacaaaggcagagctcagggtggacctcacgtcaactgactatgacacagccgctgacgcgaccgagagttcctcctacttcagcgctcaaggttatctatcatcgcgggaacaagagggaaccgagagcacaactgatgaggggcaactgccacaggtggtcgaagaactcagagacttgcaggtggcacctggcacgcgactggcaaaatttcagctcaaggtgaaaggatatcctgctcccagactgtactggtttaaagacggtcagccactcacagccagcgcgcatattcggatgactgacaaaaagattttgcatacgctggagattatctctgtgacccgcgaagacagtgggcagtacgctgcctacattagtaacgccatgggagccgcatactcctctgcccgtctccttgtccgtggaccagatgagcccgaggaaaagcctgccagtgacgttcatgagcagttggtccccccaaggatgctggaacggtttactcccaaaaaggtgaagaaaggaagttccattacgttttcagtgaaagtggagggccgccccgttcccaccgtccattggcttcgagaagaggccgaaaggggtgtactatggatcgggccagatacccctggatatacagtggcatcctccgcgcagcagcattctcttgttctgcttgacgtcggtcgacagcaccagggcacatatacctgtatcgcaagcaacgccgccggccaagctctgtgtagcgcgagcctgcatgtctctgggcttcccaaggttgaggagcaagagaaggtaaaagaagcactgattagcacatttctgcaggggacaactcaggctatcagcgcgcagggactagaaaccgcatcattcgctgatcttggcgggcaacggaaggaggagcctttagctgcaaaggaggccttggggcatcttagcttggccgaagttggtactgaagaattcctgcaaaaactgacctctcagatcaccgagatggtttccgctaaaatcactcaggccaaactccaggttcccggcggggattctgatgaagactctaaaaccccctctgcctccccccgccatggccgctcccgcccaagctcctcaatccaggaaagctcttccgaatctgaagatggagacgctagaggggagatatttgacatttacgtcgtaacagccgactacctccctcttggtgctgaacaggacgcaatcacactacgtgagggtcagtatgtcgaggttctggatgctgcacatcctctcagatggctggtgcggaccaagccgactaagagctcgccatccagacaaggatgggtcagcccagcttacctcgatcgtcgattgaaactttcacctgaatggggagccgccgaagctccagagtttcccggagaggcggtatccgaagacgaatacaaagcccggttgtcctctgtcatccaagagctgctgagttccgagcaggcgtttgtcgaagagctgcagttcctacagtctcatcacctccagcacctcgagcggtgtccacacgttccaatcgcggttgccgggcagaaggctgtgatcttcagaaatgtgcgcgatattgggcgattccattcttccttccttcaagagttacagcagtgtgacaccgacgacgacgtggcaatgtgcttcatcaaaaaccaggccgccttcgaacagtacttggagtttctggtcggaagggtgcaggccgagtcagtggttgtttctacagcaatccaggagttctacaaaaagtacgccgaggaagccctgctcgccggagatccttcccagcccccacctccacccttgcaacattatctggagcagccggttgagcgtgtccagcggtatcaggccttgctgaaagagctgattcggaacaaggccaggaaccggcagaattgcgcactgttagagcaagcgtacgcagtggttagcgctttacctcaaagagcagaaaacaaactgcacgtcagcctgatggaaaactatcccggaacactccaggccctcggggagcccatcagacagggccatttcatcgtgtgggagggagcccctggggccagaatgccttggaagggacacaaccgccacgtgtttctctttaggaaccaccttgtcatttgtaagccccgccgcgactctaggactgacacagtgagctacgtgtttcgcaacatgatgaaactgagctcgattgatctgaatgatcaagtggaaggggacgaccgagcttttgaagtgtggcaggaaagggaagactccgttagaaagtaccttttgcaagccaggaccgccattataaaatcaagttgggtgaaggagatttgtggaatccaacaaagactggcactccccgtgtggcggccgccagacttcgaggaagaacttgctgactgcacagcagagctgggagagactgttaagttggcatgccgggtgaccggcacccccaagcccgtcatctcatggtacaaggacggtaaagccgtacaggtagaccctcatcacattctcatcgaggatcctgatggtagctgcgccctgattttggattccctcaccggcgtggatagcgggcaatatatgtgtttcgccgcatcggctgccggtaactgtagtactctggggaagattcttgtgcaagtgccccctaggtttgtgaacaaagtgagggcatcacccttcgtcgagggcgaggacgcccagttcacttgtaccatcgagggagctccataccctcagatcaggtggtacaaggatggtgccctgctcactacggggaacaagtttcagacgcttagtgagccacggtcgggcttactggtgctggtcatacgggccgcaagtaaagaagaccttgggctgtatgaatgtgaactggtgaacaggctgggcagcgcccgggcatctgctgaattgagaatccagtcccctatgctccaggcgcaagagcaatgccacagagagcaactagtggccgcagttgaggataccacccttgagagggccgaccaggaagtaacttccgtgctgaaaaggttacttgggccaaaggcacccgggcctagcacaggggatctgactgggcccggaccgtgtccacgcggcgcacccgctctgcaggagacaggcagtcagccccccgtgactggaacctcggaagcaccagctgtcccacccagggtcccacagcccttgctgcatgaaggccccgagcaagagccagaggcaatcgcaagggcccaagaatggacggtccccatccgcatggaaggtgctgcttggcccggcgccggcaccggcgagctcctgtgggacgtccactctcatgtagttagggaaaccacccagcgcacctacacatatcaggccatagacactcacaccgcgcgaccgccttcgatgcaggtgaccattgaggatgtgcaggctcaaactggcgggacagcccagttcgaggctataatagagggagatccacagccgagcgtgacctggtacaaggattccgtacagcttgttgattcaaccagactaagccaacagcaggagggaaccacttacagcctcgtgctcaggcacgtggcttcaaaggacgctggggtatacacctgtctcgctcagaatacggggggccaggtgttgtgcaaagcagaactgctggtcctcgggggggataacgagcccgacagcgagaagcagagccaccggcggaaactgcatagcttctacgaagtcaaagaggagattggtcggggggtattcggatttgttaagcgggtgcagcataagggaaataagattctctgcgctgccaaatttatcccactgagatcacgcacccgcgcccaggcctacagagaacgcgacattctggctgccttgtcccatcccctcgtgacaggactcctggatcagtttgagacaagaaagaccttaatcctcattttggagctttgctctagcgaggagcttttagatagactgtatcgcaagggcgttgttacagaggcagaggtgaaagtttatatccagcaactagtggagggattacattatcttcacagccacggcgtgttacatttagacattaagccttccaatatcttgatggtgcaccccgctagggaggatatcaagatatgcgacttcgggtttgctcagaacataactcctgccgagctgcagttcagccagtacggaagtcccgagtttgtttcccccgagatcatccagcagaaccccgtatccgaggcgtcggacatctgggctatgggtgttatatcttacctgtcactcacatgtagtagcccctttgcaggcgagagcgatagggccacccttctgaatgttttggaagggcgggtctcctggagctcccctatggctgcgcacctctctgaggacgccaaagattttattaaagccacactgcagcgagcaccccaagcacgcccctcagccgctcagtgtttgtcccacccctggttcctcaaatcgatgcccgcagaggaggcccacttcatcaacactaaacaattaaaattccttctcgccagatcaagatggcagagatccttaatgagctacaagtctatactcgtgatgagatctattcctgaactcctgagaggcccaccggatagcccgtcattgggggtcgcgcgacatttgtgtagagacactggagggtccagctccagtagcagctcatccgacaatgagttggctccattcgcacgggcaaagtccttgcctccttcccctgtaacccactccccactgcttcatccccgaggctttctgaggccttcagcgagtcttccagaggaagccgaagcatccgaaaggtcaaccgaggcccccgcacccccagcatcccctgagggcgcaggccctcctgcggcccagggctgtgtgccccgacactccgtgattagatccctgttctatcatcaagcaggagagagtcccgaacacggtgccctcgcacccgggtcacgcaggcatcctgccagaagaaggcatctcttaaaggggggttacatcgctggagccctgcctggcctgagggagcctcttatggagcaccgagtgttggaggaagaggccgcccgtgaggaacaggctacgcttctagccaaagccccttcttttgagaccgcactgcgcttaccagctagtggaactcacctcgctcccggacactcccactcacttgaacatgactccccgtctaccccacggccctctagtgaggcctgtggggaagcacagcgcctgccttctgccccatcaggcggtgcgcctatcagggatatgggtcatccgcagggatctaaacagctgccaagcacaggcggccatcccggcaccgctcagcccgaacggccttctccagattccccctggggacagcctgcccccttttgccatcccaagcaaggaagtgccccgcaagaaggatgcagtccccatccggccgttgctccttgtcctccaggctcctttcctcctggctcctgtaaagaagcgccactggtcccttcctccccctttcttggtcagccacaggccccacccgctcctgctaaggcctccccccccctggattccaaaatgggcccaggagacatttctctaccagggagaccaaaacccggcccgtgctcgtctccagggtctgcatcacaggcctcttctagccaggttagttcgctgagggttggatcttcccaagtgggaacggagcctggcccttccctcgatgctgaggggtggactcaggaagccgaagatttatccgattctacgcctaccctacagagacctcaggaacaggccaccatgcggaaatttagcctcggggggcgaggggggtacgccggcgtagccggctacggcacgtttgcttttgggggtgatgccggagggatgttgggccaggggccgatgtgggctcgcatagcttgggcagtcagccaaagcgaggaagaggagcaggaggaagctagggccgaaagccagagtgaagagcagcaggaggccagagctgagtctcccctgcctcaggtctccgccaggcccgttccagaggttggccgtgcccccacgagatcctctcctgagcctacaccctgggaggacatcggacaagtgtccctcgttcagatccgagatctctcaggggacgctgaagccgccgatacgatctcacttgatatctctgaagtcgaccctgcctatcttaacctgtctgatctgtatgacattaaatacttgccatttgaatttatgatatttcgcaaggttccaaaatcagctcaaccagagccgccaagccctatggcggaagaggagctggcagagttccccgagccaacttggccatggcctggggagctgggcccgcatgctggcctcgaaatcacagaggagtcagaggacgtggacgccctgttggctgaggccgccgtgggtagaaaaaggaagtggagcagcccatcaaggtccctgtttcacttccccggtagacacctccccctcgacgagccagccgaactcggacttagggaacgagtgaaagcatccgtagaacacatctcacgcattttaaaaggccgcccagaaggcctggagaaggaaggcccaccacgaaagaaaccgggtctagcttcattcagactgtccggtcttaaaagttgggacagggcccctaccttccttagagagttgtcagatgaaacggttgtgctaggacagtctgtgacccttgcctgtcaggtgtcagcacagcccgctgctcaggcaacttggtctaaggacggcgccccccttgagtctagcagcagggtcttgatatccgccacactcaaaaattttcagttgcttacaattcttgttgtggtggcggaagatctgggagtgtacacatgctctgtgagcaatgccttggggacagtaaccaccaccggtgtgctgagaaaggccgaacgaccaagctcttccccctgtccggatataggagaggtatacgccgatggagtcctgcttgtatggaagcccgttgagtcgtatggccctgttacatatattgtgcagtgtagcttggagggcggatcttggaccactcttgcttcagatatcttcgactgttgttacctgacctctaaactcagtagagggggaacttacaccttcaggaccgcgtgtgtgagtaaggctggcatggggccatattcctcacccagtgagcaagtgctgttgggcggtccctctcacttggcaagcgaagaagagtctcagggaaggtcggcccagccgctgccatctacaaagacattcgcattccagacacagatccagcgcgggcgcttctccgtggtccggcagtgttgggaaaaggcatctggccgagccctcgccgccaaaatcatcccttaccaccccaaagacaaaactgctgtgctcagggaatatgaggccctgaaagggctacgacatccccatctggcccagctccatgcggcatacttaagtccccggcacctagtcctgatcctggaactgtgttccggtccagaactgctcccctgccttgccgagcgggctagctacagcgaaagcgaagttaaagattacctttggcagatgctaagcgctacccagtacctgcataaccagcacatcctgcacctggacctgcggtccgagaatatgatcataacggagtacaatctgctgaaagtcgtagatttgggcaacgcccagtcgctcagtcaggagaaagtgcttccaagcgacaaattcaaggattacttagaaaccatggcccccgaacttcttgagggacagggtgccgtccctcaaaccgatatctgggctatcggagtgacagcctttatcatgctatctgcggagtacccagtgagtagtgagggtgcaagggacctacagcgtggactcaggaaagggctcgttaggttgtctaggtgttacgctggtttgagcgggggagcggttgcctttcttcgctctacgctgtgcgctcagccctggggacgcccctgtgcctccagctgcctgcagtgtccctggctgactgaagaagggcctgcctgttcgcgacctgctcccgttacatttcccacagcccggctgcgcgtatttgttaggaaccgagagaagcggagggctctactgtataagcgccacaatctcgctcaggtgcgatag

SEQ ID NO: 286282 - DNA, 16809 bp, Artificial Sequence
  derived and/or modified sequence
atgctggtgatccggggggccagcctgaaggatgctggggagtacacctgtgaggtggaggccagcaagagcacagccagcctgcacgtggaggagaaggccaactgcttcacagaggagctgaccaacctgcaggtggaggagaagggcacagctgtgttcacctgcaagacagagcaccctgctgccaccgtgacctggaggaagggcctgctggagctgcgggccagcggcaagcaccagcccagccaggagggcctgaccctgcggctgaccatcagcgccctggagaaggctgacagcgacacctacacctgtgacatcggccaggcccagagccgggcccagctgctggtgcagggccggcgggtgcacatcatcgaggacctggaggatgtggatgtgcaggagggcagcagcgccaccttccgctgccgcatcagccctgccaactatgagcctgtgcactggttcctggacaagacccccctgcacgccaatgagctgaatgaaattgatgcccagcccggcggctaccacgtgctgaccctgcggcagctggccctgaaggacagcggcaccatctactttgaagctggggaccagagggccagcgctgccctgcgggtgacagagaagcccagcgtcttcagccgggagctgacagatgccaccatcacagaaggagaggacctgaccctggtgtgtgagaccagcacctgtgacatccctgtgtgctggaccaaggatggcaagaccctgcggggcagcgcccgctgccagctgagccatgagggccaccgggcccagctgctgatcaccggggccaccctgcaggacagcggccgctacaagtgtgaggccggcggggcctgcagcagcagcatcgtgcgggtgcacgcccggcctgtgcgcttccaggaggccctgaaggacctggaggtgctggagggcggggccgccaccctgcgctgtgtgctgagctctgtggccgcccctgtgaagtggtgctacggcaacaacgtgctgcggcctggggacaagtacagcctgcggcaggagggcgccatgctggagctggtggtgaggaacctgcggccccaggacagcggccgctacagctgcagctttggagaccagaccaccagcgccaccctgactgtgacagccctgcctgcccagttcatcggcaagctgaggaacaaggaggccacagaaggagccacagccaccctgcgctgtgagctgagcaaggccgcccctgtggagtggaggaagggcagcgagaccctgagagatggagaccgctactgcctgcggcaggatggagccatgtgtgagctgcagatccggggcctggccatggtggatgctgctgagtacagctgtgtgtgtggggaggagaggaccagcgccagcctgaccatccggcccatgcctgcccacttcatcggccgcctgcggcaccaggagagcattgaaggagccacagccaccctgcgctgtgagctgagcaaggccgcccctgtggagtggaggaagggccgggagagcctgagagatggagacagacacagcctgcggcaggatggagctgtgtgtgagctgcagatctgtggcctggccgtggctgatgctggggagtacagctgtgtgtgtggggaggagaggaccagcgccaccctgactgtgaaggccctgcctgccaagttcacagagggcctgagaaatgaggaggccgtggagggcgccacagccatgctgtggtgtgagctgagcaaggtggcccctgtggagtggaggaagggccctgagaacctgagagatggagaccgctacatcctgcggcaggagggcacccgctgtgagctgcagatctgtggcctggccatggctgatgctggggagtacctgtgtgtgtgtggccaggagaggaccagcgccaccctgaccatccgggccctgcctgcccgcttcattgaagatgtgaagaaccaggaggcccgggagggcgccacagctgtgctgcagtgtgagctgaacagcgctgcccctgtggagtggaggaagggcagcgagaccctgagagatggagaccgctacagcctgcggcaggacggcaccaagtgtgagctgcagatccggggcctggccatggctgacaccggggagtacagctgtgtgtgtggccaggagaggaccagcgccatgctgactgtgcgggccctgcccatcaagttcacagagggcctgagaaatgaggaggccacagaaggagccacagctgtgctgcgctgtgagctgagcaagatggcccctgtggagtggtggaagggccacgagaccctgagagatggagacagacacagcctgcggcaggatggagcccgctgtgagctgcagatccggggcctggtggccgaggatgctggggagtacctgtgcatgtgtgggaaggagaggaccagcgccatgctgactgtgcgggccatgcccagcaagttcatcgagggcctgagaaatgaggaggccacagaaggagacacagccaccctgtggtgtgagctgagcaaggccgcccctgtggagtggaggaagggccacgagaccctgagagatggagacagacacagcctgcggcaggacggcagccgctgtgagctgcagatccggggcctggccgtggtggatgctggggagtacagctgtgtgtgtggccaggagaggaccagcgccaccctgactgtgcgggccctgcctgcccgcttcattgaagatgtgaagaaccaggaggcccgggagggcgccacagctgtgctgcagtgtgagctgagcaaggccgcccctgtggagtggaggaagggcagcgagaccctgcggggcggggaccgctacagcctgcggcaggacggcacccgctgtgagctgcagatccacggcctgtctgtggccgacaccggggagtacagctgtgtgtgtggccaggagaggaccagcgccaccctgactgtgcgggccctgcctgcccgcttcacccaggacctgaagaccaaggaggccagcgagggcgccacagccaccctgcagtgtgagctgagcaaggtggcccctgtggagtggaagaagggccctgagaccctgagagatggcggccgctacagcctgaagcaggacggcacccgctgtgagctgcagatccatgacctgtctgtggctgatgctggggagtacagctgcatgtgtggccaggagaggaccagcgccaccctgactgtgcgggccctgcctgcccgcttcacagagggcctgagaaatgaggaggccatggagggcgccacagccaccctgcagtgtgagctgagcaaggccgcccctgtggagtggaggaagggcctggaggccctgagagatggagacaagtacagcctgcggcaggatggagctgtgtgtgagctgcagatccacggcctggccatggctgacaacggggtgtacagctgtgtgtgtggccaggagaggaccagcgccaccctgactgtgcgggccctgcctgcccgcttcatcgaggacatgaggaaccagaaggccacagaaggagccaccgtgaccctgcagtgcaagctgaggaaggccgcccctgtggagtggaggaagggccccaacaccctgaaggatggagaccgctacagcctgaagcaggacggcaccagctgtgagctgcagatccggggcctggtgattgctgatgctggggagtacagctgcatctgtgagcaggagaggaccagcgccaccctgactgtgcgggccctgcctgcccgcttcattgaagatgtgaggaaccacgaggccacagaaggagccacagctgtgctgcagtgtgagctgagcaaggccgcccctgtggagtggaggaagggcagcgagaccctgagagatggagaccgctacagcctgcggcaggacggcacccgctgtgagctgcagatccggggcctggccgtggaggacaccggggagtacctgtgtgtgtgtggccaggagaggaccagcgccaccctgactgtgcgggccctgcctgcccgcttcatcgacaacatgaccaaccaggaggcccgggagggcgccacagccaccctgcactgtgagctgagcaaggtggcccctgtggagtggaggaagggccctgagaccctgagagatggagacagacacagcctgcggcaggacggcacccgctgtgagctgcagatccggggcctgtctgtggctgatgctggggagtacagctgtgtgtgtggccaggagaggaccagcgccaccctgaccatccgggaggccacagagggcgccacagccatgctgcagtgtgagctgagcaaggtggcccctgtggagtggaggaaaggacctgagaccctgagagatggagaccgctacaacctgcggcaggacggcacccgctgtgagctgcagatccacggcctgtctgtggccgacacaggagagtacagctgtgtgtgtggccaggagaagaccagcgccaccctgactgtgaaggccccccagcccgtcttccgggagcccctgcagagcctgcaggccgaggagggcagcacagccaccctgcagtgtgagctgtctgagcccacagccaccgtggtgtggagcaagggcggcctgcagctgcaggccaacggccggcgggagccccggctgcagggctgcacagctgagctggtgctgcaggacctgcagcgggaggacaccggggagtacacctgcacctgtggcagccaggccaccagcgccaccctgactgtgacagctgcccctgtgcgcttcctgcgggagctgcagcaccaggaggtggatgaaggaggaacagcccacctgtgctgtgagctgagcagagctggggcctctgtggagtggaggaagggcagcctgcagctgttcccctgtgccaagtaccagatggtgcaggatggagctgctgctgagctgctggtgcggggcgtggagcaggaggatgctggggactacacctgtgacaccggccacacccagagcatggccagcctgtctgtgcgggtgccccggcccaagttcaagacccggctgcagagcctggagcaggagactggagacatcgcccggctgtgctgccagctgagtgatgctgagagcggggctgtggtgcagtggctgaaggagggcgtggagctgcatgctggccccaagtatgagatgaggagccagggcgccacccgggagctgctgatccaccagctggaggccaaggacaccggggagtatgcctgtgtgactggaggccagaagacagctgccagcctgcgggtgacagagcctgaggtgaccatcgtgcggggcctggtggatgctgaggtgacagcagatgaagatgtggagttcagctgtgaggtgtccagagctggggccaccggggtgcagtggtgcctgcagggcctgcccctgcagagcaatgaggtgacagaggtggccgtgagagatggccgcatccacaccctgcggctgaagggcgtgaccccagaagatgctggcaccgtgtccttccacctgggcaaccacgccagcagcgcccagctgactgtgcgggcccctgaggtgaccatcctggagcccctgcaggatgtgcagctgtctgagggccaggatgccagcttccagtgccgcctgagccgggccagcggccaggaggcccgctgggccctgggcggcgtgcccctgcaggccaatgagatgaatgacatcaccgtggagcagggcaccctgcacctgctgaccctgcacaaggtgaccctggaggatgctggcaccgtgtccttccacgtgggcacctgcagcagcgaggcccagctgaaggtgacagccaagaacacagtggtgcggggcctggagaatgtggaggccctggagggcggggaggccctgtttgagtgccagctgagccagcctgaggtggccgcccacacctggctgctggatgatgagcctgtgcacaccagtgaaaatgctgaggtggtgttctttgaaaatggcctgcggcacctgctgctgctgaagaacctgcggccccaggacagctgccgggtgaccttcctggccggggacatggtgaccagcgccttcctgactgtgcggggctggaggctggagatcctggagcccctgaagaatgctgctgtgcgggccggggcccaggcctgcttcacctgcaccctgtctgaggccgtgcctgtgggggaggcctcctggtacatcaatggagctgctgtgcagccagatgacagcgactggacagtgacagcagatggcagccaccacgccctgctgctgcggagcgcccagccccaccacgccggggaggtgacctttgcctgcagagatgctgtggccagcgcccggctgactgtgctgggcctgcctgaccccccagaagatgctgaggtggtggcccggagcagccacacagtgaccctgtcctgggccgcccccatgtctgatggcggcggcggcctgtgtggctacagagtggaggtgaaggagggcgccaccggccagtggaggctgtgccacgagctggtgcccggcccagaatgtgtggtggatggcctggcccctggagagacctaccgcttccgggtggccgctgtgggccctgtgggcgctggggagcctgtgcacctgccccagacagtgcggctggccgagccccccaagcctgtgcccccccagcccagcgcccctgagagccggcaggtggccgctggagaagatgtgtccctggagctggaggtggtggccgaggccggggaggtgatctggcacaagggcatggagcgcatccagcccggcggccgctttgaggtggtgtcccagggccggcagcagatgctggtgatcaagggcttcaccgctgaggaccagggcgagtaccactgcggcctggcccagggcagcatctgcccagctgctgccaccttccaggtggccctgagccctgcctctgtggatgaggccccccagcccagcctgcccccagaggccgcccaggagggggacctgcacctgctgtgggaggccctggccaggaagaggaggatgagccgggagcccaccctggacagcatcagcgagctgcctgaggaggatggccgcagccagaggctgccccaggaggccgaggaggtggccccagacctgtctgagggctacagcacagcagatgagctggccaggactggagatgctgacctgagccacaccagcagtgatgatgagagcagagctggcacccccagcctggtgacctacctgaagaaggccggccggcccggcaccagccccctggccagcaaggtgggcgccccagctgcccccagcgtgaagccccagcagcagcaggagcccctggccgctgtgcggccccccctgggggacctgagcaccaaggacctgggggaccccagcatggacaaggctgctgtgaagatccaggccgccttcaagggctacaaggtgaggaaggagatgaagcagcaggagggccccatgttcagccacaccttcggggacacagaggcccaggtgggagatgccctgcggctggagtgtgtggtggccagcaaggcagatgtgcgggcccgctggctgaaggatggagtggagctgacagatggccgccaccaccacatcgaccagctgggagatggcacctgcagcctgctgatcaccggcctggacagagcagatgctggctgctacacctgccaggtgagcaacaagtttggccaggtgacccacagcgcctgtgtggtggtgtctggcagcgagagcgaggccgagagcagcagtggaggagagctggatgatgccttccggcgggccgcccggcggctgcacaggctcttccgcaccaagagccctgctgaggtgtctgatgaggagctgttcctgtctgcagatgagggccctgctgagcctgaggagcctgctgactggcagacctacagagaagatgagcacttcatctgcatccgctttgaggccctgacagaggcccggcaggccgtgacccgcttccaggagatgtttgccaccctgggcatcggcgtggagatcaagctggtggagcagggcccccggcgggtggagatgtgcatcagcaaggagaccccagcccctgtggtgcccccagagcccctgcccagcctgctgaccagtgatgctgcccctgtgttcctgacagagctgcagaaccaggaggtgcaggacggctaccctgtgtcctttgactgtgtggtgacaggccagcccatgcccagcgtgcgctggttcaaggatggcaagctgctggaggaggatgaccactacatgatcaatgaagaccagcagggcggccaccagctgatcatcacagctgtggtgcctgctgacatgggcgtgtaccgctgcctggccgagaacagcatgggcgtgagcagcaccaaggccgagctgcgggtggacctgaccagcacagattatgacacagctgctgatgccacagagagcagcagctacttcagcgcccagggctacctgagcagccgggagcaggagggcacagagagcaccacagatgagggccagctgccccaggtggtggaggagctgcgggacctgcaggtggcccctggcacccggctggccaagttccagctgaaggtgaagggctacccagccccccggctgtactggttcaaggatggccagcccctgacagccagcgcccacatccgcatgacagacaagaagatcctgcacaccctggagatcatctctgtgacccgggaggacagcggccagtatgctgcctacatcagcaatgccatgggcgccgcctacagcagcgcccggctgctggtgcggggcccagatgagcctgaggagaagccagccagtgatgtgcatgagcagctggtgccccccaggatgctggagcgcttcacccccaagaaggtgaagaagggcagcagcatcaccttctctgtgaaggtggagggccggcctgtgcccaccgtgcactggctgcgggaggaggccgagcggggcgtgctgtggattggccctgacaccccaggctacacagtggccagcagcgcccagcagcacagcctggtgctgctggatgtgggccggcagcaccagggcacctacacctgcatcgccagcaatgctgctggccaggccctgtgcagcgccagcctgcacgtgtctggcctgcccaaggtggaggagcaggagaaggtgaaggaggccctgatcagcaccttcctgcagggcaccacccaggccatcagcgcccagggcctggagacagccagctttgctgacctgggcggccagaggaaggaggagcccctggccgccaaggaggccctgggccacctgagcctggccgaggtgggcacagaggagttcctgcagaagctgaccagccagatcacagagatggtgtctgccaagatcacccaggccaagctgcaggtgcctggaggagacagtgatgaggacagcaagaccccatctgccagccccaggcatggccgcagccggcccagcagcagcatccaggagagcagcagcgagagtgaagatggagatgcccggggggagatctttgacatctacgtggtgacagctgactacctgcccctgggcgctgagcaggatgccatcaccctgcgggagggccagtatgtggaggtgctggatgctgcccaccccctgcgctggctggtgaggaccaagcccaccaagagcagccccagccggcagggctgggtgtccccagcctacctggaccggcggctgaagctgagccctgagtggggcgctgctgaggcccctgagttccctggagaggccgtgtctgaagatgagtacaaggcccggctgagcagcgtcatccaggagctgctgagcagcgagcaggcctttgtggaggagctgcagttcctgcagagccaccacctgcagcacctggagcgctgcccccacgtgcccatcgctgtggccggccagaaggccgtcatcttcagaaatgtgcgggacatcggccgcttccacagcagcttcctgcaggagctgcagcagtgtgacacagatgatgatgtggccatgtgcttcatcaagaaccaggccgcctttgagcagtacctggagttcctggtgggccgggtgcaggccgagagcgtggtggtgtccacagccatccaggagttctacaagaagtatgcagaggaggccctgctggccggggaccccagccagcccccacctccacccctgcagcactacctggagcagcctgtggagcgggtgcagcgctaccaggccctgctgaaggagctgatccggaacaaggccaggaaccggcagaactgtgccctgctggagcaggcctatgctgtggtgtctgccctgccccagagagctgagaacaagctgcacgtgtccctgatggagaactacccaggcaccctgcaggccctgggggagcccatccggcagggccacttcatcgtgtgggagggcgcccctggggccaggatgccctggaagggccacaacagacatgtgttcctgttcaggaaccacctggtgatctgcaagccccggcgggacagcaggacagacacagtgtcctatgtgttcaggaacatgatgaagctgagcagcattgacctgaatgaccaggtggagggagatgaccgggcctttgaggtgtggcaggagcgggaggacagcgtgaggaagtacctgctgcaggccaggacagccatcatcaagagctcctgggtgaaggagatctgtggcatccagcagaggctggccctgcctgtgtggaggcccccagactttgaggaggagctggccgactgcacagctgagctgggggagaccgtgaagctggcctgccgggtgacaggcacccccaagcctgtgatctcctggtacaaggatggcaaggctgtgcaggtggacccccaccacatcctgattgaggaccctgatggcagctgtgccctgatcctggacagcctgactggagtggacagcggccagtacatgtgctttgctgccagcgctgctggcaactgcagcaccctgggcaagatcctggtgcaggtgcccccaagatttgtgaacaaggtgcgggccagcccctttgtggagggagaagatgcccagttcacctgcaccattgaaggagccccctacccccagatccgctggtacaaggatggagccctgctgaccaccggcaacaagttccagaccctgtctgagcccaggagcggcctgctggtgctggtgatccgggccgccagcaaagaagacctgggcctgtatgaatgtgagctggtgaaccggctgggcagcgcccgggccagcgctgagctgcgcatccagagccccatgctgcaggcccaggagcagtgccaccgggagcagctggtggccgctgtggaggacaccaccctggagagagctgaccaggaggtgacctctgtgctgaagaggctgctgggccccaaggcccctggccccagcactggagacctgaccggccctggcccctgccccaggggggccccagccctgcaggagaccggcagccagccccctgtgacaggcaccagcgaggccccagctgtgcccccccgggtgccccagcccctgctgcacgagggccctgagcaggagcctgaggccatcgcccgggcccaggagtggacagtgcccatccgcatggagggcgccgcctggccaggggccggcaccggggagctgctgtgggatgtgcacagccacgtggtgcgggagaccacccagaggacctacacctaccaggccatcgacacccacacagcccggccccccagcatgcaggtgaccattgaagatgtgcaggcccagacaggaggaacagcccagtttgaggccatcatcgagggggacccccagcccagcgtgacctggtacaaggacagcgtgcagctggtggacagcacccggctgagccagcagcaggagggcaccacctacagcctggtgctgcggcacgtggccagcaaggatgctggggtgtacacctgcctggcccagaacacaggaggccaggtgctgtgcaaggccgagctgctggtgctgggcggggacaatgaaccagattctgagaagcagagccacaggaggaagctgcacagcttctatgaggtgaaggaggagatcggccggggcgtgtttggatttgtgaagagggtgcagcacaagggcaacaagatcctgtgtgccgccaagttcatccccctgcggagcaggacccgggcccaggcctaccgggagcgggacatcctggccgccctgagccaccccctggtgacaggcctgctggaccagtttgagaccaggaagaccctcatcctgatcctggagctgtgcagcagcgaggagctgctggaccggctgtacaggaagggcgtggtgacagaggccgaggtgaaggtgtacatccagcagctggtggagggcctgcactacctgcacagccatggagtgctgcacctggacatcaagcccagcaacatcctgatggtgcacccagcccgggaggacatcaagatctgtgactttggatttgcccagaacatcaccccagctgagctgcagttcagccagtatggcagccctgagtttgtgtccccagagatcatccagcagaaccctgtgtctgaggccagtgacatctgggccatgggcgtcatctcctacctgagcctgacctgcagcagcccctttgctggggagagtgaccgggccaccctgctgaatgtgctggagggccgggtgtcctggagcagccccatggccgcccacctgtctgaagatgccaaggacttcatcaaggccaccctgcagagggccccccaggcccggcccagcgctgcccagtgcctgagccacccctggttcctgaagtccatgcctgctgaggaggcccacttcatcaacaccaagcagctgaagttcctgctggcccggagccgctggcagaggagcctgatgagctacaagagcatcctggtgatgaggagcatccctgagctgctgcggggccccccagacagccccagcctgggcgtggcccggcacctgtgccgggacaccggcggcagcagcagcagcagcagcagcagtgacaatgagctggccccctttgcccgggccaagagcctgccccccagccctgtgacccacagccccctgctgcacccccggggcttcctgcggcccagcgccagcctgcctgaggaggccgaggccagcgagaggagcacagaggccccagcccccccagccagccctgagggcgccggccccccagctgcccagggctgtgtgcccaggcacagcgtcatccgcagcctcttctaccaccaggccggggagagccctgagcacggggccctggcccctggcagccgccgccacccagcccggcggcggcacctgctgaagggcggctacatcgccggggccctgcccggcctgcgggagcccctgatggagcaccgggtgctggaggaggaggccgcccgggaggagcaggccaccctgctggccaaggcccccagctttgaaacagccctgcggctgcctgccagcggcacccacctggcccctggccacagccacagcctggagcatgacagccccagcaccccccggcccagcagcgaggcctgtggggaggcccagaggctgcccagcgcccccagcggcggggcccccatccgggacatgggccacccccagggcagcaagcagctgcccagcactggaggccaccctggaacagcccagcctgagcggcccagcccagacagcccctggggccagcctgcccccttctgccaccccaagcagggcagcgccccccaggagggctgcagcccccaccctgctgtggccccctgccccccaggcagcttccccccaggcagctgcaaggaggcccccctggtgcccagcagccccttcctgggccagccccaggcccccccagccccagccaaggccagcccccccctggacagcaagatgggccctggggacatcagcctgcccggccggcccaagccaggcccctgcagcagccctggcagcgccagccaggccagcagcagccaggtgagcagcctgcgggtgggcagcagccaggtgggcacagagcccggccccagcctggatgctgagggctggacccaggaggccgaggacctgagtgacagcacccccaccctgcagaggccccaggagcaggccaccatgaggaagttcagcctgggcggccggggcggctacgccggcgtggccggctacggcacctttgcctttggaggagatgctgggggcatgctgggccagggccccatgtgggccagaattgcctgggccgtgtcccagagcgaggaggaggagcaggaggaggcccgggcagagagccagagcgaggagcagcaggaggcccgggcagagagccccctgccccaggtgtctgcccggcctgtgcctgaggtgggccgggcccccaccaggagcagccctgagcccaccccctgggaggacatcggccaggtgtccctggtgcagatccgggacctgtctggagatgctgaggccgctgacaccatcagcctggacatcagcgaggtggaccctgcctacctgaacctgagtgacctgtatgacatcaagtacctgccctttgagttcatgatcttcaggaaggtgcccaagagcgcccagcctgagccccccagccccatggccgaggaggagctggccgagttccctgagcccacctggccctggccaggagagctgggcccccatgctggcctggagatcacagaggagagtgaagatgtggatgccctgctggccgaggccgctgtgggcaggaagaggaagtggagcagccccagccgcagcctcttccacttccctggccgccacctgcccctggatgagcctgctgagctgggcctgcgggagcgggtgaaggcctctgtggagcacatcagccgcatcctgaagggccggcctgagggcctggagaaggagggcccccccaggaagaagccaggcctggccagcttccggctgagcggcctgaagtcctgggaccgggcccccaccttcctgcgggagctgagtgatgaaacagtggtgctgggccagagcgtgaccctggcctgccaggtgtctgcccagcctgctgcccaggccacctggagcaaggatggagcccccctggagagcagcagccgggtgctgatcagcgccaccctgaagaacttccagctgctgaccatcctggtggtggtggccgaggacctgggcgtgtacacctgcagcgtgtccaatgccctgggcaccgtgaccaccaccggggtgctgaggaaggccgagcggcccagcagcagcccctgcccagacattggagaggtgtatgcagatggagtgctgctggtgtggaagcctgtggagagctatggccctgtgacctacatcgtgcagtgcagcctggagggcggctcctggaccaccctggccagtgacatctttgactgctgctacctgaccagcaagctgagcagaggaggcacctacaccttcagaacagcctgtgtgtccaaggccggcatgggcccctacagcagccccagcgagcaggtgctgctgggcggccccagccacctggccagcgaggaggagagccagggccgcagcgcccagcccctgcccagcaccaagacctttgccttccagacccagatccagaggggccgcttctctgtggtgcggcagtgctgggagaaggccagcggccgggccctggccgccaagatcatcccctaccaccccaaggacaagacagctgtgctgcgggagtatgaggccctgaagggcctgcggcacccccacctggcccagctgcatgctgcctacctgagccccaggcacctggtgctgatcctggagctgtgcagcggccctgagctgctgccctgcctggccgagcgggccagctacagcgagagcgaggtgaaggactacctgtggcagatgctgagcgccacccagtacctgcacaaccagcacatcctgcacctggacctgcggtctgagaacatgatcatcacagagtacaacctgctgaaggtggtggacctgggcaatgcccagagcctgagccaggagaaggtgctgcccagcgacaagttcaaggactacctggagaccatggcccctgagctgctggagggccagggcgctgtgccccagacagacatctgggccatcggcgtgacagccttcatcatgctgtctgctgagtaccctgtgtcctctgagggcgcccgggacctgcagaggggcctgaggaagggcctggtgcggctgagccgctgctacgccggcctgagcggcggcgctgtggccttcctgcggagcaccctgtgtgcccagccctggggccggccctgtgccagcagctgcctgcagtgcccctggctgacagaggagggccctgcctgcagcaggcctgcccctgtgaccttccccacagcccggctgcgggtgtttgtgaggaaccgggagaagaggcgggccctgctgtacaagaggcacaacctggcccaggtgaggtag

SEQ ID NO: 286283 - DNA, 16809 bp, Artificial Sequence
  derived and/or modified sequence
atgctggtgatccggggcgccagcctgaaggacgccggcgagtacacatgcgaagtcgaggcaagcaagtcgaccgcctcgctccatgtagaggagaaagcaaattgttttaccgaagagttaactaatctgcaggtggaagagaagggcactgccgtctttacatgcaagaccgagcatcctgcggccaccgttacctggaggaaaggactgttggagcttcgagcctcgggaaagcaccaaccaagccaggaaggtctgaccttgcgactaaccatctccgccctggagaaagcggacagtgatacatacacttgcgacataggtcaggcgcagagccgagcccagctccttgtgcaaggccggcgggtccacataatcgaagacctcgaagacgtagatgtgcaggagggaagttccgctaccttcaggtgccgtatttcccctgctaattacgagcccgtgcattggttcctggataaaacacccctgcacgccaacgaacttaatgagattgatgcccagcctggtggttatcatgtcctgaccctgaggcagcttgcactgaaagattctggaaccatttattttgaggctggtgatcagcgcgcctctgctgctttgcgcgtcaccgagaagccttcagtcttcagcagagagctcaccgatgcaaccattacagaaggtgaagacttgacattggtttgcgagacgagtacctgtgatatccccgtgtgctggacaaaagacgggaagactcttcgagggagtgctaggtgccagctaagtcacgaggggcacagagcgcagctactgatcaccggagccacgttacaggacagcgggaggtacaagtgtgaggccggtggagcctgctcgtcaagcatcgtacgggttcacgcccgcccagtccgtttccaggaagctctgaaggatctggaggtgctggagggtggcgcggccacgctcagatgcgtgctttcatccgtggccgcgcctgtaaaatggtgctatggcaataacgtgctccggccaggagacaagtattcactgcgccaggagggagcaatgcttgaattggtagtgcggaatctcagaccgcaggactccggcagatattcatgtagtttcggcgaccagacgacaagcgccacccttacagttactgctctgcccgcccaatttattgggaaactcagaaacaaggaggccaccgagggggccacagccaccctgcgctgcgaactgtccaaggctgcgccggtggaatggcggaagggatcggagacactgcgggatggcgacaggtattgcctacggcaagatggagccatgtgtgagctgcagattagaggccttgcgatggtcgatgcggctgagtattcttgtgtgtgcggcgaggaaagaacttctgcatccctgacaatccgccccatgcccgctcactttatcggacgcctgaggcaccaggagtccatcgaaggagccacagctacgttgagatgcgagctgtctaaggccgccccagtcgaatggcgaaaagggcgcgagtctctgagggatggggatcgacatagcctgaggcaagatggcgccgtttgcgaactacaaatctgcggcctggccgtagcagacgccggtgaatactcatgtgtatgcggagaggaaagaactagcgccacccttaccgtgaaagctcttcccgcaaaattcactgaaggcctcaggaacgaagaggctgtggagggggccactgccatgctttggtgcgaactttccaaagtggctccggtagagtggcgcaagggcccagaaaacctccgagatggggataggtatatcctgaggcaggagggaactaggtgtgaattacagatctgcggtctggctatggccgacgctggggaatatctttgtgtctgtgggcaggaacgcactagcgccaccctgaccatcagagcactcccggctcggttcattgaggacgtgaaaaaccaggaggctagggagggggcaaccgccgtcctgcaatgcgaattaaattcagccgcccccgtagagtggagaaaagggtctgaaaccctgcgcgacggagataggtatagcctgcgacaggacggcaccaagtgtgaactgcagatccggggattagcgatggcagatactggagagtattcatgcgtgtgtggacaagaacggacatccgcaatgctcacagttcgggcattaccaattaagttcaccgaaggtctgcgaaatgaagaggcgacagagggcgcgaccgctgtgctacggtgtgaactatctaaaatggccccggttgagtggtggaaaggccacgagacgttgcgggacggggacagacactccctcagacaggacggtgcacggtgcgaactgcagataaggggtctcgtggctgaagacgccggcgagtacctgtgcatgtgcggtaaggagcgaacttccgctatgctaacggtgcgggccatgccgtctaaatttattgaagggctccgcaacgaagaagcaaccgagggcgacactgccactctctggtgcgagctctcaaaagctgctcccgtcgagtggcggaagggacatgagaccctgcgcgatggtgacaggcattccctgcgacaagatgggagtcgctgcgaactccagattagaggactggcagtggtcgatgctggcgagtacagctgcgtctgtggtcaagagcgcacaagtgccaccctcactgtccgtgcactccctgctcgtttcattgaggacgtgaaaaaccaggaggcccgcgaaggtgcgacggccgtgctccagtgcgaactgagtaaagccgcaccagtcgagtggagaaaaggctcagagacactcaggggaggcgaccgctattcgctaagacaggatgggactaggtgcgagctccagattcatgggttgagcgttgctgataccggggagtatagctgtgtgtgcgggcaggagcggacatcagcaacactcacagtcagagctctgcctgcgcgctttacacaagacctgaaaaccaaggaggcatccgagggggctaccgctacgcttcaatgtgagctgtccaaggtcgccccagtggagtggaagaagggtccagagactcttagggacggcggtcgctacagcctaaagcaagatggtacacggtgcgagctgcagatccacgacctctccgtggctgacgccggcgagtactcttgcatgtgcggccaggagaggacaagcgctaccctgacagtgagggctttgccggcccgttttactgaggggcttcggaatgaggaagcaatggagggggctaccgctactctccagtgtgagctatctaaggctgccccagtggagtggcgaaaaggtctcgaggctctgcgtgatggcgataagtattctctgcgccaggatggtgctgtttgcgagctgcaaatccacgggctggccatggccgacaacggggtttatagttgcgtgtgcggacaggaacgcacatctgccacgctcacagtacgtgccctccctgcccgcttcattgaagatatgcgcaatcaaaaggcgacagaaggtgctactgtcacattacagtgtaagttgcgtaaggccgcgccagttgagtggcgcaaaggtccgaacaccctcaaagacggcgaccgttattctctgaagcaggatggtacctcatgtgagctccagatcagaggcttggtgatcgccgacgccggcgaatacagttgcatttgtgagcaagaacgaacgtcagccacactgacagtacgtgccctgccagctagatttatcgaagacgtgcggaatcacgaggccacagagggagcaaccgcagttcttcagtgtgagttgtccaaggccgctccagtcgagtggcgaaagggcagtgagacccttcgcgacggggatagatactcgctgcgtcaagatggcaccagatgcgaattgcagatcaggggcttggcggtagaggacaccggcgaatatctgtgcgtttgcggacaggagaggacctccgctactcttactgttcgcgccctgccggccagattcatagacaacatgactaaccaggaagccagagagggtgccaccgcaaccctgcactgtgaactgagtaaggtcgccccggttgagtggagaaaagggccggaaacgctcagggacggggacagacattccctacgtcaggatggtacaaggtgcgagctgcagatccgcgggctctcagtcgccgacgccggagagtacagttgtgtttgtggacaggaacgtacctcggccaccttaactatccgcgaagccacagagggggctacagccatgctccagtgtgagctgtccaaagttgctccagtggagtggcgaaaggggcctgaaaccctgagagacggcgataggtacaatctgcgacaggacgggaccaggtgtgaattacaaatccatgggctgtccgtggccgatacaggggagtattcctgcgtatgtggacaagagaaaacatccgccacattaacagtgaaagcgccacagcccgtgtttagggagccactgcagtccctgcaggcagaagagggctctactgctaccctgcaatgcgaactctccgagccaaccgccactgttgtctggtcgaaggggggattgcaacttcaggccaacggccgtagggaaccacgactccaaggatgcacggccgagttagttcttcaggatctgcaaagggaagatactggcgaatacacatgcacctgcggaagtcaggcaacgtctgctacgctgacggtcacagccgcgcccgtgcgcttcttaagggagctccagcatcaagaggttgacgagggaggcaccgcccacctgtgttgcgaactgagtcgcgcgggagcaagtgttgaatggcgaaaggggtctctccagctgttcccttgtgcgaagtaccaaatggtccaagatggagccgccgcagagctcctagtccgtggagtggagcaggaggatgctggggattacacctgcgatacaggtcacactcagtccatggcatctttgtccgttagagtaccgcggcccaaatttaaaacaaggctgcaatcacttgagcaggagactggggacattgctcgactttgctgccagcttagcgatgccgagagtggagcggtcgttcaatggctgaaagaaggtgttgaattgcacgcaggaccaaagtacgagatgagaagccaaggagctacccgcgagctgctcattcatcagctcgaagcaaaagacacgggggagtacgcttgtgtcaccgggggccaaaaaacagctgcctcactcagggtgacagagccagaagtaaccatagtgcgtggcctagtggacgctgaagtgacagcagacgaggatgtggagttctcttgcgaagtgagtcgcgctggtgccacaggggtgcagtggtgtttgcagggattgccgctccagtcaaacgaagtaacagaggtggcagtaagagacggccgaatccatactttgaggcttaagggcgttacacctgaggacgcaggaaccgtgagttttcacttgggtaatcacgccagttccgcccagcttacagtccgtgcaccggaagtcactatactggagcccctgcaggacgtccagttgagcgaaggccaggacgccagcttccaatgccgcctttcaagagcatctggccaggaagccaggtgggcactgggtggcgtgccactgcaggcaaacgagatgaatgacataactgttgagcaagggacactccatttgcttaccctgcacaaggttaccctagaagacgctggtaccgtgtctttccacgtggggacatgctcctccgaggcccagcttaaagtgacggccaagaatactgtagtgcggggccttgagaatgtcgaggccttggaggggggcgaagcattgttcgagtgtcaattgtcgcagccagaggtcgctgcacatacctggctgctcgacgatgagccagtgcacactagtgagaatgccgaagtggtgttttttgagaatggactgagacacctgctgttgctgaagaatctcaggccacaggattcttgtcgcgtaaccttcctagccggggacatggtcaccagtgcatttctcacggtcagaggttggaggctggagatcctggaaccacttaaaaatgccgctgtgagggccggggcccaggcgtgcttcacttgcaccctgagcgaagccgtccctgtaggggaggcatcgtggtacattaatggagctgccgtgcaaccagacgactccgactggacggtgaccgccgacggcagccaccacgcactcttgctgcgttcggcccagccacatcatgctggtgaggtgacctttgcttgtagagatgcagtggcgagcgctagactcaccgtgcttggcctgcctgaccctcccgaggacgctgaagtggtggcacgttcgtcccacacagtgacgctcagttgggcggcccccatgtcggatggcggcggcggcctttgcggctatcgggtggaagtaaaagaaggggctactgggcaatggcgcctgtgtcatgaactggtacctggccccgagtgtgtggtggacggcctggcgccaggtgaaacttatcggttccgcgtggccgcagttggtccagttggggcgggcgagccagtacacctgccacaaaccgtccggctcgctgaaccgcccaaaccggtacccccacagccttccgcccccgagtcacggcaggttgcggccggggaggacgtttctctcgagctcgaagtcgtggcagaagccggagaagttatctggcacaagggtatggagcgcattcagcctggcggtagatttgaggtagtgtctcagggccgccagcagatgcttgttattaagggcttcactgctgaagaccagggtgagtatcattgcgggcttgctcagggtagtatctgccccgcagccgctacttttcaggtggcactgtcgccagcgtctgtcgacgaggcaccacagccttccctacccccagaagcggcacaggagggagacttgcacctgctgtgggaggcactcgcgagaaaacgccgtatgagccgtgagcccacgcttgactcgattagcgaactgccagaggaagacggccggtctcagcgattaccgcaagaagccgaggaggtggcccctgatttgagtgaggggtacagtacagccgatgaactggcccgcactggcgacgcagatctcagtcacacctcgtcagacgacgaatcccgggctggcacacccagcctggtcacttacctgaaaaaggctggcaggcccggaacaagccctttggcttctaaggttggtgcccctgctgctccatctgtgaagccccagcagcaacaggagcccttggctgctgtgcgccctccactgggcgatctatcaaccaaggatcttggggacccttctatggataaagctgccgtcaagattcaagccgcttttaagggctacaaagtacgcaaagaaatgaagcagcaggaaggaccaatgttctcccatacgttcggcgacaccgaggcacaggtaggtgatgctctgagattagagtgcgtggtcgctagcaaggccgatgtgcgggcaaggtggctaaaggatggtgtcgaactcacagatgggcggcaccaccacatcgaccaactgggcgacggtacatgttccctgttgattaccggattagatagagccgatgcggggtgctacacgtgtcaggtatcaaacaagtttggtcaggtgactcatagtgcatgtgtcgtggtttctggctcagaatcagaggccgagtctagctctggaggcgagctggacgacgctttccgaagggccgcacgtaggctccacagactctttagaacgaagagtccggccgaggtgagtgacgaggagttattcttatctgccgacgaaggaccggcagagccagaagaaccagcagactggcaaacatacagagaggatgagcacttcatctgcatccgcttcgaggctttgaccgaggcacggcaggccgtaacaaggttccaggagatgttcgcaaccctcggcattggagtcgagatcaagctggtcgaacaaggtccaaggcgtgtcgaaatgtgtatctcgaaagaaacacccgcgcccgtggttcctccggagccgcttccatcactcctgacgagcgacgctgcccctgtcttcctgacagaattgcagaaccaggaagtacaggacggatatcccgtcagcttcgactgtgtggtcacaggtcaacctatgcctagcgtgcggtggtttaaagatggtaagctactggaggaggatgatcattacatgatcaacgaggaccaacaaggaggccaccaactgataatcacagccgtagtgccagccgacatgggcgtttatcgatgcctcgcggaaaattctatgggtgtttcctctacaaaggcagagctgagggtcgaccttacttctacagactacgacactgccgctgatgcaaccgaaagttctagctacttctccgcgcaagggtatctctcctcacgagaacaggagggtactgagtctactaccgacgagggacagctgcctcaggtggtggaggagcttcgtgacctccaggtggctccaggaactagactcgctaagttccagctcaaagtcaaggggtatcccgccccccgactgtactggtttaaggatggccagccactgacagccagtgcccatatacgtatgacagacaagaaaattttacacacccttgagataatatccgtgactcgtgaagatagcggacagtatgctgcctacatatctaatgctatgggggccgcctacagcagcgccagattgctggtccgcgggccggacgaacctgaagaaaagcccgcctcagacgtccatgaacagctggtgccgccgcgcatgctcgaacggttcacccccaaaaaagtaaagaagggaagctctattaccttttcggtgaaggtggagggaagaccagtacctaccgtccattggctacgggaggaggcggaacggggcgtattgtggattggcccagacactcctggatataccgttgccagctcagcacagcagcatagtttagtgttgctcgatgtgggcagacaacaccagggcacatatacttgtatcgcctcaaacgccgccggtcaagccctgtgttccgctagcctgcatgtgagcggcctgcccaaagtggaggaacaggagaaggtgaaggaggcactcatctcaacctttctacaagggaccactcaggcaatatcagctcaaggtctcgagacggcgtcctttgcagacctggggggccagagaaaagaagagcctctcgccgcgaaggaagctcttggccacctatcgctggccgaggtgggaactgaagaattcttgcagaaactcacatcccagatcactgagatggtgtcagccaagattactcaggctaaattgcaggtccctggcggggactcagacgaagactccaagactccctctgcgtccccgcgtcatggcaggtctagaccaagttcctcaatccaggagtcgtcatctgagtctgaggacggagacgcaaggggagaaatatttgacatttacgtagtgactgcagactacctccccctgggcgcagaacaggatgctatcacactaagggaaggacagtatgttgaagttctcgacgccgcccatcccctacgctggttggtccgaaccaagcctaccaaatcaagcccatcaagacagggttgggtctctcctgcatatcttgaccgccggcttaagttgagtccagagtggggcgcagccgaggcccccgagttcccaggagaggccgtgtccgaggatgagtacaaagcacggctgtcatcagtcatccaggagctgctgagtagtgaacaggcctttgtagaagaactgcagttcctccagtcccaccatcttcagcatctggaaaggtgcccccacgtcccgatcgccgtagccggccagaaggctgtcatctttcgcaacgtgcgggatattgggcgctttcattccagctttctgcaggagcttcagcaatgcgataccgacgacgatgttgctatgtgttttatcaagaaccaggcagcgtttgaacagtacctggagtttctggtggggagagttcaggccgagagtgtggtggtatctacagccatccaagaattctataagaaatatgccgaggaagccctgttagccggggatcccagccaaccccccccacctcctttgcagcattatctggaacaacccgtggagcgggtccagcgttaccaagccctcctgaaagagctgattcgaaataaagcaagaaaccgccagaattgtgcactgcttgagcaagcctacgccgtcgtgagtgcactgcctcagcgcgccgagaacaagctgcacgtgtcgctgatggagaactatcctggcaccctgcaggcacttggcgagcccatccgccagggccattttatcgtgtgggagggagcacccggcgccaggatgccctggaagggccacaatcgtcacgtgtttttgtttaggaaccacctagtgatttgtaaaccacggcgcgattcccggaccgatactgtttcatacgtatttagaaatatgatgaaactgtcctctattgatcttaacgaccaggtggagggagacgaccgtgctttcgaggtctggcaagagcgagaggacagtgtacgtaagtatctcctgcaggctcggactgccattataaagtcctcttgggtgaaggaaatttgtgggatccagcagcgattggccttacccgtttggcgtcccccagactttgaggaagaacttgccgactgtacagcagagctgggagagacagtaaagctcgcctgccgcgtcaccggaacccctaaacctgtcatcagctggtataaagatggaaaggcggttcaggtggatccccaccacatacttatcgaggatcccgatggttcctgcgccctgattctggacagcttgaccggagtggatagtgggcagtatatgtgtttcgctgcctctgctgccggaaattgtagcaccttaggtaagattctcgtccaggtgcctcccaggtttgttaataaagtccgggcttcacctttcgtcgagggtgaggacgcccagtttacctgcacaattgagggagcaccttatccccagatccgctggtacaaggatggggctcttctgactacaggtaataaattccagaccctgagcgagcctaggtctggcctgttggttctggtgatcagggccgctagtaaggaggatctgggcctctatgaatgcgaattagtgaaccgcctgggcagcgccagggcctccgccgagctcaggattcagtcacccatgctccaggcccaggagcagtgccaccgcgaacagctggttgctgcggtagaggataccaccctcgagcgcgccgaccaggaagtgacatccgtgcttaagagactgttgggacctaaagccccaggtcctagcaccggtgacctgactggcccaggaccatgccctcgaggggcacccgccctgcaggagaccgggtctcagccacctgtcacggggacatccgaagcccctgccgttccacccagggtgccgcagcccctgctccacgaggggccagagcaagaacccgaggccattgccagggcacaggaatggactgtccctatcagaatggagggcgctgcatggcccggcgcaggcaccggcgagctgctatgggatgtacatagccacgtggtgcgggaaacaacccagagaacgtacacataccaggcgatcgacacacatactgccagaccaccgtctatgcaggttactatagaagatgtgcaggcccagacaggggggacagctcaatttgaggcaatcattgagggagacccgcaacccagcgtgacttggtacaaggacagtgttcagctcgtggatagcacccgtctctcacagcagcaggagggcacaacatacagtctagttctgagacacgtcgcatctaaggacgccggagtgtatacatgcttagctcaaaatactggaggccaggttctgtgtaaggctgagctcctggtgctcggtggggacaatgaaccagattctgagaagcagtcccaccgccgaaagctgcattccttttatgaagtcaaggaggaaataggtcgcggagttttcggctttgtaaaacgagtgcagcataagggcaacaagatactatgcgccgcaaagtttatccccctcagaagcaggactcgtgcccaggcataccgagaaagagatattctcgcagctctatcccatccactggtgaccggccttttggatcaatttgagactcgcaagactcttatactgattctggagctatgctcgtctgaagaactgttggacaggctgtatagaaagggtgtggtcacagaggcagaagtaaaggtgtacattcagcagctggtagaaggcctacactacctgcacagccatggtgtcctccatctcgacatcaaaccatccaatatcctaatggtgcatcccgccagagaggacatcaagatctgtgactttggcttcgctcaaaatatcactcccgctgagctccaattctcccagtacggaagtccagaattcgttagtccggagatcattcagcagaaccccgtctcggaagcctcagatatctgggcaatgggggttatcagttacttgtcactgacttgtagtagtccctttgccggggagtctgatagggcaaccttgttaaatgtcctagaagggagagtttcgtggtcctccccgatggctgcgcacttgtccgaggatgcaaaggacttcattaaggctaccctgcagcgggcaccccaagcccggccgtctgccgcccagtgcctctcacacccttggtttctgaagagcatgccggcggaggaagcccactttataaacaccaagcagttgaagttcctgttggcccgctcaaggtggcagaggagtctgatgtcttacaagagcatcctggtgatgaggagtatcccagaactcttacgtgggcctcccgatagtcctagcctgggtgtggctagacacctgtgcagagatacaggaggcagcagctcttcaagttcatcctccgataacgagttagcgccgtttgccagggccaaatcactgcctcccagccccgtgacacacagccccctcttgcacccccggggcttcctgcggccatccgcttcactgccagaagaggccgaagcgtctgaaaggagtacggaagcaccagcccccccagcctcgccggagggggccggacctcctgctgcccagggctgcgtaccccgccatagcgtcattagatccctcttttaccaccaggccggcgagtctcccgaacacggagccttggcccccggctccagacggcacccagcgcgaaggagacacctgcttaaaggaggttacatcgcgggggctcttcctggcctgagggaacctctgatggagcatagggtgctcgaggaggaagccgctcgcgaggagcaggcgacattgctggctaaggcaccaagtttcgagacagcactccggctgcccgcctccgggacccacctcgcccctggacatagccacagccttgaacacgattccccatctacacctcgcccctcctcagaagcctgtggcgaagcccagcggctgccctctgcaccatcgggaggtgccccgatacgggacatgggacatccacagggttctaaacagctccccagcaccggcggtcacccagggacagctcaaccagagcgtcctagtcccgacagtccttggggacagcctgctccattctgtcatccgaaacaggggtctgctccccaggaagggtgcagtccccaccccgccgtggctccttgtccacccggatctttcccaccgggcagttgtaaggaagctccgctcgtcccatccagcccgtttttaggtcagccccaggcgcctcctgcgccggctaaggctagtcctcccctggatagcaaaatggggcctggggacatcagccttcccggcagaccaaagcctggcccatgctcctctccaggttctgcctctcaagcctcaagcagccaggtgagctctctgagggtggggtcatcccaggttggtaccgaacccggcccaagtcttgatgctgagggctggacacaggaggctgaagacctctctgattcaacacccaccctgcagagacctcaggaacaggctaccatgcgcaagttcagcctaggtggcaggggtggctacgctggcgtggccggatatggaacttttgccttcgggggtgatgccggcgggatgctgggtcagggccctatgtgggcacggattgcttgggcggtcagtcagtcagaggaggaagaacaggaggaggcccgtgccgaatcccagtccgaggaacagcaggaggcgcgagcagaatcacctttacctcaagtcagcgctcgcccggtccccgaagtgggaagggccccgactcggtcttcccccgagcctacaccctgggaggacatcggacaagtgagccttgttcagatcagagacctatcaggggacgctgaggctgccgataccatttctttagatatcagtgaagtagaccctgcatatctgaacctatcagatttgtacgacatcaagtacctccctttcgaatttatgatctttcggaaagttcccaagtccgctcagccggagcctcctagcccaatggcagaggaagagctggccgaattccccgagcccacttggccctggcccggcgaactggggccgcacgccggactagaaattacggaagaatccgaagacgtcgatgccctcctggctgaggcggcagtgggcagaaaaagaaagtggagctccccctccaggtcgttgttccatttccctggtaggcacttgcccctggatgagccagcagaactgggcttacgagagagggtgaaggctagcgttgaacatataagccggatactgaagggtcgacccgagggtctggagaaggaaggccccccacgcaagaagccgggactcgcgtccttccggctgagcgggctgaaaagttgggacagagctcccaccttcttacgcgaactcagcgacgagaccgttgtgctgggccaaagcgtgactctggcctgtcaagtgtcagcacagcccgccgctcaggccacttggtcgaaagacggggctccactcgaaagttcatcacgcgttttgatttctgccaccctgaaaaacttccaacttttgaccattctggtagtagtggccgaggacctaggcgtgtacacatgttccgtttcaaatgcgctgggaactgtgacgaccacaggggtgcttcgcaaagccgaaagacctagcagcagtccctgcccagacatcggcgaagtttacgctgacggcgtactcttagtctggaaacctgtggagtcgtatgggcctgtgacatacatcgtccagtgcagtcttgagggcgggagttggactaccctcgcctctgatatttttgattgctgttacctgacctcaaagctatccagaggaggaacttatacatttcggaccgcatgtgtctccaaggccggcatgggcccttattcttcccccagtgagcaggtattactgggagggccgtcccaccttgcaagtgaagaggagtctcaaggccgaagcgcccagccccttcctagcaccaaaaccttcgcatttcagacccagatccagagaggcaggttttcagttgtgagacagtgctgggaaaaagcctccggacgtgccctggccgcaaaaatcataccctaccaccctaaggacaagacagctgtgctgcgggaatacgaagcactcaaaggcttgagacatccccatttagcccaactccatgctgcctacctgtctcctagacatttggtgttgatccttgaactgtgcagcggtcccgagctcctaccctgtctggctgagcgagcctcctattcagaatctgaagtaaaggactacttgtggcaaatgctgagtgcgacccaatatctccataaccagcatatactgcatctagacctcaggagcgagaacatgatcatcacagaatataacctgctgaaagtggtggacttgggtaacgctcaatcactctcacaggagaaggtccttccaagtgataaatttaaagactaccttgaaaccatggctccagaactgcttgaaggccaaggcgctgtgccacaaaccgatatatgggcaattggggtgaccgcttttatcatgttgagcgcggaatatcccgtatcttcggaaggcgctagagatctgcagcgcgggcttcgtaagggactggttcgcctgagcagatgctacgctgggctctccgggggcgctgttgcctttttgcgttccaccctgtgcgcccaaccgtggggacgtccctgcgcaagtagctgcctgcagtgtccttggctgacggaggagggcccagcatgcagccgccctgcgccagtaaccttcccgactgctagattaagagtgtttgtgagaaatagagaaaaacgtagagccttgctgtacaaaagacacaatctcgcacaagtgcggtag

SEQ ID NO: 286284 - DNA, 16809 bp, Artificial Sequence
  derived and/or modified sequence
atgctggtgattagaggagcttctctcaaagacgcaggagagtatacatgcgaggtggaagcaagtaagtccaccgcgtctcttcacgtggaggagaaggccaattgcttcaccgaggagctcaccaatttgcaggtggaggaaaaaggcacagcagtattcacgtgcaagactgagcaccctgcggcaaccgtcacttggaggaaaggcttgcttgagctcagagcatccggaaagcaccagccgagccaagaaggcctgacccttaggcttacaatcagcgcccttgagaaggccgattctgatacctatacttgtgacatcggccaggcccagagtcgagcacaacttctggtccagggcagacgggtgcatattatcgaggatctggaggatgtagacgtgcaagagggaagctcagcaaccttccgctgccgtatctcccccgcaaactacgaacccgtacactggtttctggataagacacctctgcacgcaaacgaactgaacgagatcgatgcacaaccaggcggatatcacgtgctgactttaaggcagctcgccttgaaggactctggaacaatctactttgaggccggtgaccagagggcctcagccgcacttcgggtgaccgagaagccctccgtgttctcccgcgaacttactgacgctaccatcaccgaaggagaggatttgacactggtatgcgagacctcaacctgcgacatccctgtctgttggacaaaggacggtaagacccttcgcggatctgcgcgttgccagctgagccacgaggggcaccgtgctcagctattgatcactggggcaacgctgcaggattcaggacgctataaatgtgaggctggcggagcctgctccagctccatagtcagagtgcatgcccgacctgttaggtttcaagaagccctgaaagacctggaagttctggaaggaggcgctgcaaccctacggtgtgtcctgtcctcggtggcggcacctgttaagtggtgctacgggaacaacgttctgaggccaggcgacaagtactctctgagacaggagggggctatgctggaactggttgtccgaaatcttcggcctcaagactccggcaggtacagctgcagtttcggagaccagacgacatctgctaccctgaccgtgacagccctgccagcacagttcataggaaaattgagaaacaaagaggcgacagaaggcgcaactgctacattgaggtgcgagctgtcgaaagccgcacccgtggagtggagaaaaggtagtgagactttacgcgatggagacagatactgtctgcgccaggacggggcaatgtgtgagcttcagatccgaggcctggccatggtggacgccgctgagtactcgtgtgtctgcggagaagagaggacgagtgccagtttaactatccgtccgatgcccgctcacttcataggtcgcctgcggcaccaagaatcaatcgaaggtgctacagctacactcagatgtgaactcagcaaagctgcccctgttgagtggcgtaaggggcgagaaagtttgcgggacggagacaggcactcactgcggcaggatggcgctgtctgtgaactgcagatctgtggactcgctgttgccgacgctggggaatacagttgtgtgtgcggagaagagagaacttccgcgacattgaccgtaaaggcccttcccgcaaagttcactgaaggacttcgcaacgaggaggctgtggagggggcaaccgcaatgctctggtgcgagttaagcaaggtcgccccagtcgagtggaggaaagggccagagaacctgcgggatggcgaccgttacatcctccgtcaagaaggcacccgctgtgagctccagatttgtgggctggcaatggctgacgccggtgaatacctctgcgtgtgcggccaagaaagaacgagcgctacactgacaattagagcgctcccagctcgttttatcgaggacgtcaaaaatcaagaagctcgggagggggcaacagccgtgcttcaatgtgagctgaactcagctgcgccagtagaatggagaaagggctccgagaccctgcgagatggagatcgctatagccttcggcaggacggcaccaagtgcgaattgcagattaggggcctcgccatggcagatacaggagagtattcttgcgtgtgtggacaggagcgcacctccgcgatgctgaccgtcagagccttgccgattaaattcacggagggcttacgcaacgaggaggctactgagggagccactgcagtgctgagatgtgagttgtcgaagatggcacctgtggaatggtggaaagggcatgaaactctgcgggatggggacaggcactccttaagacaggacggagctaggtgtgagctgcagatacgcggactagtagccgaggatgccggagagtacctgtgcatgtgcggtaaagaaaggacaagtgctatgctcacagttagagccatgccatcaaaatttatagagggtctgagaaatgaagaagctacagaaggcgacaccgctacattatggtgtgaactgtccaaagctgcacctgtggaatggagaaagggccatgaaaccctcagggacggtgatcggcattcattaagacaagatggctcgaggtgtgagctccagatccggggactcgctgtagttgatgccggtgaatactcctgtgtgtgcgggcaggagagaactagcgccaccttgaccgtgcgcgctctgcctgctcgttttatcgaagatgtgaagaatcaagaagctcgagagggagccacggcggtgctgcagtgcgaactgtcgaaagctgctcctgtcgagtggagaaaaggatccgagacactgcgaggaggagatcggtacagtctaaggcaggatggcacacgctgcgagctgcagatccatggcctgtccgtggccgatacaggagagtattcttgtgtgtgtggtcaagagcggacatcagcaaccctgactgtgagagcactcccagcaagattcactcaagatctgaaaaccaaggaagcctcagaaggagcgactgccaccctgcagtgcgaactaagtaaggttgctccagtggagtggaaaaagggtcccgaaactctacgggacggcggtagatattccctcaaacaggacggcacccggtgtgaactccagatacatgacctgtcagttgccgatgcaggagagtactcatgtatgtgtggccaagagcggaccagtgccacgctgactgtacgagccctgcccgcacggttcacagaggggctcaggaatgaggaggcaatggaaggcgctactgccaccctacagtgtgagctgagcaaggccgctccagtcgaatggaggaaaggcctcgaggccctgagggacggagataagtattccttgaggcaggacggagcagtttgtgagctccagattcacgggctggcaatggccgacaacggagtgtactcatgtgtctgcggacaggaaaggacttctgctacattaaccgtccgcgctcttcctgctagatttatagaggacatgcggaaccagaaggccactgagggggctactgtcactctgcagtgcaaattacgcaaggcagctcccgtggaatggagaaaaggccctaacacgctgaaagacggggacagatacagtttaaaacaggacggaacctcatgtgagcttcagatcagaggactggtgatcgccgacgcaggcgaatactcgtgtatttgcgagcaggagaggacttccgcgactctgactgtaagagcactgccagccaggttcattgaggatgtaaggaatcacgaagccacggaaggggcaacagcagtcctccagtgtgagctgagcaaagccgcaccagttgagtggaggaagggaagcgagacactgcgggacggagaccgctattccctgagacaagacggcacccggtgcgagctgcagattcgtgggctggctgtagaggatacaggagagtatctgtgcgtctgtgggcaggaaaggacctccgctactcttactgttcgggctctgcctgctaggttcatcgacaacatgacaaaccaagaggccagggaaggagccaccgccactctgcactgcgaattgtctaaagtcgcgccagtcgaatggaggaagggccctgaaaccctccgggatggggaccggcattccttgcggcaggacggtactaggtgcgaactgcagatacgcggactatctgtcgcagacgcgggagaatattcctgtgtgtgcgggcaagagcgaacttcagcgacacttaccattcgcgaagccacggaaggagcaactgcaatgctccagtgtgaactttccaaagtggcccctgtggagtggcggaagggtcccgagacactgcgggatggcgacaggtataatctgaggcaggacggcacccgatgcgagctccagattcacggcctttctgtggccgacacaggggagtacagctgtgtgtgcggacaagagaaaacctccgcaaccctcactgtgaaggcccctcagccggtcttccgcgaaccattgcagtctctacaagccgaggagggctcaacggccacactgcagtgcgagttgtctgagcctacagccacagtggtatggagcaaaggcggactccagttgcaagctaacggcaggcgagagcctagattgcaaggttgcaccgcagagctcgtccttcaagatcttcagcgggaagacacgggtgaatacacctgtacctgcgggagccaggctacaagcgccactttgaccgtcacagctgcccctgtgagattcttacgcgaactccaacaccaggaagtggacgagggaggcactgcccacttgtgctgcgagttgagtagggctggcgcaagcgtggaatggaggaagggatcacttcagctgttcccgtgtgctaaatatcaaatggtgcaggatggcgcagccgcagagctgcttgtaaggggtgtagaacaggaggacgctggcgactatacatgtgacacgggacacactcaatccatggccagcttgtccgtacgggtacccaggcctaagttcaaaacaaggctgcagagcctcgagcaggagaccggtgacatcgctagattgtgctgccaactgtcagatgccgaatctggtgctgttgtgcagtggctaaaagagggcgtggagctccatgcgggtccaaaatacgagatgcgatcccagggtgctactagagaacttttaattcaccaactcgaagctaaggacacgggagagtatgcctgcgtgacaggcggacagaaaacagctgcctcacttagagtcaccgagccagaggtgactatagtgcgcggattggtcgatgcggaggttactgcagacgaagatgtcgagttctcttgcgaagtgagccgggctggagctaccggcgtgcagtggtgccttcaggggttacctcttcagtctaatgaagtcaccgaggtggctgtgagagacggacggattcacacactgaggctgaagggagtgacacctgaggatgccggtaccgtgtccttccatttgggcaatcacgcttccagcgctcaactcactgtgagagcacctgaggttactatcctggaaccacttcaggatgtccagctgtctgagggacaggacgctagtttccaatgcaggttgagtagggcctccggtcaagaagcacgatgggcattgggtggagtcccactccaagccaacgagatgaacgatattaccgttgaacagggcacccttcacctgttgaccctccataaagttactctggaggatgccggaacagtctccttccatgtgggtacttgcagttccgaagctcaactcaaggtgaccgcaaagaacactgtcgttcgcggtctggaaaatgtggaggcattggaaggaggcgaagctctattcgaatgccagctgagccagcctgaagtcgccgcacacacatggttgcttgacgacgagcccgtgcacacgtccgaaaatgccgaagtcgtgtttttcgaaaatgggcttaggcatctgttactgcttaaaaatctaaggccccaggattcctgtcgtgtgacatttctggccggagacatggtcacaagcgccttcctcaccgtaaggggctggcggttggagatcttggagccattgaagaacgccgctgtccgcgctggagcccaggcatgtttcacctgtacgttgtctgaagcagttccagtcggtgaggctagctggtacatcaatggcgctgccgtccagcccgacgacagtgactggaccgttaccgcagacggttctcaccatgccctgttactacgaagtgctcaaccacaccacgccggagaagtgacatttgcctgtcgcgacgccgtggcatctgctaggctgactgtcttggggctgccagatccgcctgaggacgccgaggtggtggctcgtagctcccacaccgtgaccctctcctgggccgcacctatgagtgacggcggagggggattatgcggatatagagtggaagtgaaggaaggcgcaacaggacagtggagactgtgccacgaactcgttccgggacctgagtgtgttgtggatgggctcgcccctggcgagacataccggtttcgggtagctgcagtcggaccagtaggcgctggtgaacccgtgcacttgccacagacagtgcgcttggcggagccgcctaaacctgtacctccgcagcctagcgctccggagtctcgacaggtagctgccggagaagacgtgagtttggagttggaggtcgtagctgaggctggggaggtcatctggcacaagggcatggagaggatacagcctggcggacgatttgaagtagtttctcagggcaggcagcaaatgcttgtcattaaaggcttcacagccgaggatcagggcgaataccattgcgggttggcccaggggtccatctgtcctgccgctgcaacatttcaggtagcactgtctcctgccagcgttgatgaagcccctcagccctccctgcctcctgaggccgctcaagagggtgatttgcaccttttgtgggaggctctcgcacggaagaggagaatgtcccgcgagcccacactcgacagcatttcagagctcccagaggaggacgggaggtcgcagcgccttccccaagaggccgaagaggtggcaccggatctgagcgagggatatagtaccgccgatgaactagcccgaacgggcgatgctgacctgagccataccagttcggatgacgagtccagggcaggcactccgtcactggtgacctatctgaagaaggcaggcaggccaggcacatctcccctcgcctcaaaagtgggcgctccagccgcaccatccgtcaagccgcagcagcagcaggaaccactagccgctgtcagacctcccctcggcgacctatccactaaagaccttggagaccccagcatggacaaagctgctgttaagatccaggctgctttcaagggatacaaggtccgcaaggaaatgaaacagcaagagggacccatgttctcccatacgtttggtgacaccgaagcacaggtgggcgacgctctgaggctagagtgtgttgtggccagcaaggcagatgtgcgagccagatggctcaaggatggggtggaacttacagatggccgtcaccaccatatcgaccaactgggagacgggacttgtagtctcctaatcactggcctggacagggcagacgctgggtgttatacgtgtcaggttagcaacaaatttgggcaagtgacacactcggcgtgcgtggtcgtaagtgggtctgagtccgaggcggagtcgagcagcgggggtgagctagatgacgcatttcggagggcagctagacgtctgcacaggctgtttcgcacgaaaagtcccgcagaagtgagtgatgaggaattgtttctgtcggcggatgaggggcctgcagaacctgaggaaccagccgattggcagacatacagggaggatgaacacttcatttgcatcagattcgaagccctcactgaggctcggcaggcagtaacccgcttccaggaaatgttcgccacactcggtataggcgtggagattaagttggtggaacagggacccagaagggtggagatgtgtatttccaaggagaccccagccccagtcgtgcctcctgagccgcttccttccttactcaccagtgatgccgctcccgtgtttctgaccgagctgcagaatcaggaagtgcaagatggttacccagtcagttttgattgtgtggtcaccggccagcctatgccttcggtccgctggtttaaggacggtaagctgttagaagaggacgatcactatatgatcaacgaggaccaacagggcggtcaccagttaataattacagctgtggtgccagctgatatgggtgtgtacagatgtcttgctgaaaattcaatgggcgttagctccacgaaagcagagctgcgggtggatctcactagcactgattacgacactgcagccgacgcaaccgagagttcatcatactttagtgcacaagggtatctgtcgtctcgcgagcaggagggaactgagagtactacagatgagggacaactgccgcaggtggttgaggaactgagagacctgcaggtggcccctggcactagattagcaaaatttcagttgaaggtcaaggggtaccccgctccacggctctattggtttaaggacgggcagcctttgaccgcgagtgctcatataagaatgacagacaagaaaatattacacacgctggagatcatatccgtgactcgggaagacagcgggcagtatgccgcatacatctctaacgcaatgggtgccgcatactcaagtgctcgtctcctcgtaagagggccagatgagcctgaggagaaaccagccagcgatgtccacgaacagctagttcctccccgtatgctagaacggtttaccccaaaaaaggtcaaaaagggttcttctataacctttagcgttaaagtggaaggaagaccagttccaactgtccactggttgagggaagaagcagagaggggggtactatggattgggcctgatacccccggatatactgtggcctccagcgcgcagcaacacagtctcgtactgctagacgtaggcaggcaacatcaaggtacctacacctgcatcgcctctaacgcagctggtcaggctctctgtagcgccagcctgcacgtgagtgggctcccaaaggtggaggagcaagagaaagtcaaagaggcactcatctcaacctttctgcagggcactacacaggctatcagcgcccagggcttggaaactgcatctttcgctgatctgggcggacagcggaaagaggaacctcttgcagccaaggaagcactgggccatcttagccttgcagaagtgggcacggaagagtttttgcagaaattgactagccaaatcacggagatggtgtcagcaaaaatcacccaagcgaaacttcaagtccctggtggcgactctgatgaagacagtaagacaccgagtgcgagtccccgacacgggagaagcagaccctcttcttcgatacaagaaagctcctcagaatctgaggatggggatgctcgaggtgagatttttgatatttacgtggtgacagcagactacctgccacttggagcggaacaggatgctatcactctgcgagagggccagtatgtggaggtcctggatgctgcccacccactgcgctggctggttcgcaccaaaccgactaagtcctcacccagcaggcaagggtgggtcagtcctgcgtacctcgatagacgcctgaaactttctccggagtggggagcagcggaagccccagaattccctggcgaggccgtgagcgaagatgagtataaagccaggctgtccagtgtgatacaggagttgctttcttctgagcaggccttcgtcgaagaactccagttcctccagtcccaccacttgcaacatctggaacgctgtccacatgttccaatagcagtagccggtcagaaagcagtcatcttcagaaacgtgcgggatattggcaggttccactcctcttttctgcaggagcttcagcagtgcgacaccgatgatgatgttgccatgtgcttcattaaaaaccaggcagccttcgagcaataccttgagttcctggtcggccgtgtgcaggctgagagcgtcgtggtttccaccgcaattcaggagttctacaagaagtatgccgaggaggcattactggctggcgatccatcacagccaccccctccgccactccaacattatctcgagcaacctgtggagagggtgcaaaggtaccaggcccttctcaaagaattgatcaggaataaggcacggaaccggcagaactgtgcacttcttgaacaggcatacgccgtcgtcagcgcgcttcctcagcgggctgagaacaaactgcacgtgagtctcatggagaattaccctggcaccctgcaggccctcggcgagccgattagacagggtcacttcattgtatgggagggagcgcctggcgcaaggatgccatggaaaggccacaatagacacgtattccttttccgcaatcatctcgtcatctgcaaacccagaagggatagtcggactgacaccgtgtcatacgtttttaggaatatgatgaagctgtcctctatcgatctcaacgatcaggtagagggcgacgaccgggctttcgaagtgtggcaggaacgcgaagactctgtgcgtaaatacctcttacaggctagaacagcaattatcaaatccagttgggtaaaggagatctgcggtatccagcaaagactcgctctcccggtgtggcggccacccgattttgaagaggagcttgctgactgtaccgctgagttgggcgaaacagtgaaactagcatgtcgcgttaccggtacccccaagcccgtaattagctggtataaagacggcaaggcagtccaagtggacccccaccacattctcatcgaggacccggatggaagttgcgccttgatactggacagtcttaccggcgtggattcaggtcagtacatgtgctttgcagcaagcgccgcaggaaactgtagcaccctgggaaagatcctggtgcaggtgcccccaaggtttgtcaataaggtgcgggcttcaccatttgtcgaaggagaagacgcccaatttacctgtaccatcgaaggagctccatatccccagattcggtggtacaaagacggagcactgctgaccaccgggaataagttccagactctatctgagccccgtagcggattgcttgttctggtgatcagagccgctagcaaagaagatctggggctctatgagtgcgagttggttaacaggctgggctcagcacgagccagtgctgagctcagaatccaatccccgatgctccaggctcaggagcaatgtcatcgggagcagctcgtggccgcagtggaggatacaacactggagcgcgcagaccaggaggtcacgtccgtcctcaagaggctgcttggacctaaagcccctgggccatccacaggtgacctgacaggccctgggccatgcccccgaggggctccagccctccaggagaccggctcccaacccccagtaacagggacatccgaggccccagccgtgcctccaagagtccctcagcctctcttacacgaggggcctgagcaagagcctgaggccatcgccagggctcaagagtggacagtacccatacgaatggaaggcgctgcctggcctggtgccggtaccggagaactattgtgggacgttcattcacatgtcgtgagggagactacccaacgcacgtacacctatcaggccatcgatactcacaccgctcgaccaccgagcatgcaggtaacaattgaagatgtccaagcccaaaccggcggaacagcccaattcgaggccattatagaaggggaccctcagccttctgttacctggtacaaagactctgtccagctcgttgattccaccagactgtcacagcagcaagagggaactacctactcacttgtattgcgacatgtagctagcaaagacgccggagtctacacatgcctggcacagaatacaggcggacaagtcttatgtaaagccgaacttctcgtattaggcggagacaacgaacccgattcggagaagcagtcccacaggcggaagttgcactcattttacgaggtgaaggaagagataggtagaggagtgttcggatttgtcaaacgcgttcagcacaagggtaataaaattctatgcgccgcaaagttcattccactccgctcacggacacgcgcacaggcttacagggagcgtgacattcttgccgctttgtcccacccgcttgtgaccggcctgctggatcagttcgaaacccgcaaaaccctgatactcatcctggaactatgttctagcgaagagctattagatagactgtaccgcaaaggcgtcgtcaccgaggccgaggtgaaagtctacatccaacagctagtggaagggctgcattacctacacagccacggcgtcctgcatctggatattaagccttccaatatcctgatggttcatccggctagggaggatatcaagatctgcgattttggtttcgctcagaacatcaccccagcagagctgcagttttctcaatatgggagtccagaattcgttagccctgaaatcatccagcagaaccctgtgtccgaggcaagcgatatctgggcaatgggcgtgatttcgtatctgtccttgacctgtagctcccccttcgcaggtgagtccgatcgcgcaacactgctgaacgtgctggaggggcgtgttagctggagcagtccaatggcggcacacctgtcagaggacgctaaggactttattaaagctaccctgcagcgcgctccccaggcccgtccatctgccgcacagtgtctgagccatccttggttcctcaagagcatgcccgctgaagaggcacacttcatcaatacaaaacagttgaaattcttactcgccagatccagatggcagcggagtcttatgtcctacaaatccatccttgtcatgaggagcatacccgagctgttacgaggacctccggatagcccctccctaggcgtggccaggcacttatgccgcgatactggcggaagcagcagtagctcaagcagctccgacaacgaactggctcctttcgcacgggcaaagagccttccccctagtcctgtaactcactctccactcctgcacccacggggatttctccgcccatcagccagcctccctgaggaggctgaggcctcggaaagatcaaccgaggccccagcacctcctgcttctcctgaaggagccggaccccctgctgcacaagggtgtgtgccacggcactccgtaatcagatccctgttttaccatcaagcaggcgaatctccagagcatggggctctcgcacctgggtccagaaggcaccctgctcggagacggcatctccttaaggggggatatatagccggtgcgctgcccggtttgcgggagcccctgatggaacacagagtgctggaagaggaggcggctagagaagagcaggccacccttctggctaaagcgccttcatttgagactgccttgcgccttcccgctagcggaacccacttagcacccggacattcccattccctcgaacacgactctccatccacccctcgaccaagtagtgaagcctgcggcgaagctcaacggctcccaagcgccccttccggtggcgctcccattcgtgacatgggacatcctcagggcagtaaacagctgccaagcaccggcggtcaccctggcacggcgcaacctgaaagaccctcgccagacagcccctggggacagccagctccgttctgtcaccctaagcaagggagtgctccccaggaaggatgctccccacaccccgctgtggccccatgtccgcctgggtctttcccaccaggcagttgtaaagaggccccactggttccaagtagcccctttttaggccaacctcaggcccctcctgcccctgccaaagccagcccgccactggacagtaagatggggcctggtgacatctcgcttcccggtcgcccaaagcccggaccatgctctagcccaggatccgctagccaggcttcatcatctcaggtcagttccctcagggtcgggtcctcacaggtgggaacagagcccggacccagtctggatgccgagggatggacacaagaagcagaagacctttcagactctaccccaacgctgcagcgaccacaggaacaggcaaccatgcggaagttttctctcggaggtcgcggagggtatgctggagtggccggatacggaacatttgccttcggcggagacgccggaggcatgttgggacagggaccaatgtgggcgaggattgcctgggcagtctcccaatcggaagaagaggaacaagaagaagcacgagcagagagccagtcggaagagcagcaagaggccagagccgagtcacccttgccacaagtctcggcccgacctgtccccgaggtcggcagagcgcctaccaggtcttcccctgaacctactccatgggaggatatcggccaggtcagcctcgtccagattagggatctgtctggcgatgccgaagcggctgacacaatctcacttgatatctccgaagttgatccggcttatctgaacctaagtgacctgtacgatatcaagtacttgccttttgagtttatgatttttcgcaaggtgccgaagagcgcacagcccgagccaccgtctccaatggcagaagaggaattagcagagttcccagagcctacctggccatggccaggtgagcttgggccacatgcgggactggaaatcacggaagagagtgaagacgtggacgcattactagccgaggctgccgtgggtaggaagcggaaatggtcttcgcccagccgctcccttttccactttcctggaaggcacttgcctttggacgaacccgcagagttaggtctgcgcgagcgagtgaaggcctctgtcgagcacatctctcgaattctgaagggccgtccagaagggttggagaaggaggggccaccacggaagaagccaggattagcttcctttcggttatcggggcttaaatcgtgggatcgggcaccgacattcctgcgcgaactctctgatgagaccgtggtgctgggccagtctgtgaccctcgcctgtcaggtgagcgcccagccggctgctcaggcgacttggagtaaggacggagcgccactggagagctcctcacgcgtgttgataagtgcaaccctaaagaacttccagctgctcactatactcgttgtcgtcgccgaggatctcggtgtctacacttgttcagtgtccaatgcccttggtacagtgacgaccaccggggtacttcgcaaggctgagagaccctcatcttccccctgcccggatatcggggaggtgtatgcggacggggtgttgttggtgtggaaacctgtggagagctacggccctgtaacctacatcgtccaatgctctttggagggcggatcttggactacacttgctagcgacatctttgactgctgctacctcacttccaagttgtcacgtggcggaacctatacattccgcaccgcatgcgtttccaaggccggaatgggcccatatagcagtccctctgagcaggtgctcctcggtggtccctcacatctggcaagcgaggaggaatcccaaggaaggagtgcccaaccccttccttccaccaaaacttttgcgttccagacccagattcaacggggacggttctcggtggtgaggcagtgttgggagaaagcaagcggaagggcactggccgcaaagatcatcccctatcaccctaaggataagacggctgttctgagagaatacgaagctctgaagggactccggcacccgcacctggcccagctgcacgccgcatatctgtctccccgacacctggtgcttattctggagctgtgttccggacctgaactgttgccatgcctggccgaacgcgcttcgtattcggagtctgaggttaaagattatctgtggcagatgctgtccgccacccagtatctacacaatcagcacatcctacatcttgatctgcggtcagagaatatgattattacagaatacaacctgctcaaggtggtcgatctgggcaacgctcagtctctttcacaggaaaaggtcctgccctctgacaagttcaaggactacttggagaccatggcaccagagctgttggaggggcagggagctgtgccccagacggacatttgggcaatcggggtgactgcattcattatgctgagcgccgagtacccagtgtcctcagaaggggctagggatttacagagaggcctcaggaaaggcttggttcgcctgtcaagatgctacgcgggtctgtccggaggagccgtggccttcctgcggtccactctgtgtgcacagccttgggggaggccttgcgcctcctcctgtttacagtgtccttggctcacagaagaaggaccggcatgctccaggccagcacctgtaacctttccgacagctcggttacgggtgttcgtacgtaaccgagaaaaaaggagagccctgctgtataaacgacataacttggcacaagttagatat

SEQ ID NO: 286285 - protein, 3739 aa, Artificial Sequence
  derived and/or modified sequence
MLVIRGASLKDAGEYTCEVEASKSTASLHVEEKANCFTEELTNLQVEEKGTAVFTCKTEHPAATVTWRKGLLELRASGKHQPSQEGLTLRLTISALEKADSDTYTCDIGQAQSRAQLLVQGRRVHIIEDLEDVDVQEGSSATFRCRISPANYEPVHWFLDKTPLHANELNEIDAQPGGYHVLTLRQLALKDSGTIYFEAGDQRASAALRVTEKPSVFSRELTDATITEGEDLTLVCETSTCDIPVCWTKDGKTLRGSARCQLSHEGHRAQLLITGATLQDSGRYKCEAGGACSSSIVRVHARPVRFQEALKDLEVLEGGAATLRCVLSSVAAPVKWCYGNNVLRPGDKYSLRQEGAMLELVVRNLRPQDSGRYSCSFGDQTTSATLTVTALPAQFIGKLRNKEATEGATATLRCELSKAAPVEWRKGSETLRDGDRYCLRQDGAMCELQIRGLAMVDAAEYSCVCGEERTSASLTIRPMPAHFIGRLRHQESIEGATATLRCELSKAAPVEWRKGRESLRDGDRHSLRQDGAVCELQICGLAVADAGEYSCVCGEERTSATLTVKALPAKFTEGLRNEEAVEGATAMLWCELSKVAPVEWRKGPENLRDGDRYILRQEGTRCELQICGLAMADAGEYLCVCGQERTSATLTIRALPARFIEDVKNQEAREGATAVLQCELNSAAPVEWRKGSETLRDGDRYSLRQDGTKCELQIRGLAMADTGEYSCVCGQERTSAMLTVRALPIKFTEGLRNEEATEGATAVLRCELSKMAPVEWWKGHETLRDGDRHSLRQDGARCELQIRGLVAEDAGEYLCMCGKERTSAMLTVRAMPSKFIEGLRNEEATEGDTATLWCELSKAAPVEWRKGHETLRDGDRHSLRQDGSRCELQIRGLAVVDAGEYSCVCGQERTSATLTVRALPARFIEDVKNQEAREGATAVLQCELSKAAPVEWRKGSETLRGGDRYSLRQDGTRCELQIHGLSVADTGEYSCVCGQERTSATLTVRAPQPVFREPLQSLQAEEGSTATLQCELSEPTATVVWSKGGLQLQANGRREPRLQGCTAELVLQDLQREDTGEYTCTCGSQATSATLTVTAAPVRFLRELQHQEVDEGGTAHLCCELSRAGASVEWRKGSLQLFPCAKYQMVQDGAAAELLVRGVEQEDAGDYTCDTGHTQSMASLSVRVPRPKFKTRLQSLEQETGDIARLCCQLSDAESGAVVQWLKEGVELHAGPKYEMRSQGATRELLIHQLEAKDTGEYACVTGGQKTAASLRVTEPEVTIVRGLVDAEVTADEDVEFSCEVSRAGATGVQWCLQGLPLQSNEVTEVAVRDGRIHTLRLKGVTPEDAGTVSFHLGNHASSAQLTVRAPEVTILEPLQDVQLSEGQDASFQCRLSRASGQEARWALGGVPLQANEMNDITVEQGTLHLLTLHKVTLEDAGTVSFHVGTCSSEAQLKVTAKNTVVRGLENVEALEGGEALFECQLSQPEVAAHTWLLDDEPVHTSENAEVVFFENGLRHLLLLKNLRPQDSCRVTFLAGDMVTSAFLTVRGWRLEILEPLKNAAVRAGAQACFTCTLSEAVPVGEASWYINGAAVQPDDSDWTVTADGSHHALLLRSAQPHHAGEVTFACRDAVASARLTVLGLPDPPEDAEVVARSSHTVTLSWAAPMSDGGGGLCGYRVEVKEGATGQWRLCHELVPGPECVVDGLAPGETYRFRVAAVGPVGAGEPVHLPQTVRLAEPPKPVPPQPSAPESRQVAAGEDVSLELEVVAEAGEVIWHKGMERIQPGGRFEVVSQGRQQMLVIKGFTAEDQGEYHCGLAQGSICPAAATFQVALSPASVDEAPQPSLPPEAAQEGDLHLLWEALARKRRMSREPTLDSISELPEEDGRSQRLPQEAEEVAPDLSEGYSTADELARTGDADLSHTSSDDESRAGTPSLVTYLKKAGRPGTSPLASKVGAPAAPSVKPQQQQEPLAAVRPPLGDLSTKDLGDPSMDKAAVKIQAAFKGYKVRKEMKQQEGPMFSHTFGDTEAQVGDALRLECVVASKADVRARWLKDGVELTDGRHHHIDQLGDGTCSLLITGLDRADAGCYTCQVSNKFGQVTHSACVVVSGSESEAESSSGGELDDAFRRAARRLHRLFRTKSPAEVSDEELFLSADEGPAEPEEPADWQTYREDEHFICIRFEALTEARQAVTRFQEMFATLGIGVEIKLVEQGPRRVEMCISKETPAPVVPPEPLPSLLTSDAAPVFLTELQNQEVQDGYPVSFDCVVTGQPMPSVRWFKDGKLLEEDDHYMINEDQQGGHQLIITAVVPADMGVYRCLAENSMGVSSTKAELRVDLTSTDYDTAADATESSSYFSAQGYLSSREQEGTESTTDEGQLPQVVEELRDLQVAPGTRLAKFQLKVKGYPAPRLYWFKDGQPLTASAHIRMTDKKILHTLEIISVTREDSGQYAAYISNAMGAAYSSARLLVRGPDEPEEKPASDVHEQLVPPRMLERFTPKKVKKGSSITFSVKVEGRPVPTVHWLREEAERGVLWIGPDTPGYTVASSAQQHSLVLLDVGRQHQGTYTCIASNAAGQALCSASLHVSGLPKVEEQEKVKEALISTFLQGTTQAISAQGLETASFADLGGQRKEEPLAAKEALGHLSLAEVGTEEFLQKLTSQITEMVSAKITQAKLQVPGGDSDEDSKTPSASPRHGRSRPSSSIQESSSESEDGDARGEIFDIYVVTADYLPLGAEQDAITLREGQYVEVLDAAHPLRWLVRTKPTKSSPSRQGWVSPAYLDRRLKLSPEWGAAEAPEFPGEAVSEDEYKARLSSVIQELLSSEQAFVEELQFLQSHHLQHLERCPHVPIAVAGQKAVIFRNVRDIGRFHSSFLQELQQCDTDDDVAMCFIKNQAAFEQYLEFLVGRVQAESVVVSTAIQEFYKKYAEEALLAGDPSQPPPPPLQHYLEQPVERVQRYQALLKELIRNKARNRQNCALLEQAYAVVSALPQRAENKLHVSLMENYPGTLQALGEPIRQGHFIVWEGAPGARMPWKGHNRHVFLFRNHLVICKPRRDSRTDTVSYVFRNMMKLSSIDLNDQVEGDDRAFEVWQEREDSVRKYLLQARTAIIKSSWVKEICGIQQRLALPVWRPPDFEEELADCTAELGETVKLACRVTGTPKPVISWYKDGKAVQVDPHHILIEDPDGSCALILDSLTGVDSGQYMCFAASAAGNCSTLGKILVQVPPRFVNKVRASPFVEGEDAQFTCTIEGAPYPQIRWYKDGALLTTGNKFQTLSEPRSGLLVLVIRAASKEDLGLYECELVNRLGSARASAELRIQSPMLQAQEQCHREQLVAAVEVTEQETKVPKKTVIIEETITTVVKSPRGQRRSPSKSPSRSPSRCSASPLRPGLLAPDLLYLPGAGQPRRPEAEPGQKPVVPTLYVTEAEAHSPALPGLSGPQPKWVEVEETIEVRVKKMGPQGVSPTTEVPRSSSGHLFTLPGATPGGDPNSNNSNNKLLAQEAWAQGTAMVGVREPLVFRVDARGSVDWAASGMGSLEEEGTMEEAGEEEGEDGDAFVTEESQDTHSLGDRDPKILTHNGRMLTLADLEDYVPGEGETFHCGGPGPGAPDDPPCEVSVIQREIGEPTVGQPVLLSVGHALGPRGPLGLFRPEPRGASPPGPQVRSLEGTSFLLREAPARPVGSAPWTQSFCTRIRRSADSGQSSFTTELSTQTVNFGTVGETVTLHICPDRDGDEAAQP

SEQ ID NO: 286286 - protein, 2757 aa, Artificial Sequence
  derived and/or modified sequence
EPKVVFAKEQPVHREVQAQAGASTTLSCEVAQAQTEVMWYKDGKKLSFSSKVRMEAVGCTRRLVVQQAGQAVAGEYSCEAGSQRLSFHLHVAEPKAVFAKEQPAHREVQAEAGASATLSCEVAQAQTEVTWYKDGKKLSSSLKVHVEAAGCTRRLVVQQAGQADTGEYSCEAGGQQLSFRLQVAEPKAVFAKEQPASREVQAEAGTSATLSCEVAQAQTEVTWYKDGKKLSSSSKVRMEAVGCTRRLVVQEAGQADAGEYSCKAGDQRLSFHLHVAEPKVVFAKEQPAHREVQAEAGASATLSCEVAQAQTEVTWYKDGKKLSSSSKVRVEAVGCTRRLVVQQAGQAEAGEYSCEAGGQQLSFRLQVAEPKAVFAKEQVVFAKDQPVHREVQAEAGTSTMLSCEVAQAQTEVMWYKDGKKLSSSSKMRVEAVGCTRRLVVQEAGQADAGEYSCEAGGQRLSFHLHVAEPKVVFAKEQPACREVQAEAGASATLSCEVAQGQMEVTWYKDGKKLSSSSKVHMEASGYTRRLVVQQAGQADAGEYSCEAGGQRLSFRLHVAELEPQISERPCRREPLVVKEHEDIILTATLATPSAATVTWLKDGVEIRRSKRHETASQGDTHTLTVHGAQVLDSAIYSCRVGAEGQDFPVQVEEVAAKFCRLLEPVCGELGGTVTLACELSPACAEVVWRCGNTQLRVGKRFQMVAEGPVRSLTVLGLRAEDAGEYVCESRDDHTSAQLTVSVPRVVKFMSGLSTVVAEEGGEATFQCVVSPSDVAVVWFRDGALLQPSEKFAISQSGASHSLTISDLVLEDAGQITVEAEGASSSAALRVREAPVLFKKKLEPQTVEERSSVTLEVELTRPWPELRWTRNATALAPGKNVEIHAEGARHRLVLHNVGFADRGFFGCETPDDKTQAKLTVEMRQVRLVRGLQAVEAREQGTATMEVQLSHADVDGSWTRDGLRFQQGPTCHLAVRGPMHTLTLSGLRPEDSGLMVFKAEGVHTSARLVVTELPVSFSRPLQDVVTTEKEKVTLECELSRPNVDVRWLKDGVELRAGKTMAIAAQGACRSLTIYRCEFADQGVYVCDAHDAQSSASVKVQGRTYTLIYRRVLAEDAGEIQFVAENAESRAQLRVKELPVTLVRPLRDKIAMEKHRGVLECQVSRASAQVRWFKGSQELQPGPKYELVSDGLYRKLIISDVHAEDEDTYTCDAGDVKTSAQFFVEEQSITIVRGLQDVTVMEPAPAWFECETSIPSVRPPKWLLGKTVLQAGGNVGLEQEGTVHRLMLRRTCSTMTGPVHFTVGKSRSSARLVVSDIPVVLTRPLEPKTGRELQSVVLSCDFRPAPKAVQWYKDDTPLSPSEKFKMSLEGQMAELRILRLMPADAGVYRCQAGSAHSSTEVTVEAREVTVTGPLQDAEATEEGWASFSCELSHEDEEVEWSLNGMPLYNDSFHEISHKGRRHTLVLKSIQRADAGIVRASSLKVSTSARLEVRVKPVVFLKALDDLSAEERGTLALQCEVSDPEAHVVWRKDGVQLGPSDKYDFLHTAGTRGLVVHDVSPEDAGLYTCHVGSEETRARVRVHDLHVGITKRLKTMEVLEGESCSFECVLSHESASDPAMWTVGGKTVGSSSRFQATRQGRKYILVVREAAPSDAGEVVFSVRGLTSKASLIVRERPAAIIKPLEDQWVAPGEDVELRCELSRAGTPVHWLKDRKAIRKSQKYDVVCEGTMAMLVIRGASLKDAGEYTCEVEASKSTASLHVEEKANCFTEELTNLQVEEKGTAVFTCKTEHPAATVTWRKGLLELRASGKHQPSQEGLTLRLTISALEKADSDTYTCDIGQAQSRAQLLVQGRRVHIIEDLEDVDVQEGSSATFRCRISPANYEPVHWFLDKTPLHANELNEIDAQPGGYHVLTLRQLALKDSGTIYFEAGDQRASAALRVTEKPSVFSRELTDATITEGEDLTLVCETSTCDIPVCWTKDGKTLRGSARCQLSHEGHRAQLLITGATLQDSGRYKCEAGGACSSSIVRVHARPVRFQEALKDLEVLEGGAATLRCVLSSVAAPVKWCYGNNVLRPGDKYSLRQEGAMLELVVRNLRPQDSGRYSCSFGDQTTSATLTVTALPAQFIGKLRNKEATEGATATLRCELSKAAPVEWRKGSETLRDGDRYCLRQDGAMCELQIRGLAMVDAAEYSCVCGEERTSASLTIRPMPAHFIGRLRHQESIEGATATLRCELSKAAPVEWRKGRESLRDGDRHSLRQDGAVCELQICGLAVADAGEYSCVCGEERTSATLTVKALPAKFTEGLRNEEAVEGATAMLWCELSKVAPVEWRKGPENLRDGDRYILRQEGTRCELQICGLAMADAGEYLCVCGQERTSATLTIRALPARFIEDVKNQEAREGATAVLQCELNSAAPVEWRKGSETLRDGDRYSLRQDGTKCELQIRGLAMADTGEYSCVCGQERTSAMLTVRALPIKFTEGLRNEEATEGATAVLRCELSKMAPVEWWKGHETLRDGDRHSLRQDGARCELQIRGLVAEDAGEYLCMCGKERTSAMLTVRAMPSKFIEGLRNEEATEGDTATLWCELSKAAPVEWRKGHETLRDGDRHSLRQDGSRCELQIRGLAVVDAGEYSCVCGQERTSATLTVRALPARFIEDVKNQEAREGATAVLQCELSKAAPVEWRKGSETLRGGDRYSLRQDGTRCELQIHGLSVADTGEYSCVCGQERTSATLTVRALPARHSRSEDQGGLRRGHSYTAV

SEQ ID NO: 286287 - DNA, 8274 bp, Artificial Sequence
  derived and/or modified sequence
gagcccaaggtggtgttcgccaaggagcagcccgtgcacagagaggtgcaggcccaggccggcgccagcaccaccctgagctgcgaggtggcccaggcccagaccgaggtgatgtggtacaaggacggcaagaagctgagcttcagcagcaaggtgagaatggaggccgtgggctgcaccagaagactggtggtgcagcaggccggccaggccgtggccggcgagtacagctgcgaggccggcagccagagactgagcttccacctgcacgtggccgagcccaaggccgtgttcgccaaggagcagcccgcccacagagaggtgcaggccgaggccggcgccagcgccaccctgagctgcgaggtggcccaggcccagaccgaggtgacctggtacaaggacggcaagaagctgagcagcagcctgaaggtgcacgtggaggccgccggctgcaccagaagactggtggtgcagcaggccggccaggccgacaccggcgagtacagctgcgaggccggcggccagcagctgagcttcagactgcaggtggccgagcccaaggccgtgttcgccaaggagcagcccgccagcagagaggtgcaggccgaggccggcaccagcgccaccctgagctgcgaggtggcccaggcccagaccgaggtgacctggtacaaggacggcaagaagctgagcagcagcagcaaggtgagaatggaggccgtgggctgcaccagaagactggtggtgcaggaggccggccaggccgacgccggcgagtacagctgcaaggccggcgaccagagactgagcttccacctgcacgtggccgagcccaaggtggtgttcgccaaggagcagcccgcccacagagaggtgcaggccgaggccggcgccagcgccaccctgagctgcgaggtggcccaggcccagaccgaggtgacctggtacaaggacggcaagaagctgagcagcagcagcaaggtgagagtggaggccgtgggctgcaccagaagactggtggtgcagcaggccggccaggccgaggccggcgagtacagctgcgaggccggcggccagcagctgagcttcagactgcaggtggccgagcccaaggccgtgttcgccaaggagcaggtggtgttcgccaaggaccagcccgtgcacagagaggtgcaggccgaggccggcaccagcaccatgctgagctgcgaggtggcccaggcccagaccgaggtgatgtggtacaaggacggcaagaagctgagcagcagcagcaagatgagagtggaggccgtgggctgcaccagaagactggtggtgcaggaggccggccaggccgacgccggcgagtacagctgcgaggccggcggccagagactgagcttccacctgcacgtggccgagcccaaggtggtgttcgccaaggagcagcccgcctgcagagaggtgcaggccgaggccggcgccagcgccaccctgagctgcgaggtggcccagggccagatggaggtgacctggtacaaggacggcaagaagctgagcagcagcagcaaggtgcacatggaggccagcggctacaccagaagactggtggtgcagcaggccggccaggccgacgccggcgagtacagctgcgaggccggcggccagagactgagcttcagactgcacgtggccgagctggagccccagatcagcgagagaccctgcagaagagagcccctggtggtgaaggagcacgaggacatcatcctgaccgccaccctggccacccccagcgccgccaccgtgacctggctgaaggacggcgtggagatcagaagaagcaagagacacgagaccgccagccagggcgacacccacaccctgaccgtgcacggcgcccaggtgctggacagcgccatctacagctgcagagtgggcgccgagggccaggacttccccgtgcaggtggaggaggtggccgccaagttctgcagactgctggagcccgtgtgcggcgagctgggcggcaccgtgaccctggcctgcgagctgagccccgcctgcgccgaggtggtgtggagatgcggcaacacccagctgagagtgggcaagagattccagatggtggccgagggccccgtgagaagcctgaccgtgctgggcctgagagccgaggacgccggcgagtacgtgtgcgagagcagagacgaccacaccagcgcccagctgaccgtgagcgtgcccagagtggtgaagttcatgagcggcctgagcaccgtggtggccgaggagggcggcgaggccaccttccagtgcgtggtgagccccagcgacgtggccgtggtgtggttcagagacggcgccctgctgcagcccagcgagaagttcgccatcagccagagcggcgccagccacagcctgaccatcagcgacctggtgctggaggacgccggccagatcaccgtggaggccgagggcgccagcagcagcgccgccctgagagtgagagaggcccccgtgctgttcaagaagaagctggagccccagaccgtggaggagagaagcagcgtgaccctggaggtggagctgaccagaccctggcccgagctgagatggaccagaaacgccaccgccctggcccccggcaagaacgtggagatccacgccgagggcgccagacacagactggtgctgcacaacgtgggcttcgccgacagaggcttcttcggctgcgagacccccgacgacaagacccaggccaagctgaccgtggagatgagacaggtgagactggtgagaggcctgcaggccgtggaggccagagagcagggcaccgccaccatggaggtgcagctgagccacgccgacgtggacggcagctggaccagagacggcctgagattccagcagggccccacctgccacctggccgtgagaggccccatgcacaccctgaccctgagcggcctgagacccgaggacagcggcctgatggtgttcaaggccgagggcgtgcacaccagcgccagactggtggtgaccgagctgcccgtgagcttcagcagacccctgcaggacgtggtgaccaccgagaaggagaaggtgaccctggagtgcgagctgagcagacccaacgtggacgtgagatggctgaaggacggcgtggagctgagagccggcaagaccatggccatcgccgcccagggcgcctgcagaagcctgaccatctacagatgcgagttcgccgaccagggcgtgtacgtgtgcgacgcccacgacgcccagagcagcgccagcgtgaaggtgcagggcagaacctacaccctgatctacagaagagtgctggccgaggacgccggcgagatccagttcgtggccgagaacgccgagagcagagcccagctgagagtgaaggagctgcccgtgaccctggtgagacccctgagagacaagatcgccatggagaagcacagaggcgtgctggagtgccaggtgagcagagccagcgcccaggtgagatggttcaagggcagccaggagctgcagcccggccccaagtacgagctggtgagcgacggcctgtacagaaagctgatcatcagcgacgtgcacgccgaggacgaggacacctacacctgcgacgccggcgacgtgaagaccagcgcccagttcttcgtggaggagcagagcatcaccatcgtgagaggcctgcaggacgtgaccgtgatggagcccgcccccgcctggttcgagtgcgagaccagcatccccagcgtgagaccccccaagtggctgctgggcaagaccgtgctgcaggccggcggcaacgtgggcctggagcaggagggcaccgtgcacagactgatgctgagaagaacctgcagcaccatgaccggccccgtgcacttcaccgtgggcaagagcagaagcagcgccagactggtggtgagcgacatccccgtggtgctgaccagacccctggagcccaagaccggcagagagctgcagagcgtggtgctgagctgcgacttcagacccgcccccaaggccgtgcagtggtacaaggacgacacccccctgagccccagcgagaagttcaagatgagcctggagggccagatggccgagctgagaatcctgagactgatgcccgccgacgccggcgtgtacagatgccaggccggcagcgcccacagcagcaccgaggtgaccgtggaggccagagaggtgaccgtgaccggccccctgcaggacgccgaggccaccgaggagggctgggccagcttcagctgcgagctgagccacgaggacgaggaggtggagtggagcctgaacggcatgcccctgtacaacgacagcttccacgagatcagccacaagggcagaagacacaccctggtgctgaagagcatccagagagccgacgccggcatcgtgagagccagcagcctgaaggtgagcaccagcgccagactggaggtgagagtgaagcccgtggtgttcctgaaggccctggacgacctgagcgccgaggagagaggcaccctggccctgcagtgcgaggtgagcgaccccgaggcccacgtggtgtggagaaaggacggcgtgcagctgggccccagcgacaagtacgacttcctgcacaccgccggcaccagaggcctggtggtgcacgacgtgagccccgaggacgccggcctgtacacctgccacgtgggcagcgaggagaccagagccagagtgagagtgcacgacctgcacgtgggcatcaccaagagactgaagaccatggaggtgctggagggcgagagctgcagcttcgagtgcgtgctgagccacgagagcgccagcgaccccgccatgtggaccgtgggcggcaagaccgtgggcagcagcagcagattccaggccaccagacagggcagaaagtacatcctggtggtgagagaggccgcccccagcgacgccggcgaggtggtgttcagcgtgagaggcctgaccagcaaggccagcctgatcgtgagagagagacccgccgccatcatcaagcccctggaggaccagtgggtggcccccggcgaggacgtggagctgagatgcgagctgagcagagccggcacccccgtgcactggctgaaggacagaaaggccatcagaaagagccagaagtacgacgtggtgtgcgagggcaccatggccatgctggtgatcagaggcgccagcctgaaggacgccggcgagtacacctgcgaggtggaggccagcaagagcaccgccagcctgcacgtggaggagaaggccaactgcttcaccgaggagctgaccaacctgcaggtggaggagaagggcaccgccgtgttcacctgcaagaccgagcaccccgccgccaccgtgacctggagaaagggcctgctggagctgagagccagcggcaagcaccagcccagccaggagggcctgaccctgagactgaccatcagcgccctggagaaggccgacagcgacacctacacctgcgacatcggccaggcccagagcagagcccagctgctggtgcagggcagaagagtgcacatcatcgaggacctggaggacgtggacgtgcaggagggcagcagcgccaccttcagatgcagaatcagccccgccaactacgagcccgtgcactggttcctggacaagacccccctgcacgccaacgagctgaacgagatcgacgcccagcccggcggctaccacgtgctgaccctgagacagctggccctgaaggacagcggcaccatctacttcgaggccggcgaccagagagccagcgccgccctgagagtgaccgagaagcccagcgtgttcagcagagagctgaccgacgccaccatcaccgagggcgaggacctgaccctggtgtgcgagaccagcacctgcgacatccccgtgtgctggaccaaggacggcaagaccctgagaggcagcgccagatgccagctgagccacgagggccacagagcccagctgctgatcaccggcgccaccctgcaggacagcggcagatacaagtgcgaggccggcggcgcctgcagcagcagcatcgtgagagtgcacgccagacccgtgagattccaggaggccctgaaggacctggaggtgctggagggcggcgccgccaccctgagatgcgtgctgagcagcgtggccgcccccgtgaagtggtgctacggcaacaacgtgctgagacccggcgacaagtacagcctgagacaggagggcgccatgctggagctggtggtgagaaacctgagaccccaggacagcggcagatacagctgcagcttcggcgaccagaccaccagcgccaccctgaccgtgaccgccctgcccgcccagttcatcggcaagctgagaaacaaggaggccaccgagggcgccaccgccaccctgagatgcgagctgagcaaggccgcccccgtggagtggagaaagggcagcgagaccctgagagacggcgacagatactgcctgagacaggacggcgccatgtgcgagctgcagatcagaggcctggccatggtggacgccgccgagtacagctgcgtgtgcggcgaggagagaaccagcgccagcctgaccatcagacccatgcccgcccacttcatcggcagactgagacaccaggagagcatcgagggcgccaccgccaccctgagatgcgagctgagcaaggccgcccccgtggagtggagaaagggcagagagagcctgagagacggcgacagacacagcctgagacaggacggcgccgtgtgcgagctgcagatctgcggcctggccgtggccgacgccggcgagtacagctgcgtgtgcggcgaggagagaaccagcgccaccctgaccgtgaaggccctgcccgccaagttcaccgagggcctgagaaacgaggaggccgtggagggcgccaccgccatgctgtggtgcgagctgagcaaggtggcccccgtggagtggagaaagggccccgagaacctgagagacggcgacagatacatcctgagacaggagggcaccagatgcgagctgcagatctgcggcctggccatggccgacgccggcgagtacctgtgcgtgtgcggccaggagagaaccagcgccaccctgaccatcagagccctgcccgccagattcatcgaggacgtgaagaaccaggaggccagagagggcgccaccgccgtgctgcagtgcgagctgaacagcgccgcccccgtggagtggagaaagggcagcgagaccctgagagacggcgacagatacagcctgagacaggacggcaccaagtgcgagctgcagatcagaggcctggccatggccgacaccggcgagtacagctgcgtgtgcggccaggagagaaccagcgccatgctgaccgtgagagccctgcccatcaagttcaccgagggcctgagaaacgaggaggccaccgagggcgccaccgccgtgctgagatgcgagctgagcaagatggcccccgtggagtggtggaagggccacgagaccctgagagacggcgacagacacagcctgagacaggacggcgccagatgcgagctgcagatcagaggcctggtggccgaggacgccggcgagtacctgtgcatgtgcggcaaggagagaaccagcgccatgctgaccgtgagagccatgcccagcaagttcatcgagggcctgagaaacgaggaggccaccgagggcgacaccgccaccctgtggtgcgagctgagcaaggccgcccccgtggagtggagaaagggccacgagaccctgagagacggcgacagacacagcctgagacaggacggcagcagatgcgagctgcagatcagaggcctggccgtggtggacgccggcgagtacagctgcgtgtgcggccaggagagaaccagcgccaccctgaccgtgagagccctgcccgccagattcatcgaggacgtgaagaaccaggaggccagagagggcgccaccgccgtgctgcagtgcgagctgagcaaggccgcccccgtggagtggagaaagggcagcgagaccctgagaggcggcgacagatacagcctgagacaggacggcaccagatgcgagctgcagatccacggcctgagcgtggccgacaccggcgagtacagctgcgtgtgcggccaggagagaaccagcgccaccctgaccgtgagagccctgcccgccagacacagcagaagcgaggaccagggcggcctgagaagaggccacagctacaccgccgtgtag

SEQ ID NO: 286288 - DNA, 9411 bp, Artificial Sequence
  derived and/or modified sequence
gagcccaaggtggtgtttgccaaggagcagccagtgcacagggaggtgcaggcccaggcgggggccagcaccacactcagctgcgaggtggctcaggcccagacggaggtgatgtggtacaaggacgggaagaagctgagcttcagctcgaaagtgcgcatggaggctgtgggctgcacacggaggctggtggtgcagcaggcgggccaggcggtcgccggggagtacagctgcgaggcggggagccagcggctctccttccacctgcacgtggcagagcccaaggcggtgtttgctaaggagcagccagcacacagggaggtgcaggctgaagcaggggctagcgccacactgagctgtgaggtggcccaggcccagacagaggtgacttggtacaaggacgggaagaagctgagctccagcttgaaagtgcatgtggaggctgcaggctgtacacggaggctggtggtgcagcaggcaggccaggcagacaccggagagtatagctgtgaggctgggggccagcagctctccttccgcctgcaagtggcagagcccaaggcggtgtttgccaaggagcagccagcgagcagggaggtgcaggctgaggcggggaccagtgccacgctgagctgcgaggtggcccaggcccagacagaggtgacgtggtacaaggacgggaagaaactgagctccagctcgaaagtgcgaatggaggccgtgggctgcacacggaggctggtggtgcaggaggcaggccaggcggacgccggggagtacagctgcaaggccggggatcagcggctgtccttccacctgcacgtggcagagcccaaggtggtgtttgccaaggagcagccagcacacagggaggtgcaggctgaggcgggggccagtgccacgctgagctgcgaggtggcccaggcccagacagaggtgacgtggtacaaggatgggaagaagctgagttccagctcgaaagtgcgcgtggaggccgtgggctgcacacggaggctggtggtgcagcaggcgggccaggcagaggccggggagtacagctgcgaggcagggggtcagcagctctccttccgcctgcaggtggcagagcccaaggcggtgtttgccaaggagcaggtggtgtttgccaaggatcagccggtgcacagggaggtgcaggctgaggcagggaccagcaccatgctgagctgcgaggtggcccaagcccagacggaggttatgtggtacaaggacgggaagaagctgagctccagctcgaaaatgcgtgtggaggccgtgggctgcacacggaggctggtggtgcaggaggcaggccaggcggacgccggggagtacagctgcgaggctgggggccagcggctctccttccatctgcatgtggctgagcccaaggtggtgtttgccaaggagcagccggcatgcagggaggtgcaggcggaggcgggggccagtgccacgctgagctgtgaggtggcccagggccagatggaggtgacatggtacaaggacgggaagaagctgagctccagctcaaaagtgcacatggaggccagcggctacacacggaggctggtagtgcagcaggcgggccaggcggatgctggggagtacagctgtgaggcggggggccaacggctgtccttccgcctgcacgtggcagagctggagccccaaatttcagagagaccctgccgcagggagcctctggtggtcaaggagcatgaagacatcatcctgaccgccacactggccacaccctctgcggccacggtgacctggctcaaggatggtgtggagattcgccgcagcaagcggcatgagacagccagccagggggacacccacaccctgaccgtgcatggcgcccaggttctggacagcgccatctacagctgccgtgtgggcgcagaggggcaggacttcccagtgcaggtggaagaggtggccgccaagttctgccggctgctggagcctgtgtgcggcgagctgggtggcacggtgacactggcctgcgagctaagcccagcgtgtgcagaggtggtgtggcgctgcggcaacacgcagcttcgggtgggcaagcgcttccagatggtggccgaggggcccgtgcgctcactcactgtgttggggctgcgcgcagaggacgcaggggagtacgtgtgtgagagccgtgatgaccacaccagtgcgcagctcaccgtcagtgtgccccgagtggtgaagtttatgtctgggctgagcaccgtggtcgcagaggagggcggcgaggccaccttccagtgcgtggtgtcccccagtgatgtggcagtcgtgtggttccgggacggtgccctgcttcagcccagcgagaagtttgccatatcacagagtggcgccagccacagcctgaccatctcagacctggtgctggaggacgcgggccagatcaccgtggaggctgagggcgcctcatcctctgctgccctgagggtccgagaggcgcctgtgctgttcaaaaagaagctggagccgcagacggtggaggagcggagctcggtgaccctggaggtggagctgacgcggccgtggccggagctgaggtggacacggaacgcgacggccctggcgccgggaaagaacgtggagatccacgccgagggcgcccgccaccgcctggttctgcacaacgtaggttttgccgaccgtggcttctttggctgcgagacgccggatgacaagacacaggccaaactcaccgtggagatgcgccaggtacggctcgtacggggcctgcaggcagtggaggcacgggagcagggcacggctaccatggaggtgcagctgtcgcatgcggacgtggatggcagctggactcgtgacggtctgcggttccagcaggggcccacgtgccacctggctgtgcggggccccatgcacaccctcacactctcggggctgcggccagaggatagtggccttatggtcttcaaggccgaaggagtgcacacgtcggcgcggctcgtggtcaccgagcttcccgtgagcttcagccgcccgctgcaggacgtggtgaccactgagaaggagaaggttaccctggagtgcgagctgtcgcgtcctaatgtggatgtgcgctggctgaaggacggtgtggagctgcgggcaggcaagacgatggccatcgcagcccagggcgcctgcaggagcctcaccatttaccggtgcgagttcgcggatcagggagtgtatgtgtgtgatgcccatgatgcccagagctctgcctccgtgaaggtacaaggaaggacatacactctcatctaccggagagtcctggcggaagatgcaggagagatccaatttgtagccgaaaatgcagaatcgcgagcccagctccgagtgaaggagctgccagtgaccctcgtgcgcccgctgcgggacaagattgccatggagaagcaccgcggtgtgctggagtgtcaggtgtcccgggccagcgcccaggtgcggtggttcaagggcagtcaggagctgcagcccgggcccaagtacgagctggtcagtgatggcctctaccgcaagctgatcatcagtgatgtccacgcagaggacgaggacacctacacctgtgacgccggtgatgtcaagaccagtgcacagttcttcgtggaagagcaatccatcaccattgtgcggggtctgcaggacgtgacagtgatggagcccgctcctgcctggtttgagtgtgagacctccatcccctcagtgcggccacctaagtggctcctggggaagacggtgttgcaggctggggggaacgtgggcctggagcaggagggcacggtgcaccggctgatgctgcggcggacctgctccaccatgaccgggcccgtgcacttcaccgttggcaagtcgcgctcctctgcccgcctggtggtctcagacatccccgtagtcctcacacggccgttggagcccaagacagggcgtgagctgcagtcagtggtcctgtcctgcgacttccggccagcccccaaggctgtgcagtggtacaaggatgacacgcccctgtctccctctgagaagtttaagatgagcctggagggtcagatggctgagctgcgcatcctccggctcatgcctgctgatgctggtgtctaccggtgccaggcgggcagtgcccacagcagcactgaggtcactgtggaagcgcgggaggtgacagtgacagggccgctacaggatgcagaggccacggaggagggctgggccagcttctcctgtgagctgtcccacgaggatgaggaggtcgagtggtcgctcaacgggatgcccctgtacaacgacagcttccatgagatctcacacaagggccggcgccacacgctggtactgaagagcatccagcgggctgatgcgggcatagtacgcgcctcctccctgaaggtgtcgacctctgcccgcctggaggtccgagtgaagccggtggtgttcctgaaggcgctggatgacctgtccgcagaggagcgcggcaccctggccctgcagtgtgaagtctctgaccccgaggcccatgtggtgtggcgcaaagatggcgtgcagctgggccccagtgacaagtatgacttcctgcacacggcgggcacgcgggggctcgtggtgcatgacgtgagccctgaagacgccggcctgtacacctgccacgtgggctccgaggagacccgggcccgggtccgcgtgcacgatctgcacgtgggcatcaccaagaggctgaagacaatggaggtgctggaaggggaaagctgcagctttgagtgcgtcctgtcccacgagagtgccagcgacccggccatgtggacagtcggtgggaagacagtgggcagctccagccgcttccaggccacacgtcagggccgaaaatacatcctggtggtccgggaggctgcaccaagtgatgccggggaggtggtcttctctgtgcggggcctcacctccaaggcctcactcattgtcagagagaggccggccgccatcatcaagcccctggaagaccagtgggtggcgccaggggaggacgtggagctgcgctgtgagctgtcacgggcgggaacgcccgtgcactggctgaaggacaggaaggccatccgcaagagccagaagtatgatgtggtctgcgagggcacgatggccatgctggtcatccgcggggcctcgctcaaggacgcgggcgagtacacgtgtgaggtggaggcttccaagagcacagccagcctccatgtggaagaaaaagcaaactgcttcacagaggagctgaccaatctgcaggtggaggagaaaggcacagctgtgttcacgtgcaagacggagcaccccgcggccacagtgacctggcgcaagggcctcttggagctacgggcctcagggaagcaccagcccagccaggagggcctgaccctgcggctcaccatcagtgccctggagaaggcagacagcgacacctatacctgcgacattggccaggcccagtcccgggcccagctcctagtgcaaggccggagagtgcacatcatcgaggacctggaggatgtggatgtgcaggagggctcctcggccaccttccgttgccggatctccccggccaactacgagcctgtgcactggttcctggacaagacacccctgcatgccaacgagctcaatgagatcgatgcccagcccgggggctaccacgtgctgaccctgcggcagctggcgctcaaggactcgggcaccatctactttgaggcgggtgaccagcgggcctcggccgccctgcgggtcactgagaagccaagcgtcttctcccgggagctcacagatgccaccatcacagagggtgaggacttgaccctggtgtgcgagaccagcacctgcgacattcctgtgtgctggaccaaggatgggaagaccctgcgggggtctgcccggtgccagctgagccatgagggccaccgggcccagctgctcatcactggggccaccctgcaggacagtggacgctacaagtgtgaggctgggggcgcctgcagcagctccattgtcagggtgcatgcgcggccagtgcggttccaggaggccctgaaggacctggaggtgctggagggtggtgctgccacactgcgctgtgtgctgtcatctgtggctgcgcccgtgaagtggtgctatggaaacaacgtcctgaggccaggtgacaaatacagcctacgccaggagggtgccatgctggagctggtggtccggaacctccggccgcaggacagcgggcggtactcatgctccttcggggaccagactacttctgccaccctcacagtgactgccctgcctgcccagttcatcgggaaactgagaaacaaggaggccacagaaggggccacggccacgctgcggtgtgagctgagcaaggcagcccctgtggagtggagaaaggggtccgagaccctcagagatggggacagatactgtctgaggcaggacggggccatgtgtgagctgcagatccgtggcctggccatggtggatgccgcggagtactcgtgtgtgtgtggagaggagaggacctcagcctcactcaccatcaggcccatgcctgcccacttcataggaagactgagacaccaagagagcatagaaggggccacagccacgctgcggtgtgagctgagcaaggcggcccccgtggagtggaggaaggggcgtgagagcctcagagatggggacagacatagcctgaggcaggacggggctgtgtgcgagctgcagatctgtggcctggctgtggcagatgctggggagtactcctgtgtgtgtggggaggagaggacctctgccactctcaccgtgaaggccctgccagccaagttcacagagggtctgaggaatgaagaggccgtggaaggggccacagccatgttgtggtgtgaactgagcaaggtggcccctgtggagtggaggaaggggcccgagaacctcagagatggggacagatacatcctgaggcaggaggggaccaggtgtgagctgcagatctgtggcctggccatggcggacgccggggagtacttgtgtgtgtgcgggcaggagaggacctcagccacgctcaccatcagggctctgcctgccaggttcatagaagatgtgaaaaaccaggaggccagagaaggggccacagctgtgctgcagtgtgagctgaacagtgcagcccctgtggagtggagaaaggggtctgagacccttagagatggggacagatacagcctgaggcaggacgggactaaatgtgagctgcagattcgtggcctggccatggcagacactggggagtactcgtgcgtgtgcgggcaggagaggacctcggctatgctcaccgtcagggctctacccatcaagttcacagagggtctgaggaacgaagaggccacagaaggggcaacagccgtgctgcggtgtgagctgagcaagatggcccccgtggagtggtggaaggggcatgagaccctcagagatggagacagacacagcctgaggcaggacggggccaggtgtgagctgcagatccgcggcctcgtggcagaggacgctggggagtacctgtgcatgtgcgggaaggagaggacctcagccatgctcaccgtcagggccatgccttccaagttcatagagggtctgaggaatgaagaggccacagaaggggacacggccacgctgtggtgtgagctgagcaaggcggcaccggtggagtggaggaaggggcatgagaccctcagagatggggacagacacagcctgaggcaggacgggtccaggtgtgagctgcagatccgtggcctggctgtggtggatgccggggagtactcgtgtgtgtgcgggcaggagaggacctcagccacactcactgtcagggccctgcctgccagattcatagaagatgtgaaaaaccaggaggccagagaaggggccacggccgtgctgcaatgtgagctgagcaaggcggcccccgtggagtggaggaaggggtctgagaccctcagaggtggggacagatacagcctgaggcaggatgggaccagatgtgagctgcagattcatggcctgtctgtggcagacactggggagtactcgtgtgtgtgcgggcaggagaggacctcggccacactcaccgtcagggccctgcctgcacgacactcaagatctgaagaccaaggaggcctcagaaggggccacagctacactgcagtgtgagctgagcaaggtggcccctgtggaatggaagaagggtcctgagaccctcagagatgggggcagatacagcctgaagcaggatgggacgaggtgtgagctgcagatccatgacctgtctgtggcggatgctggggaatactcatgcatgtgtggacaagagaggacctcggccacgctcactgtcagggccctgcctgccaggttcacagagggtctgaggaatgaagaggccatggaaggggccacagccacactgcaatgtgagctgagcaaggcagcccctgtggagtggaggaaaggccttgaggctctcagagatggggacaaatacagcctgagacaagacggggctgtgtgtgagctgcagattcatggcctggctatggcagataacggggtgtactcatgtgtgtgtgggcaggagaggacctcagctacactcactgtcagggccctgcctgccagattcatagaggatatgagaaaccagaaggccacagaaggggctacagtcacattgcaatgtaagctgagaaaggcggcccccgtggagtggagaaaggggcccaacaccctcaaagatggggacaggtacagcctgaagcaggatgggaccagttgtgagctgcagattcgtggcctggtcatagcagatgctggagaatactcgtgcatatgtgagcaggagaggacctcggccacgctcactgtcagggccctgccggccagattcatagaagatgtgagaaatcacgaggccacagaaggggccacagctgtgctgcagtgtgagctgagcaaggcggcccccgtggagtggcggaaggggtctgagaccctcagagatggggacagatatagcctgaggcaggacgggacgaggtgtgagctgcagattcgtggcctggctgtggaggacactggagagtatttgtgtgtgtgcgggcaggagagaacctcagctacactcactgtcagggccctgccagccagattcatagacaacatgacaaaccaggaggccagagaaggggccacggccacactgcactgtgaactgagcaaggtggcccctgtggagtggaggaagggacctgaaaccctccgagatggggacagacacagcctgaggcagga

SEQ ID NO: 286289 - DNA, 8274 bp, Artificial Sequence
  derived and/or modified sequence
gagccaaaggtagtgtttgcgaaagagcagcctgtccacagagaggtccaggcgcaggcaggagcctccacgaccctgagctgtgaagtggcccaagcgcagacagaggttatgtggtataaagacggcaagaagctttccttcagctccaaggtgcgcatggaagcagtcgggtgtaccaggcgcttggtcgtccagcaggccggccaggccgtagccggagagtacagctgtgaagccgggtctcagagactctcctttcaccttcatgtcgccgaaccaaaggccgtcttcgccaaggagcagccagcccacagggaagtgcaggccgaagccggggccagcgcgactctgagttgcgaggtggcccaagcgcagacagaagtgacttggtacaaggacggtaaaaaactgagctcatcactgaaagtgcatgtagaagccgccggatgtactagaaggctcgtagttcagcaagcaggacaggccgatactggagaatacagttgcgaggctggtgggcagcagttatcctttagactccaggtagccgaacctaaagctgtcttcgctaaggaacaaccagcttcccgcgaggtccaagccgaggccgggaccagcgctactctatcctgtgaagtggcacaagcccagaccgaagtgacctggtacaaagatggaaaaaagttgagcagctccagcaaagttagaatggaggcggtgggctgtaccagacgtctcgtcgtgcaggaagccggccaggctgatgccggcgagtatagctgcaaggccggtgatcaacgattgtcattccatctgcatgtagccgagcctaaggtagtttttgctaaagaacagcctgctcaccgagaagttcaggctgaagctggcgccagtgctacactcagttgcgaggtcgctcaggcccagactgaagtgacatggtacaaggacggcaagaaactctcttcgtctagcaaagtgcgggtggaagctgtcggctgtactcggaggttggtggtccaacaggccggacaggcagaggctggcgaatactcatgcgaggctgggggccagcagcttagcttccggctacaggtggccgaacctaaagctgtctttgctaaggaacaggtcgtgttcgcgaaggatcagcctgtgcatcgggaggtgcaggcagaggctggaacatctacgatgctgtcttgcgaagtcgcccaggcacagaccgaggttatgtggtataaagacggaaaaaaactcagttcctcaagcaagatgagagtggaagcggtggggtgcactcgccgcttagttgtgcaggaagcaggccaggctgacgctggagagtactcatgtgaggcgggagggcagcgcctctcctttcatctgcacgtggcggagcccaaggtggtgttcgctaaggaacagcccgcttgcagggaagtgcaagcagaggcaggtgcctccgctaccttatcctgcgaggtggcacagggccaaatggaggtcacctggtataaagatggcaaaaaactgtcaagctccagcaaggtccacatggaggccagcggctataccaggcgcctcgtggttcagcaggcaggacaggctgacgctggcgagtattcctgcgaggctggaggccaaagattatccttcagactccacgttgccgaactagagccccagatttctgaacgaccgtgcaggcgcgagcctttggttgtgaaagaacacgaggacatcattttaacagcgacgttggctactcctagtgccgccactgtgacatggctgaaagatggcgttgagatccgacgttccaagagacatgagacagcttcccagggggatacacatacactcactgttcacggggctcaagtgttagattccgccatctactcttgcagagtaggtgcagagggccaagattttccagtacaggttgaggaggtggccgctaaattctgccgcctattggagccagtctgcggtgaacttggcggaactgttacgctggcctgtgagctcagccccgcgtgtgcagaagtcgtctggcggtgcgggaacacccagctgagagtaggtaagcgatttcagatggtagctgaaggcccggtgagatccctgaccgtgctgggtctgcgggccgaagacgcaggagagtatgtttgcgaaagccgtgacgaccatactagcgcacagctcactgtcagcgtgccacgcgtcgttaagtttatgtcaggactctccaccgttgttgctgaagaggggggcgaagcaacttttcagtgtgtggtaagccccagcgatgtggctgttgtatggtttagagatggggcgctgttgcaaccgtcagaaaagttcgccatttcacaatctggcgccagtcactccctaaccatatccgacctggttcttgaggacgccggccagattaccgtcgaggctgaaggggcctcgagttccgccgccctgagggtacgggaggcacctgttctgtttaagaaaaagttagaacctcagaccgtggaggaacgctcctccgtcacactcgaagtggagctgaccaggccttggcccgaactccgatggaccaggaatgccacagcgctggcccccggcaagaacgtggagattcacgcggaaggtgccaggcaccggttggtgctgcataacgtgggcttcgccgaccgtggctttttcgggtgcgaaaccccagacgacaaaacacaggccaagctcacggtggagatgcgccaggtacgtctggttcgaggattacaggctgtcgaggctagagagcaaggcaccgctactatggaagtgcagctgtcgcacgccgatgtagacggaagctggacacgggacggcctgagatttcaacaggggcctacctgtcacctggccgtgcgcggccctatgcacacattgaccctgtcgggacttcgccctgaagacagcgggctaatggtgtttaaggccgagggcgtgcatacgagtgcaagactggtcgtgaccgagcttcctgtttccttctcccgaccgcttcaggatgtggtgactactgagaaggagaaagtcactctggagtgcgaactgagccgtccaaatgtggacgtgcgctggctgaaggatggtgttgaacttagggccgggaaaaccatggcgatagcagcccaaggagcgtgccgcagtctcactatttaccggtgtgagtttgctgaccagggtgtttacgtgtgtgacgctcatgatgctcagtcttcagctagcgtgaaggtccaaggaaggacatatacactgatatacagacgcgtgcttgcggaggacgccggggaaatccaatttgtggccgagaatgccgagtctcgcgcacagctcagagtgaaagaactgcccgtgacactagtgaggcccttgcgggataagatcgctatggagaagcataggggagtgttggagtgccaagtgagccgcgcttcagcacaagttagatggtttaaaggtagccaggagttacaaccaggaccaaaatatgaactggtgagtgatggactctaccgcaaactcatcattagtgacgtgcacgcagaggacgaagatacatacacatgcgacgccggagatgttaagacatcagcacagttcttcgtcgaggagcagagcattaccattgtccgcggtcttcaggacgtgacagtcatggagcccgcccctgcgtggtttgagtgcgagacttcaattccgtcagttaggccacccaaatggttactcggtaagactgtcctacaggcaggaggtaatgtgggcttggaacaggaggggacagtgcaccgcctgatgcttagacggacatgcagtaccatgaccggccccgtgcacttcacagtgggaaaatctcggtcgagtgcccgcctcgtcgtgtctgatatccccgttgtgttaacccgcccgctggagccaaagaccgggcgcgaactacaaagtgttgtgctgagctgtgacttccgccctgctcccaaagctgtgcagtggtataaagacgacacacccctgagtccaagcgagaagttcaagatgtcccttgaagggcagatggcggagcttaggattctgagactcatgcccgctgacgctggtgtgtatcgatgtcaggcgggatctgctcacagcagcactgaagtgaccgtggaagctagggaagtcaccgtgactggtcccctccaagacgccgaggccacggaggaaggatgggccagtttctcttgcgaactgtcgcacgaggatgaagaggttgagtggagcctgaatggcatgcctctctataacgacagcttccacgagatttcccacaaaggacgccgccatacactcgtgctgaagtctatccaacgagctgatgccggtatcgtgcgggctagctctctgaaggtgagcacttccgctcgactcgaggtgagagtaaaaccggtagtttttttaaaagcccttgatgatttgagcgccgaggagcgaggaactcttgcactacaatgcgaggtgtcagaccccgaggcgcatgtggtctggaggaaagacggggtgcagctgggcccctccgacaaatacgacttcctacacacggctggcacccggggcctggtggtccatgacgtgagtcccgaggacgcaggcctgtatacatgccacgttgggtctgaggaaacaagggcacgcgttcgggtgcacgatttacacgttgggatcacgaaacggttgaagacaatggaggtgctggaaggagaatcttgttcttttgagtgtgtgttgtcccacgagtctgcttctgatccagccatgtggacagtgggaggaaagacagtgggttcatcttctcgtttccaggcaacccgtcaggggaggaagtacatcctcgtcgtgcgggaagctgctccctccgatgccggggaagtggtattctccgtaaggggcttgacatctaaagcttctctgatcgttagggaacgacccgcggctatcattaagcctctggaggatcagtgggtggctccaggtgaggacgtcgaactgagatgcgaactatcccgggctggtacgcccgtgcactggcttaaggacagaaaggcaatacgaaaatctcagaaatacgatgtggtatgtgagggcacaatggccatgctggtgattcggggcgcctccttgaaagatgccggagagtacacctgcgaagtggaagccagcaagtctacagcaagcctccacgtggaggaaaaagccaactgtttcaccgaggaactgactaacctgcaagtggaagaaaagggaaccgccgtctttacctgcaaaaccgagcaccctgccgcaacagtcacctggagaaaggggctgttggaactccgtgccagcggtaaacaccagccctcccaggagggcttgacactgcggctgacaatatcagccctggaaaaagctgatagtgacacctacacgtgtgacattggacaggcacagtcacgcgctcagctactcgtccagggacggcgggtgcacatcatcgaggatctggaggatgtggacgtccaggaagggagttctgccacattcagatgccgaatttcaccggcaaattacgagcccgtccactggtttctggacaagacccccctccacgctaatgaactgaacgaaatcgacgctcaaccaggcggttatcatgttctcactttgcggcagctggcgctgaaggattccgggactatctacttcgaagccggggaccagagggccagtgcagctctacgcgtcactgagaaaccctctgtcttttctcgggagttaaccgacgccaccattacggaaggcgaggacctgactctcgtgtgtgagacttccacctgcgatattccagtgtgttggacaaaggatggaaagacgttgcgcggaagcgctaggtgccaactatcccacgagggccaccgggctcagctgctgataaccggagctacattgcaggactccggccgatacaaatgtgaggctggtggagcgtgttcctcgtcaattgtgcgtgtccatgcaagacccgtacgtttccaggaagccctcaaggatcttgaggtgctggaagggggagcagccacccttcggtgtgtcctgtcatctgtggcagcccctgtaaagtggtgttatggcaacaatgtcctccgccccggggacaaatattccttaaggcaggaaggtgccatgctcgagctggtggtgagaaatctccggcctcaggattcagggagatactcttgctctttcggagatcagacgacatctgctaccctgaccgtgacagccctgccagcgcagttcattggcaagctccgtaacaaggaggccaccgagggagcaactgcgacactacggtgtgaacttagcaaagctgcgccggtcgaatggaggaaggggagtgaaaccttaagggatggggacagatactgtttacgacaggatggcgcgatgtgtgaactccagattagaggactcgccatggtagatgcggccgaatacagttgcgtgtgtggcgaggaacgcacgtcggcatcacttacaatccgacctatgcctgcccattttattggaagactgcggcatcaagaaagcatcgagggggcaacggccacgcttcgatgcgagctgtctaaggcagcacctgtggaatggcggaaaggacgggaaagtttgcgtgatggggatcgccacagtctacggcaggatggcgccgtctgtgagctccagatctgtggtttagcggtggccgacgccggtgaatatagctgtgtgtgtggggaagagagaacctcagctactttgacagttaaggcgttgcccgcaaagtttacagagggccttcgcaacgaggaagctgttgagggggccacagccatgctgtggtgtgaactgtcaaaggttgcccccgtcgagtggcgtaaaggacctgaaaatctgcgggacggcgatcgctatatcttgcgacaagaagggacccgctgcgagctgcagatatgcggactcgccatggcagatgcgggggagtatttgtgcgtctgtggccaggagaggaccagcgctactctgaccattagagctctgcctgcacgattcatcgaagacgtcaaaaaccaggaagctagggaaggggcaaccgccgtgctgcagtgcgaacttaattccgccgcacccgtcgagtggcggaagggctctgaaaccctgcgggatggggacaggtacagtctgcgacaggatgggactaaatgcgaactccaaattcggggtctcgctatggcagacactggagagtattcttgcgtgtgtgggcaggagcgcacctcagcgatgctaacagtgcgagccctgcccattaagttcacggaggggcttaggaacgaagaggccactgaaggggccacagctgtgttacgatgtgaattgtctaaaatggccccagtggaatggtggaagggacacgaaaccctacgggatggggataggcactctttgcgccaggacggtgcccgctgcgagcttcaaatcagaggactggtggctgaggacgccggcgaatacctctgcatgtgtggcaaagagcgaaccagcgctatgctgaccgtgcgcgccatgccgtccaaattcattgagggattgagaaacgaggaggccacggagggtgatactgcaaccctttggtgcgaactatccaaggctgcgcccgtggagtggcggaaagggcacgaaaccttacgggacggggatcggcactctcttcggcaagacggcagtcggtgcgagctccagattagaggcctagctgtagtggacgctggagagtattcatgcgtgtgcgggcaggagcgaactagtgcgaccctgaccgtaagggcgctgccagcccgatttatagaagatgtgaaaaaccaagaggcgagagaaggtgccaccgctgttcttcaatgtgagctttccaaagccgcacccgtggagtggcgtaaaggaagtgagactctgagaggcggtgacaggtactcattgcggcaagacgggacaagatgtgagctgcagatccatggcctgtctgtggcggacactggcgaatactcctgtgtgtgcggccaggagagaacaagcgcaacactgaccgtgcgggcgcttccagccaggcattcaaggtccgaggatcaaggtggccttcggagaggacacagctacacagccgtatag

SEQ ID NO: 286290 - DNA, 25575 bp, Artificial Sequence
  derived and/or modified sequence
gctgcccagagcccccatagagagaggtccccgccgccaccctcatggatcagccacagttcagcggggcgccccgctttctcacccggcccaaggccttcgtggtgtcggtgggcaaggacgccaccctcagctgccagatcgtgggtaatcccacgccacaggtgagctgggagaaggaccagcagccggtggcggccggcgcgcgcttccgtctggcccaggacggcgacctctaccgcctcactatcctggacctggcgctgggcgacagtgggcaatacgtgtgccgcgcgcgcaatgccataggcgaggccttcgctgctgtgggcctgcaggtggacgcggaggccgcgtgcgccgagcaggcgccgcacttcctgctgcggcccacgtccatccgcgtgcgcgagggctcagaggccaccttccgctgccgcgtgggtggctccccgaggccggcagtgagctggtccaaggacgggcggcgcctgggtgagcccgacggcccccgcgtgcgcgtggaggagctcggcgaggcaagtgcgctgcgcattcgggcggcgcggccgcgcgacggcggcacttacgaggtccgcgccgagaacccgctgggcgctgccagcgccgccgcggcgctagtggtggactcggacgccgcggacacggccagccggcccgggacctccacggccgcgctcctggcgcacctgcagcggcggcgcgaggctatgcgcgccgagggcgcccccgcctcaccgcccagcaccggcacgcgcacctgcacggtgactgaaggcaagcacgcgcgcctcagctgctacgtgaccggcgagcccaagcccgagacggtgtggaagaaggacggccagctggtgaccgagggccggcgccacgtggtgtacgaggacgcgcaggagaacttcgtgctcaagatcctcttctgcaagcagtcggaccgcggcctctacacctgcacggcgtccaacctcgtgggccagacctacagctctgtgctggtcgtagtgcgcgagcccgcggttcccttcaaaaagcggctgcaagatctggaggtgcgggagaaggagtcggccacgttcctatgtgaggtgccccagccgtccactgaggccgcgtggttcaaggaggagacgcggttgtgggcgagcgccaagtacggcatcgaggaggagggcaccgagcgccgcctgaccgtgcgcaatgtctcggccgacgacgacgcggtgtacatctgcgagacgccagagggcagccgcacggtggcggagctcgcagtccaaggaaacctcctccgaaagctccctcggaagacggcggtgcgcgtgggcgacacggctatgttttgcgtggagctggcggtcccggtgggccccgtccactggctgcggaaccaggaggaagtggtggcggggggccgcgtggccatctccgcggagggcacgcgccacacactaaccatctcccagtgctgcctggaggatgtgggccaggtggcctttatggctggcgactgccagacgtccacccagttctgcgtgtcggcccccaggaagcctcccctgcaaccccctgtggatcctgtggtaaaggccaggatggagagttccgtgattctcagctggtccccaccaccccatggggaacgccctgtcactatcgacggctacctggtagagaagaagaagcttggcacctacacctggatcaggtgccacgaggctgaatgggtggctacacctgagctgaccgtggctgatgtggcggaggaggggaacttccagttccgagtgtccgctctcaacagctttggtcagagtccctacctcgagttcccggggactgtccacctggcccccaagctggccgtgaggacaccgctgaaggcggtgcaggcggtagagggtggcgaggtcactttctccgtggacctcacggtggcctcagcgggtgagtggttcctggatgggcaggccctgaaggccagcagtgtgtatgagatccactgtgatcgcacccggcacacgctcaccatccgggaggtgcccgccagcctgcacggggcgcagctgaagttcgtggccaacggcattgagagcagcatccggatggaggtccgggcggccccagggctgactgccaacaagccgccagccgcagctgcccgggaggtgctggctcggctgcacgaggaggcgcagctgctggctgagctgtcagatcaggctgcggctgtgacgtggctgaaggatggtcgcacactgtccccaggccccaagtatgaggtgcaggcatcggccgggcggcgggtgctccttgtgcgagatgtggcccgggacgatgcaggcctctacgagtgcgtcagccgcgggggccgcatcgcctaccagctctccgtgcaaggcctcgcgcgctttctgcacaaggacatggcgggcagctgtgtggatgccgtggctgggggcccggcgcagtttgagtgtgagacctccgaagcccacgtccacgtgcactggtacaaggatggcatggagctgggccactccggtgagcgcttcttgcaggaggatgtggggacgcggcaccggctggtggcagccacagtcaccaggcaggatgaaggcacctactcctgccgcgtgggcgaggactctgtggacttccggctccgcgtctctgagcccaaggtggtgtttgctaaggagcagctggcacgcaggaagctgcaggcagaggcaggagccagtgccacactgagctgcgaggtggcccaggcccagacggaggtgacgtggtacaaggatgggaagaagctgagctccagctcgaaagtgtgcatggaggccacaggctgcacgcgcaggctggttgtgcagcaggcaggccaggcggatgccggggagtatagctgcgaggctgggggccagcggctctccttccatctggatgtcaaagagcccaaggtggtgtttgccaaggaccaggtggcacacagtgaggtgcaggctgaggcaggggccagtgccacgctgagctgcgaggtggcccaggcccagacggaggtgatgtggtacaaagatgggaagaagctgagctccagcttgaaagtgcatgtagaggccaagggctgcagacggaggctggtggtgcagcaggcaggcaagacagatgccggggactacagctgcgaggccaggggccagagggtctccttccgcctgcacatcacagagcccaagatgatgtttgcaaaggagcagtcagtgcataatgaggtgcaggctgaggcgggggccagtgccatgctgagctgtgaggtggcccaggcccagacggaggtgacgtggtacaaggatgggaagaagctgagctccagctcaaaagtgggcatggaggtcaaagggtgcacacggaggctggtgctgccacaggcgggcaaagcagatgctggggagtacagctgtgaggctgggggccagagagtctccttccacctgcacatcacagagcccaagggggtgtttgcgaaggagcagtcagtgcataatgaggtgcaggctgaggcggggaccactgccatgctgagctgtgaggtggcccagccccagacagaggtgacgtggtacaaggacgggaagaagctgagctccagctcaaaagtacgcatggaggtcaagggctgcacacgaaggctggtagtgcagcaggtgggcaaagcagatgctggggagtacagctgcgaggctgggggccagagagtctcctttcaactgcacatcacagagcccaaggcagtgtttgccaaggagcagttggtgcataatgaggtgcggactgaggcaggggccagtgccacactgagctgtgaggtggcccaggcccagacagaggtgacgtggtacaaggatgggaagaagctgagctccagttcgaaagtgcgcatagaggctgcgggctgcatgcggcagctggtggtgcagcaggcaggccaggcagatgctggggagtacacctgtgaggctgggggccagcggctctccttccacctggatgtttcagagcccaaggcggtgtttgcaaaggagcagctggcacacaggaaggtgcaggccgaggcgggggccattgccacgctgagctgcgaggtggcccaggcccagacagaggtgacgtggtacaaggacgggaagaagctgagctccagctcgaaagttcgaatggaggctgtgggctgcacacggaggctggtggtgcagcaggcatgccaggcggacaccggggagtatagctgcgaggccgggggccagcggctctccttcagcctggacgtggcagagcccaaggtggtgtttgccaaggagcagccagtgcacagggaggtgcaggcccaggcgggggccagcaccacactcagctgcgaggtggctcaggcccagacggaggtgatgtggtacaaggacgggaagaagctgagcttcagctcgaaagtgcgcatggaggctgtgggctgcacacggaggctggtggtgcagcaggcgggccaggcggtcgccggggagtacagctgcgaggcggggagccagcggctctccttccacctgcacgtggcagagcccaaggcggtgtttgccaaggagcagccagcgagcagggaggtgcaggctgaggcggggaccagtgccacgctgagctgcgaggtggcccaggcccagacagaggtgacgtggtacaaggacgggaagaaactgagctccagctcgaaagtgcgaatggaggccgtgggctgcacacggaggctggtggtgcaggaggcaggccaggcggacgccggggagtacagctgcaaggccggggatcagcggctgtccttccacctgcacgtggcagagcccaaggtggtgtttgccaaggagcagccagcacacagggaggtgcaggctgaggcgggggccagtgccacgctgagctgcgaggtggcccaggcccagacagaggtgacgtggtacaaggatgggaagaagctgagttccagctcgaaagtgcgcgtggaggccgtgggctgcacacggaggctggtggtgcagcaggcgggccaggcagaggccggggagtacagctgcgaggcagggggtcagcagctctccttccgcctgcaggtggcagagctggagccccaaatttcagagagaccctgccgcagggagcctctggtggtcaaggagcatgaagacatcatcctgaccgccacactggccacaccctctgcggccacggtgacctggctcaaggatggtgtggagattcgccgcagcaagcggcatgagacagccagccagggggacacccacaccctgaccgtgcatggcgcccaggttctggacagcgccatctacagctgccgtgtgggcgcagaggggcaggacttcccagtgcaggtggaagaggtggccgccaagttctgccggctgctggagcctgtgtgcggcgagctgggtggcacggtgacactggcctgcgagctaagcccagcgtgtgcagaggtggtgtggcgctgcggcaacacgcagcttcgggtgggcaagcgcttccagatggtggccgaggggcccgtgcgctcactcactgtgttggggctgcgcgcagaggacgcaggggagtacgtgtgtgagagccgtgatgaccacaccagtgcgcagctcaccgtcagtgtgccccgagtggtgaagtttatgtctgggctgagcaccgtggtcgcagaggagggcggcgaggccaccttccagtgcgtggtgtcccccagtgatgtggcagtcgtgtggttccgggacggtgccctgcttcagcccagcgagaagtttgccatatcacagagtggcgccagccacagcctgaccatctcagacctggtgctggaggacgcgggccagatcaccgtggaggctgagggcgcctcatcctctgctgccctgagggtccgagaggcgcctgtgctgttcaaaaagaagctggagccgcagacggtggaggagcggagctcggtgaccctggaggtggagctgacgcggccgtggccggagctgaggtggacacggaacgcgacggccctggcgccgggaaagaacgtggagatccacgccgagggcgcccgccaccgcctggttctgcacaacgtaggttttgccgaccgtggcttctttggctgcgagacgccggatgacaagacacaggccaaactcaccgtggagatgcgccaggtacggctcgtacggggcctgcaggcagtggaggcacgggagcagggcacggctaccatggaggtgcagctgtcgcatgcggacgtggatggcagctggactcgtgacggtctgcggttccagcaggggcccacgtgccacctggctgtgcggggccccatgcacaccctcacactctcggggctgcggccagaggatagtggccttatggtcttcaaggccgaaggagtgcacacgtcggcgcggctcgtggtcaccgagcttcccgtgagcttcagccgcccgctgcaggacgtggtgaccactgagaaggagaaggttaccctggagtgcgagctgtcgcgtcctaatgtggatgtgcgctggctgaaggacggtgtggagctgcgggcaggcaagacgatggccatcgcagcccagggcgcctgcaggagcctcaccatttaccggtgcgagttcgcggatcagggagtgtatgtgtgtgatgcccatgatgcccagagctctgcctccgtgaaggtacaaggaaggacatacactctcatctaccggagagtcctggcggaagatgcaggagagatccaatttgtagccgaaaatgcagaatcgcgagcccagctccgagtgaaggagctgccagtgaccctcgtgcgcccgctgcgggacaagattgccatggagaagcaccgcggtgtgctggagtgtcaggtgtcccgggccagcgcccaggtgcggtggttcaagggcagtcaggagctgcagcccgggcccaagtacgagctggtcagtgatggcctctaccgcaagctgatcatcagtgatgtccacgcagaggacgaggacacctacacctgtgacgccggtgatgtcaagaccagtgcacagttcttcgtggaagagcaatccatcaccattgtgcggggtctgcaggacgtgacagtgatggagcccgctcctgcctggtttgagtgtgagacctccatcccctcagtgcggccacctaagtggctcctggggaagacggtgttgcaggctggggggaacgtgggcctggagcaggagggcacggtgcaccggctgatgctgcggcggacctgctccaccatgaccgggcccgtgcacttcaccgttggcaagtcgcgctcctctgcccgcctggtggtctcagacatccccgtagtcctcacacggccgttggagcccaagacagggcgtgagctgcagtcagtggtcctgtcctgcgacttccggccagcccccaaggctgtgcagtggtacaaggatgacacgcccctgtctccctctgagaagtttaagatgagcctggagggtcagatggctgagctgcgcatcctccggctcatgcctgctgatgctggtgtctaccggtgccaggcgggcagtgcccacagcagcactgaggtcactgtggaagcgcgggaggtgacagtgacagggccgctacaggatgcagaggccacggaggagggctgggccagcttctcctgtgagctgtcccacgaggatgaggaggtcgagtggtcgctcaacgggatgcccctgtacaacgacagcttccatgagatctcacacaagggccggcgccacacgctggtactgaagagcatccagcgggctgatgcgggcatagtacgcgcctcctccctgaaggtgtcgacctctgcccgcctggaggtccgagtgaagccggtggtgttcctgaaggcgctggatgacctgtccgcagaggagcgcggcaccctggccctgcagtgtgaagtctctgaccccgaggcccatgtggtgtggcgcaaagatggcgtgcagctgggccccagtgacaagtatgacttcctgcacacggcgggcacgcgggggctcgtggtgcatgacgtgagccctgaagacgccggcctgtacacctgccacgtgggctccgaggagacccgggcccgggtccgcgtgcacgatctgcacgtgggcatcaccaagaggctgaagacaatggaggtgctggaaggggaaagctgcagctttgagtgcgtcctgtcccacgagagtgccagcgacccggccatgtggacagtcggtgggaagacagtgggcagctccagccgcttccaggccacacgtcagggccgaaaatacatcctggtggtccgggaggctgcaccaagtgatgccggggaggtggtcttctctgtgcggggcctcacctccaaggcctcactcattgtcagagagaggccggccgccatcatcaagcccctggaagaccagtgggtggcgccaggggaggacgtggagctgcgctgtgagctgtcacgggcgggaacgcccgtgcactggctgaaggacaggaaggccatccgcaagagccagaagtatgatgtggtctgcgagggcacgatggccatgctggtcatccgcggggcctcgctcaaggacgcgggcgagtacacgtgtgaggtggaggcttccaagagcacagccagcctccatgtggaagaaaaagcaaactgcttcacagaggagctgaccaatctgcaggtggaggagaaaggcacagctgtgttcacgtgcaagacggagcaccccgcggccacagtgacctggcgcaagggcctcttggagctacgggcctcagggaagcaccagcccagccaggagggcctgaccctgcggctcaccatcagtgccctggagaaggcagacagcgacacctatacctgcgacattggccaggcccagtcccgggcccagctcctagtgcaaggccggagagtgcacatcatcgaggacctggaggatgtggatgtgcaggagggctcctcggccaccttccgttgccggatctccccggccaactacgagcctgtgcactggttcctggacaagacacccctgcatgccaacgagctcaatgagatcgatgcccagcccgggggctaccacgtgctgaccctgcggcagctggcgctcaaggactcgggcaccatctactttgaggcgggtgaccagcgggcctcggccgccctgcgggtcactgagaagccaagcgtcttctcccgggagctcacagatgccaccatcacagagggtgaggacttgaccctggtgtgcgagaccagcacctgcgacattcctgtgtgctggaccaaggatgggaagaccctgcgggggtctgcccggtgccagctgagccatgagggccaccgggcccagctgctcatcactggggccaccctgcaggacagtggacgctacaagtgtgaggctgggggcgcctgcagcagctccattgtcagggtgcatgcgcggccagtgcggttccaggaggccctgaaggacctggaggtgctggagggtggtgctgccacactgcgctgtgtgctgtcatctgtggctgcgcccgtgaagtggtgctatggaaacaacgtcctgaggccaggtgacaaatacagcctacgccaggagggtgccatgctggagctggtggtccggaacctccggccgcaggacagcgggcggtactcatgctccttcggggaccagactacttctgccaccctcacagtgactgccctgcctgcccagttcatcgggaaactgagaaacaaggaggccacagaaggggccacggccacgctgcggtgtgagctgagcaaggcagcccctgtggagtggagaaaggggtccgagaccctcagagatggggacagatactgtctgaggcaggacggggccatgtgtgagctgcagatccgtggcctggccatggtggatgccgcggagtactcgtgtgtgtgtggagaggagaggacctcagcctcactcaccatcaggcccatgcctgcccacttcataggaagactgagacaccaagagagcatagaaggggccacagccacgctgcggtgtgagctgagcaaggcggcccccgtggagtggaggaaggggcgtgagagcctcagagatggggacagacatagcctgaggcaggacggggctgtgtgcgagctgcagatctgtggcctggctgtggcagatgctggggagtactcctgtgtgtgtggggaggagaggacctctgccactctcaccgtgaaggccctgccagccaagttcacagagggtctgaggaatgaagaggccgtggaaggggccacagccatgttgtggtgtgaactgagcaaggtggcccctgtggagtggaggaaggggcccgagaacctcagagatggggacagatacatcctgaggcaggaggggaccaggtgtgagctgcagatctgtggcctggccatggcggacgccggggagtacttgtgtgtgtgcgggcaggagaggacctcagccacgctcaccatcagggctctgcctgccaggttcatagaagatgtgaaaaaccaggaggccagagaaggggccacagctgtgctgcagtgtgagctgaacagtgcagcccctgtggagtggagaaaggggtctgagacccttagagatggggacagatacagcctgaggcaggacgggactaaatgtgagctgcagattcgtggcctggccatggcagacactggggagtactcgtgcgtgtgcgggcaggagaggacctcggctatgctcaccgtcagggctctacccatcaagttcacagagggtctgaggaacgaagaggccacagaaggggcaacagccgtgctgcggtgtgagctgagcaagatggcccccgtggagtggtggaaggggcatgagaccctcagagatggagacagacacagcctgaggcaggacggggccaggtgtgagctgcagatccgcggcctcgtggcagaggacgctggggagtacctgtgcatgtgcgggaaggagaggacctcagccatgctcaccgtcagggccatgccttccaagttcatagagggtctgaggaatgaagaggccacagaaggggacacggccacgctgtggtgtgagctgagcaaggcggcaccggtggagtggaggaaggggcatgagaccctcagagatggggacagacacagcctgaggcaggacgggtccaggtgtgagctgcagatccgtggcctggctgtggtggatgccggggagtactcgtgtgtgtgcgggcaggagaggacctcagccacactcactgtcagggccctgcctgccagattcatagaagatgtgaaaaaccaggaggccagagaaggggccacggccgtgctgcaatgtgagctgagcaaggcggcccccgtggagtggaggaaggggtctgagaccctcagaggtggggacagatacagcctgaggcaggatgggaccagatgtgagctgcagattcatggcctgtctgtggcagacactggggagtactcgtgtgtgtgcgggcaggagaggacctcggccacactcaccgtcagggccctgcctgcacgattcactcaagatctgaagaccaaggaggcctcagaaggggccacagctacactgcagtgtgagctgagcaaggtggcccctgtggaatggaagaagggtcctgagaccctcagagatgggggcagatacagcctgaagcaggatgggacgaggtgtgagctgcagatccatgacctgtctgtggcggatgctggggaatactcatgcatgtgtggacaagagaggacctcggccacgctcactgtcagggccctgcctgccaggttcacagagggtctgaggaatgaagaggccatggaaggggccacagccacactgcaatgtgagctgagcaaggcagcccctgtggagtggaggaaaggccttgaggctctcagagatggggacaaatacagcctgagacaagacggggctgtgtgtgagctgcagattcatggcctggctatggcagataacggggtgtactcatgtgtgtgtgggcaggagaggacctcagctacactcactgtcagggccctgcctgccagattcatagaggatatgagaaaccagaaggccacagaaggggctacagtcacattgcaatgtaagctgagaaaggcggcccccgtggagtggagaaaggggcccaacaccctcaaagatggggacaggtacagcctgaagcaggatgggaccagttgtgagctgcagattcgtggcctggtcatagcagatgctggagaatactcgtgcatatgtgagcaggagaggacctcggccacgctcactgtcagggccctgccggccagattcatagaagatgtgagaaatcacgaggccacagaaggggccacagctgtgctgcagtgtgagctgagcaaggcggcccccgtggagtggcggaaggggtctgagaccctcagagatggggacagatatagcctgaggcaggacgggacgaggtgtgagctgcagattcgtggcctggctgtggaggacactggagagtatttgtgtgtgtgcgggcaggagagaacctcagctacactcactgtcagggccctgccagccagattcatagacaacatgacaaaccaggaggccagagaaggggccacggccacactgcactgtgaactgagcaaggtggcccctgtggagtggaggaagggacctgaaaccctccgagatggggacagacacagcctgaggcaggatgggaccaggtgtgagctgcagattcgtggcctgtctgtggcagatgccggggagtactcgtgcgtgtgtgggcaggagaggacctcagccacactcacgatcagggaggccacagaaggggccacggctatgttgcagtgtgagctgagcaaggtggcccctgttgagtggaggaagggacctgaaaccctcagagatggggacagatacaacctgaggcaggatgggaccagatgtgagctgcagattcatggcctgtccgtggcagacactggggagtactcatgtgtatgtggtcaggagaagacgtcggccactctcactgtcaaggccccacagccagtgttccgggagccgctgcagagtctgcaggcggaggagggctccacggccaccctgcagtgtgagctgtctgagcccactgctacagtggtctggagcaagggtggcctgcagctgcaggccaatgggcgccgggagccacggcttcagggctgcaccgcggagctggtgttacaggacctacaacgtgaagacactggcgaatacacttgcacctgtggctcccaggccaccagtgccaccctcactgtcacagctgcgcctgtgcggttcctccgagagctgcagcaccaggaggtggatgagggaggcaccgcacacttatgctgcgagctgagccgggcgggtgcgagcgtggagtggcgcaagggctccctacagctcttcccttgtgccaagtaccagatggtgcaggatggtgcagctgcagagctgctggtacgcggagtggagcaggaggatgcgggtgactacacgtgtgacacgggccacacgcagagcatggccagcctctctgtccgtgtccccaggcccaagttcaagacccggcttcagagtctggagcaggagacaggtgacatagcccggctgtgctgtcagctgagtgatgcagagtcgggggccgtggtgcaatggctcaaggagggcgtggagctgcatgcgggccccaagtacgagatgcggagccagggggccacgcgggagctgctgatccaccaactggaggccaaggacacgggcgagtatgcctgtgtgacaggcggccagaaaaccgctgcctccctcagggtcacagagcctgaggtgaccattgtacgggggctggttgatgcggaggtgacggccgatgaggatgttgagttcagctgtgaggtgtccagggctggagccacaggcgtgcagtggtgcctacagggcctgccactgcaaagcaatgaggtgacagaggtggctgtgcgggatggccgcatccacaccctgcggctgaagggcgtgacgcccgaggacgctggcactgtctccttccatttgggaaaccatgcttcctctgcccagctcaccgtcagagctcctgaggtgaccatcctggagcccctgcaggacgtgcagctcagtgagggccaggatgccagcttccagtgccggctatccagagcttcaggccaggaggcccgctgggctttaggaggggtgcccctgcaggccaacgagatgaatgacatcactgtggagcagggcacactccacctgctcaccctgcacaaggtgacccttgaggatgctggaactgtcagtttccacgtgggcacgtgtagctctgaggcccagctgaaagtcacagccaagaacacggtggtgcgggggctggagaatgtggaggcgctggagggcggcgaggcgctgttcgagtgccagctgtcccagcccgaggtggccgcccacacctggctgctggacgacgaacccgtgcacacctcggagaacgccgaggtggtcttcttcgagaacggcctgcgccacctgctgctgctcaaaaacttgcggccacaagacagctgccgggtgaccttcctggctggggatatggtgacgtccgcattcctcacggtccgaggctggcgcctggagatcctggagcctctgaaaaacgcggcggtccgggccggcgcacaggcatgcttcacctgcacgctcagcgaggcggtgcccgtgggagaggcgtcctggtacatcaatggcgcggcagtgcagccggatgacagcgactggactgtcaccgccgacggcagtcaccacgccctactgctgcgcagcgcccagccccaccacgccggggaggtcaccttcgcttgccgcgacgccgtggcctctgcgcggctcaccgtgctgggcctccctgatcccccagaggatgctgaggtggtggctcgcagcagccacactgtgacactgtcttgggcagctcccatgagtgatggaggcggtggtctctgtggctaccgcgtggaggtgaaggagggggccacaggccagtggcggctgtgccacgagctggtgcctggacccgagtgtgtggtggatggcctggcccccggggagacctaccgcttccgtgtggcagctgtgggccctgtgggtgctggggaaccggttcacctgccccagacagtgcggcttgcagagccaccgaagcctgtgcctccccagccctcagcccctgagagccggcaggtggcagctggtgaagatgtctctctggagcttgaggtggtggctgaggctggtgaggtcatctggcacaagggaatggagcgcatccagcccggtgggcggttcgaggtggtctcccagggtcggcaacagatgctggtgatcaagggcttcacggcagaagaccagggcgagtaccactgtggcctggctcagggctccatctgccctgcggctgccaccttccaggtggcactgagcccagcctctgtggatgaggcccctcagcccagcttgccccccgaggcagcccaggagggtgacctgcacctactgtgggaggccctggctcggaaacgtcgcatgagccgtgagcccacgctggactccattagcgagctgccagaggaggacggccgctcgcagcgcctgccacaggaggcagaggaggtggcacctgatctctctgaaggctactccacggccgatgagctggcccgcactggagatgctgacctctcacacaccagctctgatgatgagtcccgggcaggcaccccttccctggtcacctacctcaagaaggctgggaggccaggcacctcaccactggccagcaaggttggggccccagcagccccctctgtgaagccacagcagcagcaggagccactggctgctgtgcgcccaccactgggagacctgagcaccaaagacctgggtgatccctcaatggacaaggcagctgtgaagatccaggctgcctttaagggctacaaggtccggaaggagatgaagcagcaggaagggcccatgttctcccacacatttggggacaccgaggcacaggtgggggatgccctgcggctggagtgtgtcgtggccagcaaggcagatgtgcgagcccgctggctgaaggatggtgtggagctgaccgatgggcggcaccatcacatcgaccagcttggggatggcacctgctctctgctgatcactggcctggaccgtgctgatgctggctgctacacctgtcaggtgagcaacaagtttggccaggtgacccacagtgcctgtgtggtggtcagtgggtcagagagtgaagccgagagctcctctgggggtgagctggacgatgccttccgccgggctgcccgtcggctgcaccggctcttccgcaccaaaagtccggctgaagtttcagatgaggagctcttcctgagtgcagacgagggccctgcagagccagaggagcccgcggactggcagacataccgcgaagatgagcatttcatctgcatccgttttgaggcgctcactgaggcccgccaggcggtaactcgcttccaggagatgtttgccacactgggcattggggtggagatcaagctggtggaacaggggcctcggagggtagagatgtgcatcagcaaagagactcctgcccctgtggtgcctccagagccattgcccagcctactgacttctgacgctgccccagtgttcctgactgagttgcagaaccaagaagtgcaggatgggtatcctgtgagctttgactgcgtggtgacaggtcagcccatgcccagtgtgcgctggttcaaggatgggaagttgttggaggaggatgatcactacatgattaatgaagaccaacagggtggccatcagctcatcatcacagccgtggtgccagcagacatgggcgtctaccgctgcctggccgagaacagcatgggtgtctcctccaccaaggctgagctccgtgtggacttgacaagcacagactatgacactgcagcagatgccacggagtcctcatcctacttcagtgcccaaggctacctgtccagccgggagcaggagggaacagagtccaccactgatgagggccagctgccccaggtggtggaggagctgagagacctccaggtggcccctggcacacgcctggccaagttccagctcaaggtgaaaggctaccctgctcccagattatactggttcaaagatggccagcccctgaccgcatctgcccacatccgcatgactgacaagaagatcctgcacaccctggagatcatctccgtcacccgggaggactctggccagtatgcagcctatatcagcaatgccatgggtgctgcctactcgtctgcccggctgctggttcgaggccctgatgagccagaagagaagcctgcatcagatgtgcatgagcagctggtgccgccccgaatgctggagaggttcacccccaagaaagtgaagaaaggctccagcatcaccttctctgtgaaggtagaaggacgcccggtgcccaccgtgcactggctcagggaggaggctgagagaggcgtgctgtggattggccctgacacaccgggctacaccgtggccagctctgcgcagcagcacagcctggtcctgctggacgtgggccggcagcaccagggcacctacacatgcattgccagcaacgctgccggccaggccctctgctccgccagcctgcacgtctcgggcctgcctaaggtggaggagcaggagaaagtgaaggaagcgctgatttccactttcctgcaggggaccacacaagccatctcagcacaggggttggaaactgcgagttttgctgaccttggtgggcagaggaaagaagagcctctggctgccaaggaggccctcggccacctgtccctcgctgaggtgggcacagaggagttcctgcagaaactgacctcccagatcactgagatggtatcggccaagatcacgcaggccaagctgcaggtgcccggaggtgacagtgatgaggactccaagacaccatctgcatccccccgccatggccgatcacggccatcctccagcatccaggagtcttcctcagagtcagaggacggcgatgcccgaggcgagatctttgacatctacgtggtcaccgctgactacctgcccctaggggctgagcaggatgccatcacgctgcgggaaggccagtatgtggaggtcctggatgcagcccacccactgcgctggcttgtccgcaccaagcccaccaagtccagcccctcacggcagggctgggtgtcaccagcctacctggacaggaggctcaagctgtcacctgagtggggggccgctgaggcccctgagttccctggggaggctgtgtctgaagacgaatacaaggcaaggctgagctctgtgatccaggagctgctgagttctgagcaggccttcgtggaggagctgcagttcctgcagagccaccacctgcagcacctggagcgctgcccccacgtgcccatagctgtggccggccagaaggcagtcatcttccgcaatgtgcgggacatcggccgcttccacagcagcttcctgcaggagttgcagcagtgcgacacggacgacgacgtggccatgtgcttcatcaagaaccaggcggcctttgagcagtacctggagttcctggtggggcgtgtgcaggctgagtcggtggtcgtcagcacggccatccaggagttctacaagaaatacgcggaggaggccctgttggcaggggacccctctcagcccccgccaccacctctgcagcactacctggagcagccagtggagcgggtgcagcgctaccaggccttgctgaaggagctgatccgcaacaaggcgcggaacagacagaactgcgcgctgctggagcaggcctatgccgtggtgtctgccctgccacagcgcgctgagaacaagctgcacgtgtccctcatggagaactacccaggcaccctgcaggccctgggcgagcccatccgccagggccacttcatcgtgtgggagggtgcaccgggggcccgcatgccctggaagggccacaaccgtcacgtgttcctcttccgcaaccacctggtaatctgcaagccccggcgagactcccgcaccgataccgtcagctacgtgttccggaacatgatgaagctgagcagcatcgacctgaacgaccaggtggagggggatgaccgcgccttcgaggtgtggcaggagcgggaggactcggtgcgcaagtacctgctgcaggcacggacagccattatcaagagctcgtgggtgaaggagatctgtggcatccagcagcgtctggccctgcctgtgtggcggcccccggactttgaagaggagctggccgactgcacagccgagctgggtgagacagtcaagctggcctgccgcgtgacgggcacacccaagcctgtcatcagctggtacaaagatgggaaagcagtgcaggtggacccccaccacatcctcattgaagaccctgatggctcgtgtgcactcatcctggacagcctgaccggtgtggactctggccagtacatgtgcttcgcggccagcgccgctggcaactgcagtaccctgggcaagatcctggtgcaagtcccaccacggttcgtgaacaaggtccgggcctcaccctttgtggagggagaggacgcccagttcacctgcaccatcgaaggcgccccgtacccgcagatcaggtggtacaaggacggggccctgctgaccactggcaacaagttccagacactgagtgagcctcgcagcggcctgctagtgctggtgatccgggcggccagcaaggaggacctggggctctacgagtgtgagctggtgaaccggctgggctccgcgcgggctagtgcggagctgcgcattcagagccccatgctgcaggcccaggagcagtgtcacagggagcagctcgtggctgcagtggaagacaccaccctggagcgagcggaccaggaggtcacatctgtcctgaagagactgctgggccccaaggcgccaggcccctccacaggggacctcactggccctggcccctgccccaggggggcacccgcactccaggaaaccggctcccagcccccagtcaccggaacttcggaggcacctgccgtgcccccgagggtgccacagcccctcctccacgaaggcccagagcaggagccggaggccattgccagagcccaggaatggactgtgcccattcggatggagggtgcagcctggcccggggcaggcacaggggagctgctctgggacgtccacagccacgtggtcagagagaccacacagaggacctacacataccaggccatcgacacgcacaccgcacggcccccatccatgcaggtaaccatcgaggatgtgcaggcacagacaggcggaacggcccaattcgaggctatcattgagggcgacccacagccctcggtgacctggtacaaggacagcgtccagctggtggacagcacccggcttagccagcagcaagaaggcaccacatactccctggtgctgaggcatgtggcctcgaaggatgccggcgtttacacctgcctggcccaaaacactggtggccaggtgctctgcaaggcagagctgctggtgcttgggggggacaatgagccggactcagagaagcaaagccaccggaggaagctgcactccttctatgaggtcaaggaggagattggaaggggcgtgtttggcttcgtaaaaagagtgcagcacaaaggaaacaagatcttgtgcgctgccaagttcatccccctacggagcagaactcgggcccaggcatacagggagcgagacatcctggccgcgctgagccacccgctggtcacggggctgctggaccagtttgagacccgcaagaccctcatcctcatcctggagctgtgctcatccgaggagctgctggaccgcctgtacaggaagggcgtggtgacggaggccgaggtcaaggtctacatccagcagctggtggaggggctgcactacctgcacagccatggcgttctccacctggacataaagccctctaacatcctgatggtgcatcctgcccgggaagacattaaaatctgcgactttggctttgcccagaacatcaccccagcagagctgcagttcagccagtacggctcccctgagttcgtctcccccgagatcatccagcagaaccctgtgagcgaagcctccgacatttgggccatgggtgtcatctcctacctcagcctgacctgctcatccccatttgccggcgagagtgaccgtgccaccctcctgaacgtcctggaggggcgcgtgtcatggagcagccccatggctgcccacctcagcgaagacgccaaagacttcatcaaggctacgctgcagagagcccctcaggcccggcctagtgcggcccagtgcctctcccacccctggttcctgaaatccatgcctgcggaggaggcccacttcatcaacaccaagcagctcaagttcctcctggcccgaagtcgctggcagcgttccctgatgagctacaagtccatcctggtgatgcgctccatccctgagctgctgcggggcccacccgacagcccctccctcggcgtagcccggcacctctgcagggacactggtggctcctccagttcctcctcctcctctgacaacgagctcgccccatttgcccgggctaagtcactgccaccctccccggtgacacactcaccactgctgcacccccggggcttcctgcggccctcggccagcctgcctgaggaagccgaggccagtgagcgctccaccgaggccccagctccgcctgcatctcccgagggtgccgggccaccggccgcccagggctgcgtgccccggcacagcgtcatccgcagcctgttctaccaccaggcgggtgagagccctgagcacggggccctggccccggggagcaggcggcacccggcccggcggcggcacctgctgaagggcgggtacattgcgggggcgctgccaggcctgcgcgagccactgatggagcaccgcgtgctggaggaggaggccgccagggaggagcaggccaccctcctggccaaagccccctcattcgagactgccctccggctgcctgcctctggcacccacttggcccctggccacagccactccctggaacatgactctccgagcaccccccgcccctcctcggaggcctgcggtgaggcacagcgactgccttcagccccctccgggggggcccctatcagggacatggggcaccctcagggctccaagcagcttccatccactggtggccacccaggcactgctcagccagagaggccatccccggacagcccttgggggcagccagcccctttctgccaccccaagcagggttctgccccccaggagggctgcagcccccacccagcagttgccccatgccctcctggctccttccctccaggatcttgcaaagaggcccccttagtaccctcaagccccttcttgggacagccccaggcaccccctgcccctgccaaagcaagccccccattggactctaagatggggcctggagacatctctcttcctgggaggccaaaacccggcccctgcagttccccagggtcagcctcccaggcgagctcttcccaagtgagctccctcagggtgggctcctcccaggtgggcacagagcctggcccctccctggatgcggagggctggacccaggaggctgaggatctgtccgactccacacccaccttgcagcggcctcaggaacaggcgaccatgcgcaagttctccctgggtggtcgcgggggctacgcaggcgtggctggctatggcacctttgcctttggtggagatgcagggggcatgctggggcaggggcccatgtgggccaggatagcctgggctgtgtcccagtcagaggaggaggagcaggaggaggccagggctgagtcccagtcggaggagcagcaggaggccagggctgagagcccactgccccaggtcagtgcaaggcctgtgcctgaggtcggcagggctcccaccaggagctctccagagcccaccccatgggaggacatcgggcaggtctccctggtgcagatccgggacctgtcaggtgatgcggaggcggccgacacaatatccctggacatttccgaggtggaccccgcctacctcaacctctcagacctgtacgatatcaagtacctcccattcgagtttatgatcttcaggaaagtccccaagtccgctcagccagagccgccctcccccatggctgaggaggagctggccgagttcccggagcccacgtggccctggccaggtgaactgggcccccacgcaggcctggagatcacagaggagtcagaggatgtggacgcgctgctggcagaggctgccgtgggcaggaagcgcaagtggtcctcgccgtcacgcagcctcttccacttccctgggaggcacctgccgctggatgagcctgcagagctggggctgcgtgagagagtgaaggcctccgtggagcacatctcccggatcctgaagggcaggccggaaggtctggagaaggaggggccccccaggaagaagccaggccttgcttccttccggctctcaggtctgaagagctgggaccgagcgccgacattcctaagggagctctcagatgagactgtggtcctgggccagtcagtgacactggcctgccaggtgtcagcccagccagctgcccaggccacctggagcaaagacggagcccccctggagagcagcagccgtgtcctcatctctgccaccctcaagaacttccagcttctgaccatcctggtggtggtggctgaggacctgggtgtgtacacctgcagcgtgagcaatgcgctggggacagtgaccaccacgggcgtcctccggaaggcagagcgcccctcatcttcgccatgcccggatatcggggaggtgtacgcggatggggtgctgctggtctggaagcccgtggaatcctacggccctgtgacctacattgtgcagtgcagcctagaaggcggcagctggaccacactggcctccgacatctttgactgctgctacctgaccagcaagctctcccggggtggcacctacaccttccgcacggcatgtgtcagcaaggcaggaatgggtccctacagcagcccctcggagcaagtcctcctgggagggcccagccacctggcctctgaggaggagagccaggggcggtcagcccaacccctgcccagcacaaagaccttcgcattccagacacagatccagaggggccgcttcagcgtggtgcggcaatgctgggagaaggccagcgggcgggcgctggccgccaagatcatcccctaccaccccaaggacaagacagcagtgctgcgcgaatacgaggccctcaagggcctgcgccacccgcacctggcccagctgcacgcagcctacctcagcccccggcacctggtgctcatcttggagctgtgctctgggcccgagctgctcccctgcctggccgagagggcctcctactcagaatccgaggtgaaggactacctgtggcagatgttgagtgccacccagtacctgcacaaccagcacatcctgcacctggacctgaggtccgagaacatgatcatcaccgaatacaacctgctcaaggtcgtggacctgggcaatgcacagagcctcagccaggagaaggtgctgccctcagacaagttcaaggactacctagagaccatggctccagagctcctggagggccagggggctgttccacagacagacatctgggccatcggtgtgacagccttcatcatgctgagcgccgagtacccggtgagcagcgagggtgcacgcgacctgcagagaggactgcgcaaggggctggtccggctgagccgctgctacgcggggctgtccgggggcgccgtggccttcctgcgcagcactctgtgcgcccagccctggggccggccctgcgcgtccagctgcctgcagtgcccgtggctaacagaggagggcccggcctgttcgcggcccgcgcccgtgaccttccctaccgcgcggctgcgcgtcttcgtgcgcaatcgcgagaagagacgcgcgctgctgtacaagaggcacaacctggcccaggtgcgctgagggtcgccccggccacacccttggtctccccgctgggggtcgctgcagacgcgccaataaaaacgcacagccgggcgag

SEQ ID NO: 286291 - DNA, 8274 bp, Artificial Sequence
  derived and/or modified sequence
gagcccaaggtggtgtttgccaaggagcagcctgtgcaccgggaggtgcaggcccaggccggggccagcaccaccctgagctgtgaggtggcccaggcccagacagaggtgatgtggtacaaggatggcaagaagctgtccttcagcagcaaggtgaggatggaggccgtgggctgcacccggcggctggtggtgcagcaggccggccaggccgtggccggggagtacagctgtgaggccggcagccagaggctgtccttccacctgcacgtggccgagcccaaggctgtgtttgccaaggagcagcctgcccaccgggaggtgcaggccgaggccggggccagcgccaccctgagctgtgaggtggcccaggcccagacagaggtgacctggtacaaggatggcaagaagctgagcagcagcctgaaggtgcacgtggaggccgccggctgcacccggcggctggtggtgcagcaggccggccaggccgacacaggagagtacagctgtgaggccggcggccagcagctgtccttccggctgcaggtggccgagcccaaggctgtgtttgccaaggagcagcctgccagccgggaggtgcaggccgaggccggcaccagcgccaccctgagctgtgaggtggcccaggcccagacagaggtgacctggtacaaggatggcaagaagctgagcagcagcagcaaggtgaggatggaggccgtgggctgcacccggcggctggtggtgcaggaggccggccaggctgatgctggggagtacagctgcaaggccggggaccagaggctgtccttccacctgcacgtggccgagcccaaggtggtgtttgccaaggagcagcctgcccaccgggaggtgcaggccgaggccggggccagcgccaccctgagctgtgaggtggcccaggcccagacagaggtgacctggtacaaggatggcaagaagctgagcagcagcagcaaggtgcgggtggaggccgtgggctgcacccggcggctggtggtgcagcaggccggccaggccgaggccggggagtacagctgtgaggccggcggccagcagctgtccttccggctgcaggtggccgagcccaaggctgtgtttgccaaggagcaggtggtgtttgccaaggaccagcctgtgcaccgggaggtgcaggccgaggccggcaccagcaccatgctgagctgtgaggtggcccaggcccagacagaggtgatgtggtacaaggatggcaagaagctgagcagcagcagcaagatgagggtggaggccgtgggctgcacccggcggctggtggtgcaggaggccggccaggctgatgctggggagtacagctgtgaggccggcggccagaggctgtccttccacctgcacgtggccgagcccaaggtggtgtttgccaaggagcagcctgcctgccgggaggtgcaggccgaggccggggccagcgccaccctgagctgtgaggtggcccagggccagatggaggtgacctggtacaaggatggcaagaagctgagcagcagcagcaaggtgcacatggaggccagcggctacacccggcggctggtggtgcagcaggccggccaggctgatgctggggagtacagctgtgaggccggcggccagaggctgtccttccggctgcacgtggccgagctggagccccagatcagcgagcggccctgcagaagagagcccctggtggtgaaggagcacgaggacatcatcctgacagccaccctggccaccccatctgctgccaccgtgacctggctgaaggatggagtggagatcagaagaagcaagagacatgaaacagccagccagggcgacacccacaccctgactgtgcacggggcccaggtgctggacagcgccatctacagctgccgggtgggcgctgagggccaggacttccctgtgcaggtggaggaggtggccgccaagttctgccgcctgctggagcctgtgtgtggggagctgggcggcaccgtgaccctggcctgtgagctgagccctgcctgtgccgaggtggtgtggaggtgtggcaacacccagctgcgggtgggcaagcgcttccagatggtggccgagggccctgtgcgcagcctgactgtgctgggcctgcgggcagaagatgctggggagtatgtgtgtgagagcagagatgaccacaccagcgcccagctgactgtgtctgtgccccgggtggtgaagttcatgagcggcctgagcacagtggtggccgaggagggcggggaggccaccttccagtgtgtggtgagccccagtgatgtggccgtggtgtggttcagagatggagccctgctgcagcccagcgagaagtttgccatcagccagagcggggccagccacagcctgaccatcagtgacctggtgctggaggatgctggccagatcaccgtggaggccgagggcgccagcagcagcgctgccctgcgggtgcgggaggcccctgtgctcttcaagaagaagctggagccccagacagtggaggagaggagctctgtgaccctggaggtggagctgacccggccctggccagagctgcgctggaccagaaatgccacagccctggcccctgggaagaatgtggagatccacgccgagggcgcccggcaccggctggtgctgcacaacgtgggctttgctgaccggggcttcttcggctgtgagaccccagatgacaagacccaggccaagctgactgtggagatgaggcaggtgcggctggtgcggggcctgcaggccgtggaggcccgggagcagggcacagccaccatggaggtgcagctgagccatgctgatgtggatggctcctggaccagagatggcctgcgcttccagcagggccccacctgccacctggccgtgcggggccccatgcacaccctgaccctgagcggcctgcggcctgaggacagcggcctgatggtgttcaaggccgagggcgtgcacaccagcgcccggctggtggtgacagagctgcctgtgtccttcagccggcccctgcaggatgtggtgaccacagagaaggagaaggtgaccctggagtgtgagctgagccggcccaacgtggatgtgcgctggctgaaggatggagtggagctgcgggccggcaagaccatggccatcgccgcccagggcgcctgccgcagcctgaccatctaccgctgtgaatttgctgaccagggcgtgtatgtgtgtgatgcccatgatgcccagagcagcgcctctgtgaaggtgcagggccgcacctacaccctcatctacagaagagtgctggccgaggatgctggggagatccagtttgtggccgagaatgctgagagccgggcccagctgcgggtgaaggagctgcctgtgaccctggtgcggcccctgcgggacaagatcgccatggagaagcaccggggcgtgctggagtgccaggtgtcccgggccagcgcccaggtgcgctggttcaagggcagccaggagctgcagcccggccccaagtatgagctggtgtctgatggcctgtacaggaagctgatcatcagtgatgtgcatgctgaagatgaggacacctacacctgtgatgctggagatgtgaagaccagcgcccagttctttgtggaggagcagagcatcaccatcgtgcggggcctgcaggatgtgacagtgatggagcccgccccagcctggtttgaatgtgagaccagcatccccagcgtgcggccccccaagtggctgctgggcaagacagtgctgcaggccggcggcaatgtgggcctggagcaggagggcaccgtgcaccggctgatgctgcggaggacctgcagcaccatgactggacctgtgcacttcaccgtgggcaagagccgcagcagcgcccggctggtggtgtctgacatccctgtggtgctgacccggcccctggagcccaagacaggccgggagctgcagagcgtggtgctgagctgtgacttccggcctgcccccaaggctgtgcagtggtacaaggatgacacccccctgagccccagcgagaagttcaagatgagcctggagggccagatggccgagctgcgcatcctgcggctgatgccagcagatgctggggtgtaccgctgccaggccggcagcgcccacagcagcacagaggtgacagtggaggcccgggaggtgacagtgacaggccccctgcaggatgctgaggccacagaggagggctgggccagcttcagctgtgagctgagccatgaagatgaggaggtggagtggagcctgaatggcatgcccctgtacaatgacagcttccacgagatcagccacaagggcagaagacacaccctggtgctgaagagcatccagagagcagatgctggcatcgtgcgggccagcagcctgaaggtgtccaccagcgcccggctggaggtgcgggtgaagcctgtggtgttcctgaaggccctggatgacctgtctgctgaggagcggggcaccctggccctgcagtgtgaggtgtctgaccctgaggcccacgtggtgtggaggaaggatggagtgcagctgggccccagcgacaagtatgacttcctgcacacagctggcacccggggcctggtggtgcatgatgtgtccccagaagatgctggcctgtacacctgccacgtgggcagcgaggagacccgggcccgggtgcgggtgcatgacctgcacgtgggcatcaccaagaggctgaagaccatggaggtgctggagggggagagctgcagctttgaatgtgtgctgagccatgagagcgccagtgaccctgccatgtggacagtgggcggcaagacagtgggcagcagcagccgcttccaggccacccggcagggcaggaagtacatcctggtggtgcgggaggccgcccccagtgatgctggggaggtggtgttttctgtgcggggcctgaccagcaaggccagcctcatcgtgcgggagaggcctgctgccatcatcaagcccctggaggaccagtgggtggcccctggagaagatgtggagctgcgctgtgagctgagccgggccggcacccctgtgcactggctgaaggacaggaaggccatcaggaagagccagaagtatgatgtggtgtgtgagggcaccatggccatgctggtgatccggggggccagcctgaaggatgctggggagtacacctgtgaggtggaggccagcaagagcacagccagcctgcacgtggaggagaaggccaactgcttcacagaggagctgaccaacctgcaggtggaggagaagggcacagctgtgttcacctgcaagacagagcaccctgctgccaccgtgacctggaggaagggcctgctggagctgcgggccagcggcaagcaccagcccagccaggagggcctgaccctgcggctgaccatcagcgccctggagaaggctgacagcgacacctacacctgtgacatcggccaggcccagagccgggcccagctgctggtgcagggccggcgggtgcacatcatcgaggacctggaggatgtggatgtgcaggagggcagcagcgccaccttccgctgccgcatcagccctgccaactatgagcctgtgcactggttcctggacaagacccccctgcacgccaatgagctgaatgaaattgatgcccagcccggcggctaccacgtgctgaccctgcggcagctggccctgaaggacagcggcaccatctactttgaagctggggaccagagggccagcgctgccctgcgggtgacagagaagcccagcgtcttcagccgggagctgacagatgccaccatcacagaaggagaggacctgaccctggtgtgtgagaccagcacctgtgacatccctgtgtgctggaccaaggatggcaagaccctgcggggcagcgcccgctgccagctgagccatgagggccaccgggcccagctgctgatcaccggggccaccctgcaggacagcggccgctacaagtgtgaggccggcggggcctgcagcagcagcatcgtgcgggtgcacgcccggcctgtgcgcttccaggaggccctgaaggacctggaggtgctggagggcggggccgccaccctgcgctgtgtgctgagctctgtggccgcccctgtgaagtggtgctacggcaacaacgtgctgcggcctggggacaagtacagcctgcggcaggagggcgccatgctggagctggtggtgaggaacctgcggccccaggacagcggccgctacagctgcagctttggagaccagaccaccagcgccaccctgactgtgacagccctgcctgcccagttcatcggcaagctgaggaacaaggaggccacagaaggagccacagccaccctgcgctgtgagctgagcaaggccgcccctgtggagtggaggaagggcagcgagaccctgagagatggagaccgctactgcctgcggcaggatggagccatgtgtgagctgcagatccggggcctggccatggtggatgctgctgagtacagctgtgtgtgtggggaggagaggaccagcgccagcctgaccatccggcccatgcctgcccacttcatcggccgcctgcggcaccaggagagcattgaaggagccacagccaccctgcgctgtgagctgagcaaggccgcccctgtggagtggaggaagggccgggagagcctgagagatggagacagacacagcctgcggcaggatggagctgtgtgtgagctgcagatctgtggcctggccgtggctgatgctggggagtacagctgtgtgtgtggggaggagaggaccagcgccaccctgactgtgaaggccctgcctgccaagttcacagagggcctgagaaatgaggaggccgtggagggcgccacagccatgctgtggtgtgagctgagcaaggtggcccctgtggagtggaggaagggccctgagaacctgagagatggagaccgctacatcctgcggcaggagggcacccgctgtgagctgcagatctgtggcctggccatggctgatgctggggagtacctgtgtgtgtgtggccaggagaggaccagcgccaccctgaccatccgggccctgcctgcccgcttcattgaagatgtgaagaaccaggaggcccgggagggcgccacagctgtgctgcagtgtgagctgaacagcgctgcccctgtggagtggaggaagggcagcgagaccctgagagatggagaccgctacagcctgcggcaggacggcaccaagtgtgagctgcagatccggggcctggccatggctgacaccggggagtacagctgtgtgtgtggccaggagaggaccagcgccatgctgactgtgcgggccctgcccatcaagttcacagagggcctgagaaatgaggaggccacagaaggagccacagctgtgctgcgctgtgagctgagcaagatggcccctgtggagtggtggaagggccacgagaccctgagagatggagacagacacagcctgcggcaggatggagcccgctgtgagctgcagatccggggcctggtggccgaggatgctggggagtacctgtgcatgtgtgggaaggagaggaccagcgccatgctgactgtgcgggccatgcccagcaagttcatcgagggcctgagaaatgaggaggccacagaaggagacacagccaccctgtggtgtgagctgagcaaggccgcccctgtggagtggaggaagggccacgagaccctgagagatggagacagacacagcctgcggcaggacggcagccgctgtgagctgcagatccggggcctggccgtggtggatgctggggagtacagctgtgtgtgtggccaggagaggaccagcgccaccctgactgtgcgggccctgcctgcccgcttcattgaagatgtgaagaaccaggaggcccgggagggcgccacagctgtgctgcagtgtgagctgagcaaggccgcccctgtggagtggaggaagggcagcgagaccctgcggggcggggaccgctacagcctgcggcaggacggcacccgctgtgagctgcagatccacggcctgtctgtggccgacaccggggagtacagctgtgtgtgtggccaggagaggaccagcgccaccctgactgtgcgggccctgcctgcccggcacagccgctctgaggaccagggcggcctgcggcggggccacagctacacagctgtgtag

SEQ ID NO: 286292 - DNA, 8274 bp, Artificial Sequence
  derived and/or modified sequence
gagcccaaggtggtgttcgccaaggagcagcccgtgcaccgggaggtacaggctcaagccggagcctccactaccctgagttgtgaggtagcccaggcccaaaccgaggtcatgtggtacaaagacgggaaaaagctctcgttttcaagtaaagtgagaatggaggcagtcggatgtacacgtcgcctggtcgtgcagcaggctggccaggctgttgctggggaatactcttgcgaggctggctcacaacggctgtcgttccacctccacgtggcggaacccaaggcggtcttcgctaaagaacagcctgctcacagagaggtacaggctgaagcgggcgctagtgccactctgtcttgtgaagtagcccaggcgcagacagaggtcacttggtacaaagacggaaagaaactgagcagttcactcaaggtccacgtcgaggcggcgggatgtacgcgacgcctggtggtccagcaggctggacaggccgacacaggggagtatagctgcgaggccggcgggcagcagttgagcttccgcctgcaagtcgccgagccaaaagccgtctttgcaaaggagcagcccgcaagccgcgaggtccaggccgaagctggaacatctgctacgctgtcttgtgaggtggcccaggctcagacagaggtgacatggtataaggacggtaaaaagctgtcttcaagttcaaaagtgaggatggaggcagtgggttgcacacgccggttagtggtgcaggaagccgggcaggctgatgccggggagtattcctgcaaagcaggcgatcagcggttatcatttcatttacacgtcgctgaacccaaggtggtttttgccaaggagcagcctgcacatagggaagtgcaggccgaagctggggcatcagcaactctttcttgtgaggtggctcaagcccaaaccgaggttacgtggtataaggatggaaaaaaattgtctagctcttctaaagtccgcgtagaggccgtgggatgcactagacggctggtggtccagcaggcaggtcaagctgaagccggggaatattcttgtgaggccggtggacagcaactgagcttccgactgcaggtggctgagccaaaagcagtgttcgccaaggagcaggtggtctttgctaaggaccagccagtccatcgcgaagttcaggcagaggccggaacttcaacaatgctgagttgcgaagtggcccaggcccagaccgaggtcatgtggtataaggacgggaagaaattgagttctagcagcaagatgcgggtcgaagcagtgggctgcacccgcagactagtggtgcaggaagctggccaggctgacgccggggaatattcctgcgaggcaggaggccagcgtctcagtttccatcttcacgtcgctgaaccgaaggtggtgtttgctaaggagcagcctgcctgccgggaggtacaagccgaagccggtgcgtccgccacccttagctgtgaggtggcccagggccagatggaagtgacctggtataaggacggcaagaagctcagtagcagctccaaagtgcatatggaagcatcaggctacactcgaaggctcgtggtccagcaggccgggcaagcagatgcaggtgaatatagctgtgaagctggaggccagaggcttagtttccgcttacacgtggcagagctcgaaccccagatttcagaaagaccttgtcgccgggaacccctagtggtcaaggaacatgaggatatcatcttaaccgccacactggccacccctagcgccgccaccgtcacgtggctgaaagatggcgtcgagatcaggcggtcgaaaagacacgagaccgccagccaaggggatacacacacgttaacagtgcacggagcccaagtgttggatagcgcaatctactcctgcagggtgggagcggagggccaagatttccctgtgcaagtggaagaggtcgctgctaagttctgcagactcctggagcctgtgtgtggcgaattaggtggaaccgtgaccctggcctgtgaactctcccccgcctgtgcagaggtggtctggcgatgtggcaatacccagttacgggtgggaaagcgtttccagatggtagccgaaggtccagtgcgctctttgacagtgttaggacttcgagccgaagacgccggtgagtacgtctgcgagagccgcgacgaccacacttctgcacaactcacagtgagcgtgccgagggtggtgaagtttatgtctggactatccacagttgtagccgaagaaggcggtgaagctaccttccagtgcgtggtctcgccctcagatgtcgcagtggtatggtttcgcgatggcgcgcttctccagccaagtgaaaaatttgcaatcagccagtcgggtgcatcacatagccttaccatcagcgacctagtgttggaggatgctggacagattacagtggaagcagagggcgcgtcatccagtgctgctctgagagtgcgggaggccccagttctcttcaaaaagaaattagagccacagaccgtggaggaacgatcaagtgtaactctagaggtggaacttactaggccctggcctgagctgagatggacacggaatgctacggccctggcgccggggaagaatgttgagattcatgctgaaggagcaaggcatcgattggttttgcacaacgttggatttgccgatcgtggcttttttggatgcgagacacccgacgacaaaactcaagcaaagcttaccgttgaaatgaggcaggtgaggttagtgcgcggactccaggccgtggaggcaagagagcagggcacagccactatggaagtccagctgtcgcatgccgacgttgatggctcttggactagagacggtctgagatttcaacagggtccaacgtgccacctcgcggtgagagggccaatgcacaccctgactttgagcgggctcaggcccgaggacagtggactcatggtattcaaggctgagggagttcataccagcgcccgcttagtggtaactgaactaccagtcagcttttctcggccccttcaggacgttgtaaccacggagaaggaaaaggtcactctggagtgtgagctaagccgccctaatgtcgatgtgaggtggcttaaggacggggtggagctccgcgctggaaaaaccatggcaatcgccgcacagggagcctgtcgcagtctgaccatttatagatgtgaattcgccgatcagggagtatatgtgtgcgatgcccatgatgcccaatcctcagcctccgttaaggtccagggacgaacttatacactcatttacagacgggtgctggctgaagacgccggggaaatacaatttgtcgctgagaacgccgaaagtagagctcagttgagggttaaggaactgcctgttacgctcgtcagacctctcagggacaagatagccatggagaaacataggggtgtgctggagtgccaggtgagccgtgccagtgcccaagtcaggtggtttaaggggtctcaagagttacaaccaggccccaagtacgaactcgtgagtgatggactgtatcgcaagctgatcatatctgacgtgcacgcagaggatgaggatacctacacctgtgacgccggagacgtgaaaacaagtgctcagtttttcgtcgaagaacagagtatcacaattgtgagggggctgcaggatgtaaccgtcatggagccggctcctgcgtggtttgaatgcgaaacgagtatcccgagcgttcgaccccccaagtggctcctgggcaagaccgtgctgcaggcaggcggtaatgttggactggagcaagagggaacagtccaccgactgatgctgcgtaggacctgctccacaatgaccggtcctgtgcactttacagtgggtaaatcgcgctcctcagccaggctggttgtgtcggacataccagtggttctcaccagaccactcgagcccaagacaggtagagaactgcagagcgtggtgctgtcctgtgacttccgacccgcccccaaggccgtgcagtggtataaggatgacacccccctcagcccatccgagaagttcaagatgagtctggagggtcagatggcagaactgcgcatcctgagactgatgcccgctgatgccggagtgtacaggtgccaggctggcagtgcgcactcatcaactgaggtgacggtcgaggcccgggaggtaacagtgacaggccctctccaggacgccgaggctaccgaggaagggtgggcatctttcagttgtgagctttctcatgaggacgaggaagtggagtggtctctgaatggcatgcctctgtataatgactctttccatgaaatttctcacaaagggcgacgccacacactcgttcttaaaagtatccagcgtgctgatgccggtattgtgagggcttcatctctgaaggtgagtacttcagctcgtctggaggtgagagtgaagccagtagtcttccttaaggctttggacgacctgtcagccgaagaaagagggaccctggccctccagtgcgaggtcagtgatcctgaagctcacgtggtatggcggaaagacggtgtgcagcttgggccctccgataagtacgattttttacatacagcaggaactcgcgggctcgtggtgcacgacgttagtccagaggacgccggactttatacgtgtcatgtgggcagcgaagagactagagcgcgcgtaagggtacacgacttgcatgtcggaatcacaaagaggctgaagaccatggaagtgttggagggcgaatcctgttccttcgagtgtgtgctcagtcacgagagtgcctctgatccagccatgtggaccgtcggtggtaaaacagtcggctccagctctcgttttcaggctactcgtcagggacgaaaatacatccttgtggttagggaggccgcgccatcggatgccggggaggtagtcttcagcgtgcgcgggctgacatcgaaggcctccctgatcgtgcgggaaagacctgccgctatcattaagcccctggaggaccagtgggtcgccccgggagaagatgtggagctccgctgtgaactaagcagagccggaactcccgtacattggctcaaggaccgaaaggcaatcaggaagtctcagaaatacgatgtggtatgtgaaggtaccatggccatgctggtgatcagaggcgcgagtttgaaggatgccggggaatatacctgtgaggtcgaggcctccaagtcaacagccagcctgcacgtggaggaaaaggccaactgcttcaccgaggagctgacaaatttgcaagtggaggaaaaaggcactgcagtttttacgtgcaagacggagcaccctgcggcaacagtgacttggcggaaaggactgttagagctaagagccagcgggaagcaccagccctcacaagagggactcactctgagactcaccatttctgctctggaaaaggccgacagtgatacgtatacctgcgatatcggccaggcacagtcacgcgctcagttgctggtccagggccggagagttcatattattgaggatctggaggacgtcgatgtccaggaggggtctagcgccacgttccggtgcagaatcagccccgcaaactatgaaccggtccactggttcctagataaaaccccattgcacgctaacgagctgaacgagatcgatgctcaaccggggggataccacgtcttaaccctgcggcagcttgccctgaaggatagtggaaccatctacttcgaggccggggaccagagggccagcgctgctcttcgagtaaccgaaaaacccagtgtcttctctcgcgagcttactgatgccactatcactgaaggcgaagacttaaccctggtgtgcgagacaagcacctgcgacatcccagtctgctggaccaaagatgggaagactcttcgcgggagtgccaggtgccagttatcccacgaggggcacagagcccagctcctgattaccggagctaccctgcaagattctggacggtataagtgcgaggctggcggcgcctgctccagcagcatagttagagttcacgccagacccgtgcggtttcaggaggctctgaaggacttagaagtcttggaaggaggcgcagcaactctgcgctgtgtcctatcaagtgtggctgcccctgtcaaatggtgctatgggaacaacgtgcttaggcccggtgataaatactcattgaggcaggagggcgccatgctggagctggtggttcgtaatttgcgcccgcaggattcaggtcgttacagttgctcttttggcgatcagactacctctgcaaccctgaccgttaccgcactgccagcgcagtttatcggcaagctgcggaacaaagaggctaccgaaggggcaacagccaccttaaggtgcgaactgtccaaggctgcaccggttgagtggcgaaaggggagtgaaactctccgggacggcgaccgctactgtcttaggcaggatggtgccatgtgcgaactgcagatacgggggctggctatggtggacgccgcggaatattcatgtgtgtgcggggaagagcgcacaagcgcctccctgacaatacggccgatgcccgcacattttattggaagattaaggcaccaggagagcatcgaaggggctactgccaccctgaggtgcgaattaagtaaagctgctccggtggagtggagaaaaggcagagagtctttacgagacggcgaccggcactctctgagacaggacggggccgtgtgcgagctccaaatctgtggccttgctgtcgccgatgctggggagtatagctgtgtttgtggggaagagcgaacaagtgcaactttgaccgtgaaggccctgcctgcaaagttcactgagggccttaggaatgaagaggccgtggaaggagccacagctatgctgtggtgcgaactgagcaaagtcgcccctgtagagtggcgtaagggaccagagaatctccgcgatggagatcggtatatcttaaggcaggagggtactagatgtgaattgcaaatctgcgggctcgccatggccgacgcgggagagtacctgtgcgtgtgtggccaggagagaacttccgccacattgacgattcgagcccttcccgctaggtttatcgaggatgtcaaaaaccaggaggcacgtgaaggggcgactgccgtgttacagtgcgagctgaattcggcagcgccagtcgaatggcgtaagggctctgagaccctccgggacggagataggtactcactcaggcaggacggcaccaaatgcgagttacagatcaggggtttggcaatggccgataccggggaatactcttgtgtctgcggacaggagcgaacatcagctatgttgaccgtgagagctcttcctattaagttcactgaaggtttgaggaatgaggaagctacagagggagctaccgcggtattacgatgcgagttgtccaaaatggcgccggttgagtggtggaaaggtcatgagacgttgagggatggtgatcgccatagcctccggcaggacggagcacgttgcgagttacaaatcagagggcttgtcgccgaggacgcgggcgagtatctctgtatgtgcgggaaggaacggacgtcagctatgttaacagtgcgagctatgccctctaaattcattgagggattgaggaatgaagaggctaccgagggggatacagccaccctctggtgtgagctatcgaaggcagcacctgtagagtggaggaagggccatgaaacgttgcgggatggggaccggcacagcttgaggcaggatggaagtagatgtgagctgcagatccgaggactcgcggtcgtggatgccggcgaatatagctgcgtgtgtggccaggagcgaactagcgctactttgacggtgagagctttacctgcacgtttcatagaggatgttaaaaaccaggaagcgcgggaaggagcgactgccgtgctccagtgcgagctgagcaaggcggcacctgtggagtggcgaaaaggcagcgaaacactccgcgggggtgataggtattctcttagacaagacggcacaagatgcgagctccaaatccatgggctgtccgtcgctgacaccggagagtacagctgcgtctgcggccaggaaagaacatccgcaacattgaccgttagggccttgccagcccggcactcccggagcgaagatcagggtggccttaggagaggccactcctataccgctgtctag

SEQ ID NO: 286293 - DNA, 8273 bp, Artificial Sequence
  derived and/or modified sequence
gaacccaaggtagtgtttgcgaaagagcagccagtgcaccgggaggtgcaggcccaggctggtgcttctacgactctgtcctgcgaggttgcacaagctcagactgaggtcatgtggtataaagatggaaagaagctgtctttttctagtaaagtcagaatggaagccgtggggtgcacgcgcagactggtcgtgcagcaggctggccaggccgtcgcaggggaatactcatgtgaggccggaagtcagcggctgtccttccacctccacgttgcagagcccaaagccgtgtttgcaaaggagcagcctgcccacagggaagtgcaagctgaggctggagcctccgcgaccctgtcttgcgaggtggcacaagcgcaaacggaggtcacgtggtacaaggacggtaagaaattaagttccagcctcaaggtacatgtagaggccgctgggtgtactaggcggctcgtggttcagcaggctggtcaggcagatactggagagtacagctgtgaggccggtgggcaacagctgtcatttagactgcaagtggcagaacccaaagccgtgtttgccaaggaacagccagctagtcgcgaggtgcaggccgaggccggaactagcgcgacccttagttgcgaagtggcacaggcacagactgaggtcacatggtataaggatggcaaaaaactgagcagctccagcaaggtgagaatggaggcagtgggctgtaccaggagattggtcgtccaggaagccggacaggctgacgctggtgagtattcctgtaaagctggggatcagcgtctgagttttcatctccacgtggccgagccaaaagttgtttttgccaaagagcagccggcacaccgtgaagttcaggcggaagctggggcttcagccactttgtcttgtgaggttgctcaggcacaaacagaggttacctggtacaaagatggaaagaaattatcatccagttctaaggtccgggtggaagccgtcggctgtactcgcaggctggtggtccaacaggcaggacaagctgaagctggtgagtatagttgcgaggccggaggtcagcagctgagttttcgtttgcaggtggccgagcccaaagccgtgttcgcgaaggagcaagtcgtgtttgccaaggatcaacccgtgcaccgcgaggtgcaggccgaagccggtacttccactatgctttcctgcgaagtagctcaagcccagactgaggtcatgtggtacaaggatggtaagaaactgtcttcaagttctaagatgagagttgaagcggttggctgtacgcgccgtctggtggtccaggaggccggtcaggcggatgccggtgaatactcatgtgaagcaggcggacagagactttcttttcatctgcacgtggccgagcctaaggttgtgttcgctaaggagcagcccgcttgccgggaggtgcaagcagaggccggagctagcgctacattatcctgcgaggtagctcaggggcaaatggaagtcacttggtataaggacggaaagaaactgtcaagctccagcaaggttcacatggaggcttcaggctacacccggaggctcgtcgtacaacaggccggacaagccgacgcaggcgaatacagctgcgaggcaggcggacagcgcctatcctttcggctccatgtggcggaactcgagccacagatctcggagagaccctgccgcagagagccacttgtggtaaaggagcacgaggatattatcctgactgctactctggcgacgccctctgctgctactgtcacatggctgaaggacggcgtcgaaattcggaggagcaaaagacacgaaaccgcctcgcagggcgacacccacacgctgacagttcatggagcccaggtcctggacagtgccatttatagttgtagggtgggcgcagagggccaagactttccagtgcaggttgaggaagtcgccgcaaaattctgtcgactgctcgagcccgtctgtggggaactaggtggaaccgtgacgttggcctgcgagctcagccccgcatgtgccgaggtggtttggcggtgtggaaatacccaactgcgtgtcggtaaaagattccagatggtcgcagaaggcccagtcagatctcttacagtgttgggactgcgagcagaggatgctggagagtacgtctgtgaatcccgtgatgatcatacatcagcacagctgacagtaagtgtgccccgtgtcgtgaaattcatgtccgggctttcaactgtggtcgcagaagaaggcggagaggccacattccagtgcgtagttagcccctctgatgttgctgtcgtttggtttagggacggagcactgctgcagccttccgaaaagttcgcaatttctcagtcaggtgccagtcattctctgacgatttcagacctggtgctcgaggatgctgggcaaattaccgttgaggctgaaggtgccagctctagcgctgccctgcgcgtacgggaggcaccagtgctgtttaagaagaaacttgagccccagacagtggaggaaaggtcatccgtgacattggaggtggagctcacacggccttggccagaactgcgctggacccggaatgcaacagccttggcgcctggcaaaaatgtcgaaattcatgccgaaggagcccgtcacaggttggttctgcacaacgtcggattcgcagacaggggattctttggatgcgaaactccggatgacaaaacccaggccaaactgacagtggagatgcggcaggtgaggcttgtgagaggacttcaggccgtggaagcaagggagcaggggacagccacaatggaagttcaactgtcccatgccgacgttgatggatcctggacaagagatgggctgaggttccaacaaggccctacctgccacctggcagtgagggggcctatgcatactctgacactatcaggtttgaggcctgaagatagtggtctgatggtgtttaaagccgaaggggttcacacgagcgccagactcgtagtgacagaactcccagtgagtttctcgaggcccctgcaagatgtggtaacaacagagaaggaaaaggtcaccctcgagtgtgaattatcccggccaaatgtcgacgtcagatggctcaaggatggagtcgagctccgagccggaaagactatggccatcgccgctcagggtgcctgtaggtcccttactatctaccggtgcgagttcgcagaccaaggggtgtatgtgtgtgacgctcacgacgcccaaagttcagcatctgtgaaggttcagggcagaacctacaccctgatataccggagagtgttggccgaagatgctggcgagatacagttcgtggcagaaaatgctgagtctcgcgcacagctcagggtcaaggagctccccgtgactctcgtccgtcctcttcgagataaaatcgcaatggaaaagcacaggggcgtgctagaatgtcaggtttctcgtgcgagcgcccaagtgcgctggtttaagggcagccaagagctccagcctggcccaaaatatgaactggtgtccgatggcctgtaccgtaagctgattatctccgatgtgcatgcagaggatgaagacacatacacctgtgacgctggggacgtcaagacgtcagcccagttttttgtcgaagagcagagtattactatagtcagaggcctgcaggatgtcaccgtcatggagcccgctcctgcctggttcgaatgtgagacgtcaatcccttctgtgcggccaccgaagtggctgctgggaaagacagtgctgcaagcagggggaaacgtaggccttgagcaggagggcactgtccaccggctcatgctccgtagaacctgctcgaccatgacaggcccagtccactttactgtggggaaatctcgctcctctgccaggctggtggtgagcgatattcccgtagtgcttacccgtcctctggagcctaagaccggccgtgaactgcagtctgtggtgctgagttgcgatttcaggccagcaccaaaggctgtgcagtggtacaaggacgacacaccactctctccctccgaaaagttcaagatgtctcttgagggacagatggccgagctgcggattttgaggctgatgcccgctgacgccggagtgtaccgatgccaggctgggtctgcccactcatccaccgaagttacagtcgaggccagggaggtgactgttactggacctttgcaggacgccgaggccacagaagagggttgggcatcctttagctgcgagctctcccatgaggatgaggaagtggaatggagtctgaacggcatgcccctctataacgatagcttccacgaaatatcccataaggggaggcgtcatactctcgtgctgaaatcaattcagcgcgctgacgcgggtattgtgcgggcaagcagcttgaaagtttccaccagcgcacgtctcgaggtcagagtgaaaccagtggtttttcttaaagctctggacgatctgtccgccgaggaacgcggaacattggctctccagtgcgaggtctcagatccagaggcccacgtggtctggcgcaaagacggtgtgcagctcggaccctcagacaagtatgacttcctccatactgcaggtacaaggggactggtggtacacgacgtcagtcctgaggacgcgggactctacacatgccacgtcggcagcgaggaaacccgagccagagtccgagttcacgacctgcatgtcggaatcaccaagaggctgaagactatggaggtcctggagggagagtcctgttctttcgagtgcgtcctgtcacacgaaagcgctagtgatccggctatgtggaccgtgggtggcaaaactgtaggctccagcagccgcttccaagctactcggcaaggacgtaaatacattttagtggtgagggaagccgctccatctgatgccggagaggtggtcttctctgtcaggggcttaacctccaaggcaagtttaatagtgagggaacggccagctgctatcattaagcctctggaggatcagtgggtggccccaggggaggatgtggaactgagatgtgaactttccagagcaggtactcctgtgcattggctgaaagatcgcaaggcaatcagaaagtctcagaagtacgacgtcgtgtgtgaggggacaatggctatgttagtaattcgcggtgcctctctgaaagatgccggagagtacacttgtgaggtggaggctagcaagtctaccgcttccctgcacgtggaggaaaaggcaaactgctttactgaggagctgacaaatctgcaggtcgaagaaaaagggacagccgtattcacctgcaagaccgaacacccggctgccactgtgacatggaggaaaggcctcctcgaacttcgagcaagtggaaaacaccagccaagtcaggagggtctcacactgcgtcttaccatctccgcactcgaaaaggccgacagcgacacttatacctgtgatattggccaggcacagtcacgggcacagttgctggtgcagggcagaagagtgcatataattgaggatctggaggatgtcgacgtccaggaggggagctcggcaacgtttcgatgtagaatctctccagcaaattacgagcccgtccattggtttctcgataagacccctttacatgcaaatgagttaaatgaaattgacgcccagcccggtgggtatcatgtgctgacacttagacaacttgcactgaaggatagtggcaccatttacttcgaagcgggagatcagagagccagtgctgccctgagagtgaccgagaagcctagtgttttttctcgggaactcaccgatgcaaccatcaccgagggcgaagatctaaccctggtgtgtgagacctcaacttgtgatataccggtttgctggaccaaagatggtaagaccctgcgtgggtcagctagatgccagttgagtcacgaaggtcatcgggctcagctgttaattacaggagcaacgcttcaagactccggtcggtacaaatgcgaggcagggggagcctgctctagctcaatcgtgcgcgtgcatgcacgcccagtccgcttccaggaggctctgaaagacctggaggtgctagaaggtggggcagccactctgcggtgcgtgctttcctccgtggccgctcccgtgaaatggtgctatgggaacaacgtgctgcgccctggcgataagtactctctgcgacaggaaggggcaatgctggagttggtggtgaggaacctgcggccacaggacagtggcaggtacagctgctcgttcggcgaccagactacttcggctacactgacagttaccgctctgccagcgcaatttatcggcaagctgcggaataaggaagctactgaaggtgccacagctacactccgctgcgaactctctaaggcagcacctgtggaatggaggaaaggaagcgagaccctgcgtgacggagatcggtactgcctaaggcaggacggtgccatgtgtgaactgcaaattcgcggacttgccatggtggacgccgcagagtattcttgtgtgtgcggcgaggagaggacatccgcctctctgacgatccggccaatgccagcccacttcatagggagactgcgccaccaagagtcaatcgaaggggcaaccgctacactacgatgcgaactgtccaaggccgctcccgtggaatggagaaagggaagggaatccctgcgcgatggcgatcgacacagcctccgccaggacggagcagtgtgcgagttacagatctgtggccttgctgtggctgacgccggtgagtatagctgtgtttgtggtgaagaaagaacctctgctacactcaccgtgaaggccctcccagctaagttcacagagggactgagaaacgaggaagctgtcgagggtgctaccgccatgctatggtgtgagctgtcaaaggttgcgcctgtggagtggaggaagggccctgagaatttgagagacggtgaccggtacatactaaggcaagagggaacccggtgtgaactacagatttgcgggctggcaatggccgacgccggagagtatctgtgcgtctgcggccaggaacgcacttctgctacactgactattagggcactccctgccaggttcatcgaagatgttaaaaaccaggaggcccgagagggtgctaccgccgttttgcagtgcgagttgaattccgccgctcctgtggagtggaggaagggaagcgagactctccgcgacggtgaccgctactcgttgcggcaggacggcaccaagtgtgagttgcagatacgaggactcgcgatggctgacacaggagaatactcttgcgtctgtggccaagagaggaccagcgccatgctgaccgtgagagcccttccaataaaatttaccgaggggctccggaacgaggaggcaaccgagggggcaacggcagttctgagatgcgaactcagcaagatggcaccggttgaatggtggaaggggcacgagacactgagggacggggatcggcactcactacgccaggatggggcaaggtgcgagcttcaaattaggggtctcgttgccgaggatgcgggagaatatttgtgcatgtgcggcaaggagcgaaccagcgctatgctcacagttcgagccatgccatccaagtttatcgagggcttgagaaatgaggaagccaccgagggcgacaccgccactctgtggtgtgaactgtctaaggccgcacctgtggagtggaggaaaggacacgagaccctacgggatggcgatcggcactcactgagacaagatggctcacgatgtgagctgcagatacgcggattagcagtagtggatgctggggagtactcttgcgtgtgcggccaggagcgcacctccgcgactctgacagtgagggcactgccagctcgattcattgaagacgtcaagaatcaggaggcgcgtgaaggcgctacagctgtcctgcagtgtgaactgtcaaaggccgctcctgtagaatggaggaagggcagcgaaacgctgaggggtggagatcgatattccctgcggcaggatgggacccgctgcgagcttcagatacatggcctgagcgtcgccgacactggagagtacagctgcgtctgtgggcaggagcggacatccgctacactgacagtgcgtgcgctacccgctcgacatagtagatccgaggaccaaggaggcctcagacggggacattcctacactgccgtgta

SEQ ID NO: 286294 - DNA, 357 bp, Artificial Sequence
  derived and/or modified sequence
atgatggacagccccttcctggagctgtggcagagcaaggccgtgagcatcagagagcagctgggcctgggcgacagacccaacgacagctactgctacaacagcgccaagaacagcaccgtgctgcagggcgtgaccttcggcggcatccccaccgtgctgctgatcgacgtgagctgcttcctgttcctgatcctggtgttcagcatcatcagaagaagattctgggactacggcagaatcgccctggtgagcgaggccgacagcgagagcagattccagagactgagcagcaccagcagcagcggccagcaggacttcgagaacgagctgggctgctgcccctggctgacctag

SEQ ID NO: 286295 - DNA, 249 bp, Artificial Sequence
  derived and/or modified sequence
atgaaggacagactgctggagagaatcaccgaggaggagagacacgtgcaggaccagcccctgggcatggccttcgtgaccttccaggagaagagcatggccacctacatcctgaaggacttcaacgcctgcaagtgccagagcctgcagtgcaagggcgagccccagcccagcagccacagcagagagctgtacaccagcaagtggaccgtgaccttcgccgccgaccccgaggacatctgctggtag

SEQ ID NO: 286296 - DNA, 357 bp, Artificial Sequence
  derived and/or modified sequence
atgatggactctccttttctggagttgtggcagagtaaagccgtctcaatccgcgagcagctgggtttgggcgataggcctaacgacagctattgctacaattcggcaaaaaacagcacggttctccaaggagtgacatttggtgggatcccgaccgtcctgttgattgatgttagctgttttctgttcctcatcttggtattctcaattatcaggcgccgcttctgggattatgggcggattgcactcgtcagtgaagcagacagcgagtctcgcttccagcggctgtcatctaccagctcttcagggcaacaggacttcgagaacgagctgggctgctgcccctggctgacgtag

SEQ ID NO: 286297 - DNA, 249 bp, Artificial Sequence
  derived and/or modified sequence
atgaaagacaggcttctcgaacggatcacagaggaggaacgccatgtgcaagatcagccccttggcatggcatttgttactttccaggaaaagtctatggctacctatattctgaaggacttcaatgcatgcaaatgtcagtccctgcaatgcaaaggcgaaccccagcccagcagccattcccgggagctgtacacgagcaaatggacagtgaccttcgccgccgatcccgaggatatctgttggtag

SEQ ID NO: 286298 - DNA, 357 bp, Artificial Sequence
  derived and/or modified sequence
atgatggacagccccttcctggagctgtggcagagcaaggctgtgtccatccgggagcagctgggcctgggggaccggcccaatgacagctactgctacaacagcgccaagaacagcacagtgctgcagggcgtgacctttggaggcatccccaccgtgctgctgattgatgtgtcctgcttcctgttcctgatcctggtgttcagcatcatcagaagacgcttctgggactatggaagaattgccctggtgtctgaggccgacagcgagagccgcttccagaggctgagcagcaccagcagcagcggccagcaggactttgaaaatgagctgggctgctgcccctggctgacctag

SEQ ID NO: 286299 - DNA, 249 bp, Artificial Sequence
  derived and/or modified sequence
atgaaggaccggctgctggagcgcatcacagaggaggagagacatgtgcaggaccagcccctgggcatggcctttgtgaccttccaggagaagtccatggccacctacatcctgaaggacttcaatgcctgcaagtgccagagcctgcagtgcaagggggagccccagcccagcagccacagccgggagctgtacaccagcaagtggacagtgacctttgctgctgaccctgaggacatctgctggtag

SEQ ID NO: 286300 - DNA, 357 bp, Artificial Sequence
  derived and/or modified sequence
atgatggacagccccttcctggagctgtggcagagcaaggccgtgtctattcgtgaacagttaggactgggggaccggcctaacgatagttactgttacaacagcgccaaaaactctaccgtgcttcagggcgtgacgttcggcgggatccctactgttctgttgattgatgtgagttgctttttattcttaatattggtcttctcaattattagacgcaggttttgggactacgggcgcatcgctctcgtcagtgaggccgatagtgagtctagatttcagagactttcgtccactagttcgtccggccagcaggacttcgagaatgaactgggatgctgcccttggcttacgtag

SEQ ID NO: 286301 - DNA, 249 bp, Artificial Sequence
  derived and/or modified sequence
atgaaggaccggctgctggagcggatcaccgaggaggagcggcacgtgcaagaccagcctttgggcatggctttcgtaacctttcaggaaaagtccatggctacatatatcctaaaagattttaacgcttgtaaatgtcaaagtctgcagtgcaaaggggagccccagccgtcatcccactccagggagctgtacaccagtaagtggaccgtcacttttgcagccgatcccgaggacatctgttggtag

SEQ ID NO: 286302 - DNA, 357 bp, Artificial Sequence
  derived and/or modified sequence
atgatggacagtccatttctggagctgtggcagtccaaagcggtgagcatccgcgaacagctcggtctgggagacaggcccaatgacagctactgttacaatagtgctaagaacagtactgtgcttcagggcgtcacgtttgggggaatcccaaccgtgctccttatcgatgtgtcttgctttcttttcctgatcttagtgttctctatcattaggcgcaggttctgggactatgggagaatcgcccttgtatcagaagcggactccgagagccggttccaacgtctcagtagtacttcaagttccggccaacaggattttgagaacgaactggggtgctgtccatggctgacttag

SEQ ID NO: 286303 - DNA, 249 bp, Artificial Sequence
  derived and/or modified sequence
atgaaagaccgcctgttagagagaatcacggaggaagaacgacacgtacaagaccagccactggggatggctttcgtcacattccaggagaaatcaatggcaacttatatactgaaggattttaatgcatgcaagtgccagagcctgcaatgtaaaggtgagcctcagccatcgagccatagtagggaactgtatacctccaaatggaccgttacattcgcagcggacccagaagatatctgttggtag

SEQ ID NO: 286304 - DNA, 454 bp, Artificial Sequence
  derived and/or modified sequence
gcctttggctctgccagcactggtgggaacctgcaagaaatttgagccctgaacgtctgccttgtcctgttgtcctgtgctccagggaagacaggcgcgatgatggactccccgttcctggagctgtggcagtccaaggcagtgtccatcagggagcagctgggactcggggaccggcccaacgactcctattgctacaactcggccaaaaacagcaccgtgctccagggggtcacctttggtggcatccccactgtcctgctcatagacgtcagctgcttcctgttcttaatcttggtgttttctattataagaagaagattctgggactatggccgcattgccctggtgtcagaagcagacagcgagtccagatttcagagattgtcatcgacttcctcctcaggtcaacaagactttgaaaatgagctgggatgctgtccctggctgactg

SEQ ID NO: 286305 - DNA, 1018 bp, Artificial Sequence
  derived and/or modified sequence
ccagctctgcacccccagctccctgcctgggatcccagccctgatggcaggtggtttccctctcagcaatgacctcctttggctgcacaccatctttgctgtcatttacctcttcctcactgtgggtttcatgcggcaccacactcagtccattaagtacaaagaggagaacctgtctcctgccatgcaaagaaggctcatagagttgctttggaagtggattctttgtacagcctggaagaagacgctgtaggctggagttgggtaggaaacctgagcataccggcacactggcttgtgggtgacttctctccctgctgtatttcccggacaggtgaggcggaccctgttcatcacaggactccccagagatgccaggaaggagactgtggagagccacttccgggacgcgtatcccacgtgtgaggtggttgatgtgcagctgtgctacaacgtggccaaactgatctacctgtgcaaggagaaaaagaagactgagaagagcctgacctattacacaaacctgcaggtgaagacaggccagcggaccctcatcaaccccaagccctgtggccagttttgctgctgtgaagtgctgggctgtgagtgggaagacgccatctcttactacacacggatgaaggacaggctgctggagaggatcacagaggaagaacgccacgtccaggaccagcccctgggaatggccttcgtcaccttccaggagaagtccatggccacctacatcctgaaagatttcaatgcctgcaagtgtcagagccttcagtgcaaaggtgagccccagccgtcctcccatagcagggagctctatacctccaagtggacagtcacctttgctgctgaccctgaggacatctgctggtaagctcctagaccaaggagaggtgggagagaggcctgggttcctggtgggagctgcccatcacctggagcacaggtgtgacctggcagtcaatggagatctccacacatctgcaattctgtgggctgtgatgct

SEQ ID NO: 286306 - DNA, 5384 bp, Artificial Sequence
  derived and/or modified sequence
ccgcccccgaaggcgagctgcgctgacagccggcggcgggctgggtgtttgcaatacaaaggcggccacgcgcggcgccgctcggtgcagaccatgaattacgtggggcagttagccggccaggtgtttgtcaccgtgaaggagctctacaaggggctgaatcccgccacactctcagggtgcattgacatcattgtcatccgccagcccaatggaaacctccaatgctcccctttccacgtccgctttgggaagatgggggtcctgcgctcccgagagaaagtggttgacatagaaatcaatggggaatctgtggatttgcatatgaaattgggagataatggagaagcattttttgttcaagaaacagataatgatcaggaagttatccctatgcacctggccacctcccccatcctgtcagaaggagcttcgagaatggaatgccagctgaaaaggggctctgtggacaggatgagaggcctggaccccagcacgccagcccaagtgatcgctcccagcgagacgccgtcaagcagctctgtagtaaagaagagaagaaaaaggaggagaaagtcacagctggacagcctgaagagagatgacaacatgaacacatctgaggatgaggacatgttccccatcgagatgagctcggatgaggccatggagctgctggagagcagcagaactcttcctaatgatatacctccattccaagatgatattcctgaggaaaacctctccctggctgtgatttaccctcagtcagcctcataccctaattcggatagagagtggtcacccactcccagtccttccggttcccgaccttcaacacctaaaagtgattcagaattggtcagcaagtccacggaaaggacagggcagaagaacccagaaatgctttggctgtggggagagctgccgcaggctgctaagtcttcttctccacacaagatgaaagagtccagcccattgagcagtagaaaaatttgtgataaaagtcactttcaggccattcacagcgaatcttcagacacttttagtgaccaatcgccaactctggtcggtggggcacttttggaccagaacaagcctcagacagaaatgcagtttgtgaatgaagaagacctggagaccttaggagcagcagcgccactcttgcccatgatcgaggagctcaaacccccctctgccagtgtagtccagacagcaaacaagacggattctccttccaggaaaagagataaacgaagccgacatcttggtgctgacggcgtctacttggatgacctcacagacatggatcctgaagtggcggccctgtattttcccaaaaacggagatccttccggactcgcaaaacatgcaagcgacaacggagcccggtcagccaaccagtccccgcagtcggtgggcagctcgggcgtggacagtggcgtggagagcacctcggacgggctgagggacctcccttccatcgccatctccctctgcgggggcctcagcgaccaccgggagatcacgaaagatgcattcctggagcaagctgtgtcatatcaacagtttgtggacaaccccgctattatcgatgaccccaatctcgtggtaaagattgggagtaaatattataactggacaacagcagcacccctcctcctggcaatgcaggccttccagaaacctttgccaaaggccactgtggaatctatcatgagggataaaatgcccaaaaagggaggaagatggtggttttcatggaggggaagaaacaccacaatcaaggaggaaagtaagccagagcagtgcttggctggcaaggcccatagcaccggagagcaaccgccgcagctcagcttggccaccagggtaaagcatgaatcatcctccagtgatgaggagcgcgcagctgccaagccatcaaacgcaggccacctccctcttctgcctaatgtcagctacaagaagactctccggctgacttccgagcagcttaaaagcttgaagttgaagaatggccccaacgacgtggttttcagtgtcaccacgcagtaccaaggcacgtgccgctgtgagggcaccatctatctgtggaactgggatgataaagtcatcatttctgatattgatgggacaattaccagatcagatactcttggccacattttgcccacccttgggaaggattggacccatcagggcatcgctaagctgtaccataaagtgagccagaatggatataaatttctctactgttctgcccgtgccatcgggatggcggacatgacgcggggctacctgcactgggtcaacgagaggggcacggtgctgccccaggggcccctgctgctgagtcccagcagcctcttctctgccctgcacagagaagtgattgaaaagaagccagaaaagtttaaagtccagtgtttgacagacatcaaaaacctgtttttccccaacacagaacccttttatgctgcttttggaaaccgaccagctgatgtgtattcatacaagcaagtaggagtgtctttgaatagaatatttaccgtcaaccctaaaggagagctggtacaggaacatgcaaagaccaacatctcttcgtatgtgagactctgtgaagtagtcgaccacgttttcccgttgctgaaaagaagccattcttcagactttccctgttcggataccttcagtaacttcaccttttggagagagccactgccaccttttgaaaaccaggacattcattctgcctcagcgtaaaatgtcccaagcagcctcttgccagcagtgcagagcctggttgtcacccattaaaggataggtctccccggagtgcacagctccacctgggagcctggcgcgtcatcattggcctgacagcagagagaattgagaagcatttctcccctgccccaccccggggctgacatttctaagcaagataggaagggagcactttctaggctaggagttgggtgcatttgtaccgtgaaaagcattcctcagttgtggcttaatgccagttacgacgctgcctttccggcctgctccagcaagtagctactggttcacgtgcagtttggggctgtgaaacctaggcagaaggcggctgtctgagggctgtccccgcctaggacagggtcaatcgaggaatgccagatgtgcacggtttttggcaaagtagggggcacatttccattatagcaatgttagtgccaccaccttctgaacacagtggggagggctgtgaaggctcatgtgacctggatctgaggtctctgatagaaatctggacgccaccgggtccaggcctggcctcagacttggccttgtggatgggccccttacagtatttgctgactagtctcatttttaggtgataaatttttctttaattcctttggttaaagatagtctatttcattggcatatctccccccagtttttgtggctcaaggctggaatatttatgccttaatatatctatggcagacatttaagaatgcgctttatctagctcatggtaactttgcaacgccttagattaaaatgacagtaaatattactaaggcagtattttgaatgagtttgacactgccggcttccttccatccagcgaggtggtgctgacagtgtggacttgagcacacttatgccaaatgataatgatactgacttctgttgggagctctccaaagaaactggttggttttaagaaaatagtttcaagaagttcaactatattcttttagatattatgtattgttttactctgattaggttactgtgataggcatttattcatattctttctataccactgtcattaatatattaaaaagatgtatgtgttagactatcgaaagggccttattctctctttctcatagactgaccttcttttggaatttctgagtcatttattttccttagctttttccactcaaattaagggcaagcgaaaaagtaataatttggcattctttaagcctacagaatgtgattctttcacttgtttattacactggctcgtggacagaacaatttgaaaagtgaaagaattattttggtaaaagattttgctttacttttcgaagcattatttttttaaagagtgttttactccaacgattgaaacattttcctatttaaatttcattgttagaatcacaggaggcaaaaaatggaacggttgaatgaaattttactctttctgtgaaagaaaatccacagagttgttgcctccgttgtagttggtgggccccgttagcattggatgcctttgccaaatggttcatgtggacacacaaaggcaaacagatctgccatcgatcgcagatttctgtagaaacacggatgtgcatgtgcagattcccttttgcaggtattaaaaataattaaaaatagtcctgcctgaggttgcagtgagccgagcttgcactactgcactccagcctgggtgacagagtaagactccatgtcaaaaaaaaaaaaaaaaaaaaaaaagtcctgccttaactaactcctctgcgcttgttcactagtaacctaaagaggctatattcattctttatgcaatgagggtatttttgagtgaattttaactgctctgaactaagtataagctcatgggcctgcaaaggttcagacggtttctcctttgcacccaggaggaactttggctgcgagaatggggggatgtatccctcatgcagttggcatccaggcagccctctgcagcagcacaccctgcaggcggagttttcagaggatgcaattttggatcccgaattttgatgtaccttaaacttccacatcactgcaccctgaaacagagcatgctttccagaaagtcacactctcagatctgtgtcaagttcaatgtgagccctggcaaggctggcatattaacacctgccttctggcttctgaaagtgagatttgtatatgggctgcactcacgcatatacgagttggtttatctttgtgtacatgactataacccagtgatgctgaggtcatgtgctggaatgctgtatttggaccacacatttcaaagttgccctatggaaatgaatcctacttagtgacaagtcatcaaatgtttgtcacatgtgatgaagacaaatatgtatacctggcatagagaaaaatatatacctggtacattggagaaaaataattacactttcaaagagaattccctttgcaattttatgtttggatcaccactgtaagcacactttatttgcatttgatctgtatttgtatatgctgatgcaatgataaaaatcactgtaatacttcattgtgttgtactggatgcaaagctagaaaatattgcaataaatgagaccgatgaaagacttctctgaaaa

SEQ ID NO: 286307 - protein, 150 aa, Artificial Sequence
  derived and/or modified sequence
LILEEQFPSGLIGPLFTMNGHLLGDSKDLQDNHFYVAVGLETFKYFPYWKSPRVPSEVQQRYANVEKNSQRKKKVDSKGKEPCKYDGIPPKTQDSVYYAKEEKKKTLAEPLVQRGAEGDVYKAPTPSKETQGALDVKEEHNVQLEVPVDQ

SEQ ID NO: 286308 - protein, 247 aa, Artificial Sequence
  derived and/or modified sequence
MRGNLALVGVLISLAFLSLLPSGHPQPAGDDACSVQILVPGLKGDAGEKGDKGAPGRPGRVGPTGEKGEKGDSGDIGPPGPNGEPGLPCECSQLRKAIGEMDNQVSQLTSELKFIKNAVAGVRETESKIYLLVKEEKRYADAQLSCQGRGGTLSMPKDEAANGLMAAYLAQAGLARVFIGINDLEKEGAFVYSDHSPMRTFNKWRSGEPNNAYDEEDCVEMVASGGWNDVACHTTMYFMCEFDKENM

SEQ ID NO: 286309 - DNA, 1311 bp, Artificial Sequence
  derived and/or modified sequence
ggacggtggacgcagcgcagacaggaagctccccgagataacgctgcggccgggcggcctgatttgctgggctgtctgatggcccgggccgaggcttctccctgcgcctgggactgcggccgcctctctaaatagcagccatgaggcgcctgggggcagtgtcctcgcgggccagcgacgggcaggacgccccgttcgcctagcgcgtgctcaggagttggtgtcctgcctgcgctcaggatgagggggaatctggccctggtgggcgttctaatcagcctggccttcctgtcactgctgccatctggacatcctcagccggctggcgatgacgcctgctctgtgcagatcctcgtccctggcctcaaaggggatgcgggagagaagggagacaaaggcgcccccggacggcctggaagagtcggccccacgggagaaaaaggtgagaaaggagattccggtgacataggaccccctggtcctaatggagaaccaggcctcccatgtgagtgcagccagctgcgcaaggccatcggggagatggacaaccaggtctctcagctgaccagcgagctcaagttcatcaagaatgctgtcgccggtgtgcgcgagacggagagcaagatctacctgctggtgaaggaggagaagcgctacgcggacgcccagctgtcctgccagggccgcgggggcacgctgagcatgcccaaggacgaggctgccaatggcctgatggccgcatacctggcgcaagccggcctggcccgtgtcttcatcggcatcaacgacctggagaaggagggcgccttcgtgtactctgaccactcccccatgcggaccttcaacaagtggcgcagcggtgagcccaacaatgcctacgacgaggaggactgcgtggagatggtggcctcgggcggctggaacgacgtggcctgccacaccaccatgtacttcatgtgtgagtttgacaaggagaacatgtgagcctcaggctggggctgcccattgggggccccacatgtccctgcagggttggcagggacagagcccagaccatggtgccagccagggagctgtccctctgtgaagggtggaggctcactgagtagagggctgttgtctaaactgagaaaatggcctatgcttaagaggaaaatgaaagtgttcctggggtgctgtctctgaagaagcagagtttcattacctgtattgtagccccaatgtcattatgtaattattacccagaattgctcttccataaagcttgtgcctttgtccaagctatacaataaaatctttaagtagtgcagt

SEQ ID NO: 286310 - protein, 292 aa, Artificial Sequence
  derived and/or modified sequence
MTTTRYRPTWDLALDPLVSCKLCLGEYPVEQMTTIAQCQCIFCTLCLKQYVELLIKEGLETAISCPDAACPKQGHLQENEIECMVAAEIMQRYKKLQFEREVLFDPCRTWCPASTCQAVCQLQDVGLQTPQPVQCKACRMEFCSTCKASWHPGQGCPETMPITFLPGETSAAFKMEEDDAPIKRCPKCKVYIERDEGCAQMMCKNCKHAFCWYCLESLDDDFLLIHYDKGPCRNKLGHSRASVIWHRTQVVGIFAGFGLLLLVASPFLLLATPFVLCCKCKCSKGDDDPLPT

SEQ ID NO: 286311 - DNA, 5740 bp, Artificial Sequence
  derived and/or modified sequence
gagcctcccgcgtgcccggcctctgtgcgcgctcgcgccccgcccgcgcagccgcttctccccgcgcgggctctcggcaggcgggaggcggcagggctggcattgcagtgcgggccgtgcgggctgcgcgggcgcggggaggcgcgggcggcaaactgcgggcacccggcaccccgcagccagtaccgggcggaggcgtcagagccgcgcaccgcggacgagcaggcccaggcatccagtaccctgctgactctgacatgcccccagcctcccccagctctgcagggagccctggtgccagagaccttctcccatttctccctatgggtgcctgacctgagggcagagacatctgagtgtgtataagcacagcaggacaccaggacctggcctgaagacatttcctctcctcccctctggatttctcagagactgttctgcgatgaccacaacaaggtaccggcccacctgggacctggccctcgacccgctggtgtcttgcaagctctgtcttggggagtacccagtggagcagatgacaaccatagcccagtgccaatgcatcttctgtactctgtgcctgaaacagtatgttgagctcttgatcaaagaaggattagaaactgcaattagctgcccagatgctgcctgccctaaacagggccacctacaggagaacgagattgagtgcatggttgcagctgaaattatgcaaagatataaaaagctacaatttgaaagagaggtgctgtttgatccctgtcggacttggtgcccggcgtccacctgccaagctgtgtgtcagctccaggacgtggggctgcagaccccccagccagtgcagtgcaaagcctgccgtatggaattctgctccacctgcaaagccagctggcaccctggccagggctgcccggagaccatgccgatcaccttcctccccggggagaccagtgctgctttcaaaatggaagaagatgacgcgcccatcaagcgctgccccaagtgcaaagtctacatcgagcgagacgaaggctgcgcgcagatgatgtgcaagaactgcaagcacgccttctgctggtactgcctggagtctctggacgatgatttccttctgatacactacgataagggaccctgccggaacaagctgggccactcccgggcatctgtgatctggcatcggacacaggttgtgggcatttttgcaggatttgggctgctgctcttggtggcctcacctttcctactcctggccactccctttgtactttgctgcaagtgcaagtgcagtaaaggtgacgacgacccgttacccacctagaggaagcgcgatgctggaacacatccctgcctccgggaagtgtggctctcccccaaccctccccaccgtccccccttcactaaacatctttcttgccttatgtgccccattgagcttcacagtgtcaggctggacgccgtgatttcagggacctatgtcacaatgttcgctgaggccccaggtgtggtggggaggggaggcaggtgtgggtagcgcacatccccacagatcaatctctgcagatgacagggaggtgctgtgagaagtgcaccaggcagctttctctctgtggtagactaggcatgtctggggatggcctaagagactttctgctccttggcttctagatggcaccatgttgtcagagaagtcttttaaggactgccactctcttcagacagaatctgattattccagcttgagagaagcactctgtttatgacaactgtttttattactaatggcatttagtaaaatcctttttagaaggtattttttttccaactgagtagtgaaaatcaacaaggtgcatataaaccatcctatgcctttcttgaaatgtgcattttaagaagttatagttaaacgacttttcaggagatttagaaagccttatgcactctttgtgtttttcttgaaacttgctgtagtaactttttgaacgctgtaagctgtgtactgttataagtgtgcttcctatattgttgcatttccttgataatattgacgtgtttaaaggaacatctcatctccattagatttgccttttgttgttttctctctttggtgattcagctcagctcatgggcctcatcccttctctcccaggtagcagaaaacgctttttattgtattcaatcccactgctttgctcggcaatggttctcctccgaattgctgccgtctggcctctggcctcagtcttcagatagacagtaagaagaaagcagcctcattgatccgcagatgtaggggcctcttggcagaggctggaggactctgggggctagggaagagcctgccagattttcacatttttaaaatgttctagtcattttgagaaatcatatatcttacacagttccaagtcctgttgctaaccgttttgctcttgttggggaaaagaacctcccatttcacttcgttttaacgtggggattttaccacttgatcttttacagggctgtctgtgaccatttccatggcagcaggatgcagggattaataaggacacatacacattattccaccaattgactttgaaaagtggagaaagtgtattctttaaagagaatttacttctaaaagccacaggtgcttttacaaagcaaactgcattgaatttaaaacttctaaaaataacaggcaaatattgtagctatattacagtgggattttaaaaatcttgttaaacattctataaagaagtaaaacaaaatccttttatctcagttatttgcccatcacaagcacatttttaaaatgttgctttgtgtgtgtttgacttctgcatttgagtatcagtctcaggtcctagtttactttccctggttggaaatttatttcttatttcctaacattgaattcgttagaaaaaacagcgtcacctcactcttcacctgtcatgttgattttccttatgaacccgaagccatttagaaaatccctgtgtgtcaaaattacattcaaaaagctctccttgtaattgcaagtttagtaactcagtaagaacatgcctgcgactccctttctggatggaacctgggctgtggctctctgtcgtttgtggtgctgtgatggtgtctactgttagaatagcttttctggaggtgggtggcaactccacgcgggagtcattggctgggcttgagccctcagcctgtgatatgtggatgcagctgtccagccactgccctttaacatgcccagcacacatgggaggcctgtggccctgtgtccagtggcccacaggacacgcctccaccatatgctcatccttcctgcctgaaattgctgctgcccatcgcatgagcccacacagtagcacccccgtccttaggatgagagtcagagcctttggaaaggctgcatccccagggctagagctcagatgaccttatttctagagggacaggctgttctgttggaagagtctctggcccagtcatgcacatctgtagccccagccatccttgtgccttcacctctgatgtgtttcacaagcacgtagttcaacccagatagggaccacagagattctggggccagccaggggcagtcaaattggcacctactggctctgactttttgtatgaagcatgcctcagtttcctcattttgatctagatataaaattaaaattgtccatttcctatataaataccagcaagatcactctgagatacataaactcgcatttccttctgttttagtaaggagtgccagacttatctttgatgggaatacagtatgaaccctgcttgatgtaaaatggaaatagcacacaggcagatggccctgggtttggactttgatcttgccatcattccccagtaaaacctggggagttctgcgttgagtggacggacttattcctgtgaagcggcataatttgtctccattgaaaaatggcattcactcttacagatggtgttcactgcaagccccagaagcatatggcatgtgttcactaagaggcctttaatcctggggagtaaggggcgaaggcccttagacaaccatggctgctgtactgccgcccagggtgggtggccagtgaggactggccttagcccagtggacctgtggcttctctgaggcccttgagtaactgaccacatttggaggttttgctggaaatgcctgacctctcagtctggctctgctgtgtagtccatagcccagccagatgagcttgcagcctcataggaggtcagcaccttgcaaagatgcagtcaccatagatgtccacgtagcagagactgacttaggatctgagataaagcatcggattgcaggaataactgtccaaattagttcttcctcctcaactcataggagtagctgtggacagaggaaccaacatctgccacctctggcattttctttctttttttttctttttgagacggagtttcgcttttgtcccccaagctggagtacaatgacaggatctcggctcactgcaagctctgcctcccgggttcaagcgattctcctgcctcagcctcccaagtagctgggattacaggcacccaccacctcacccagctaatttttgtattttcagtagagacggggtttcaccatgttggccaggctactctcaaactcctgacctcaggtgatctgcccacctcggcttcccaaagtgctggaattacaggcctgagccaccccacccggcctattttcttaaaggggaacaaatgatcttgacaacatattattccataaaaccagtttagggcacaggccagttcctgattagaacacaggacctgtgggagggactatcagagatgcaaaaattacttcaagatgagtttattgttttcatttgtattgcaaaagttagaagtcattttacaaattaaaaaaacatttttttcttggtagtctttaaaaattaggggattgaaaggatccaggatgggctttgtgtgtgtgtctcagattctcatttattagtgagcacacctgtgtatatatataaatcacaaggagatcatcaagggaaaacattttgcatgtgtaaagcttcatgaagttctctttaaaaaataccaaagcttgtttatttctgataattaacctaagcccttatgaaaataaacaaaatgaagggattatgacaggtattaccaaaaacaccaaaaggaacaaaggggcctgcgttaaaacctaattgctaatgcttcacaactaggagagcatgccgtcttgatgtttaaaaaacccagggtctccacccttcctttgatttgtgcaattctgtcttccacagttccggagccttcagtgaggggtagctacatgccccatgcctgccctttctttccttctttgctcactttactatgggtgtattttaatcttgtataaaaatatgcatgaatgagtcatgcacatgtatacgttatgtatttgacaagtggtggtgaaacaaaatcaaaacagatttgatttgtgtttttgaaatgtcagtacattttgtgccactaacactgtgatgtataaaagagctgtttgaatgccttttaatgttgtgttttgtactctggaatcatatggaaaaagtttgatttgtaatttcaatacatattttaaatgtattgtgtcttacgtagtttgtccccccctttagcagggattcctttttaaagctattttggctggaatacaggtgacttttgtaaa

SEQ ID NO: 286312 - DNA, 5743 bp, Artificial Sequence
  derived and/or modified sequence
gagcctcccgcgtgcccggcctctgtgcgcgctcgcgccccgcccgcgcagccgcttctccccgcgcgggctctcggcaggcgggaggcggcagggctggcattgcagtgcgggccgtgcgggctgcgcgggcgcggggaggcgcgggcggcaaactgcgggcacccggcaccccgcagccagtaccgggcggaggcgtcagagccgcgcaccgcggacgagcaggcccaggcatccagtaccctgctgactctgacatgcccccagcctcccccagctctgcagggagccctggtgccagagaccttctcccatttctccctatgggtgcctgacctgagggcagagacatctgagtgtgtataagcacagcaggacaccaggacctggcctgaagacatttcctctcctcccctctggatttctcagagactgttctgcgatgaccacaacaaggtaccggcccacctgggacctggccctcgacccgctggtgtcttgcaagctctgtcttggggagtacccagtggagcagatgacaaccatagcccagtgccaatgcatcttctgtactctgtgcctgaaacagtatgttgagctcttgatcaaagaaggattagaaactgcaattagctgcccagatgctgcctgccctaaacagggccacctacaggagaacgagattgagtgcatggttgcagctgaaattatgcaaagatataaaaagctacaatttgaaagagaggtgctgtttgatccctgtcggacttggtgcccggcgtccacctgccaagctgtgtgtcagctccaggacgtggggctgcagaccccccagccagtgcagtgcaaagcctgccgtatggaattctgctccacctgcaaagccagctggcaccctggccagggctgcccggagaccatgccgatcaccttcctccccggggagaccagtgctgctttcaaaatggaagaagatgacgcgcccatcaagcgctgccccaagtgcaaagtctacatcgagcgagacgaaggctgcgcgcagatgatgtgcaagaactgcaagcacgccttctgctggtactgcctggagtctctggacgatgatttccttctgatacactacgataagggaccctgccggaacaagctgggccactcccgggcatctgtgatctggcatcggacacaggttgtgggcatttttgcaggatttgggctgctgctcttggtggcctcacctttcctactcctggccactccctttgtactttgctgcaagtgcaagtgcagtaaaggtgacgacgacccgttacccacctagaggaagcgcgatgctggaacacatccctgcctccgggaagtgtggctctcccccaaccctccccaccgtccccccttcactaaacatctttcttgccttatgtgccccattgagcttcacagtgtcaggctggacgccgtgatttcagggacctatgtcacaatgttcgctgaggccccaggtgtggtggggaggggaggcaggtgtgggtagcgcacatccccacagatcaatctctgcagatgacagggaggtgctgtgagaagtgcaccaggcagctttctctctgtggtagactaggcatgtctggggatggcctaagagactttctgctccttggcttctagatggcaccatgttgtcagagaagtcttttaaggactgccactctcttcagacagaatctgattattccagcttgagagaagcactctgtttatgacaactgtttttattactaatggcatttagtaaaatcctttttagaaggtattttttttccaactgagtagtgaaaatcaacaaggtgcatataaaccatcctatgcctttcttgaaatgtgcattttaagaagttatagttaaacgacttttcaggagatttagaaagccttatgcactctttgtgtttttcttgaaacttgctgtagtaactttttgaacgctgtaagctgtgtactgttataagtgtgcttcctatattgttgcatttccttgataatattgacgtgtttaaaggaacatctcatctccattagatttgccttttgttgttttctctctttggtgattcagctcagctcatgggcctcatcccttctctcccaggtagcagaaaacgctttttattgtattcaatcccactgctttgctcggcaatggttctcctccgaattgctgccgtctggcctctggcctcagtcttcagatagacagtaagaagaaagcagcctcattgatccgcagatgtaggggcctcttggcagaggctggaggactctgggggctagggaagagcctgccagattttcacatttttaaaatgttctagtcattttgagaaatcatatatcttacacagttccaagtcctgttgctaaccgttttgctcttgttggggaaaagaacctcccatttcacttcgttttaacgtggggattttaccacttgatcttttacagggctgtctgtgaccatttccatggcagcaggatgcagggattaataaggacacatacacattattccaccaattgactttgaaaagtggagaaagtgtattctttaaagagaatttacttctaaaagccacaggtgcttttacaaagcaaactgcattgaatttaaaacttctaaaaataacaggcaaatattgtagctatattacagtgggattttaaaaatcttgttaaacattctataaagaagtaaaacaaaatccttttatctcagttatttgcccatcacaagcacatttttaaaatgttgctttgtgtgtgtttgacttctgcatttgagtatcagtctcaggtcctagtttactttccctggttggaaatttatttcttatttcctaacattgaattcgttagaaaaaacagcgtcacctcactcttcacctgtcatgttgattttccttatgaacccgaagccatttagaaaatccctgtgtgtcaaaattacattcaaaaagctctccttgtaattgcaagtttagtaactcagtaagaacatgcctgcgactccctttctggatggaacctgggctgtggctctctgtcgtttgtggtgctgtgatggtgtctactgttagaatagcttttctggaggtgggtggcaactccacgcgggagtcattggctgggcttgagccctcagcctgtgatatgtggatgcagctgtccagccactgccctttaacatgcccagcacacatgggaggcctgtggccctgtgtccagtggcccacaggacacgcctccaccatatgctcatccttcctgcctgaaattgctgctgcccatcgcatgagcccacacagtagcacccccgtccttaggatgagagtcagagcctttggaaaggctgcatccccagggctagagctcagatgaccttatttctagagggacaggctgttctgttggaagagtctctggcccagtcatgcacatctgtagccccagccatccttgtgccttcacctctgatgtgtttcacaagcacgtagttcaacccagatagggaccacagagattctggggccagccaggggcagtcaaattggcacctactggctctgactttttgtatgaagcatgcctcagtttcctcattttgatctagatataaaattaaaattgtccatttcctatataaataccagcaagatcactctgagatacataaactcgcatttccttctgttttagtaaggagtgccagacttatctttgatgggaatacagtatgaaccctgcttgatgtaaaatggaaatagcacacaggcagatggccctgggtttggactttgatcttgccatcattccccagtaaaacctggggagttctgcgttgagtggacggacttattcctgtgaagcggcataatttgtctccattgaaaaatggcattcactcttacagatggtgttcactgcaagccccagaagcatatggcatgtgttcactaagaggcctttaatcctggggagtaaggggcgaaggcccttagacaaccatggctgctgtactgccgcccagggtgggtggccagtgaggactggccttagcccagtggacctgtggcttctctgaggcccttgagtaactgaccacatttggaggttttgctggaaatgcctgacctctcagtctggctctgctgtgtagtccatagcccagccagatgagcttgcagcctcataggaggtcagcaccttgcaaagatgcagtcaccatagatgtccacgtagcagagactgacttaggatctgagataaagcatcggattgcaggaataactgtccaaattagttcttcctcctcaactcataggagtagctgtggacagaggaaccaacatctgccacctctggcattttctttctttttttttctttttgagacggagtttcgcttttgtcccccaagctggagtacaatgacaggatctcggctcactgcaagctctgcctcccgggttcaagcgattctcctgcctcagcctcccaagtagctgggattacaggcacccaccacctcacccagctaatttttgtattttcagtagagacggggtttcaccatgttggccaggctactctcaaactcctgacctcaggtgatctgcccacctcggcttcccaaagtgctggaattacaggcctgagccaccccacccggcctattttcttaaaggggaacaaatgatcttgacaacatattattccataaaaccagtttagggcacaggccagttcctgattagaacacaggacctgtgggagggactatcagagatgcaaaaattacttcaagatgagtttattgttttcatttgtattgcaaaagttagaagtcattttacaaattaaaaaaacatttttttcttggtagtctttaaaaattaggggattgaaaggatccaggatgggctttgtgtgtgtgtctcagattctcatttattagtgagcacacctgtgtatatatataaatcacaaggagatcatcaagggaaaacattttgcatgtgtaaagcttcatgaagttctctttaaaaaataccaaagcttgtttatttctgataattaacctaagcccttatgaaaataaacaaaatgaagggattatgacaggtattaccaaaaacaccaaaaggaacaaaggggcctgcgttaaaacctaattgctaatgcttcacaactaggagagcatgccgtcttgatgtttaaaaaacccagggtctccacccttcctttgatttgtgcaattctgtcttccacagttccggagccttcagtgaggggtagctacatgccccatgcctgccctttctttccttctttgctcactttactatgggtgtattttaatcttgtataaaaatatgcatgaatgagtcatgcacatgtatacgttatgtatttgacaagtggtggtgaaacaaaatcaaaacagatttgatttgtgtttttgaaatgtcagtacattttgtgccactaacactgtgatgtataaaagagctgtttgaatgccttttaatgttgtgttttgtactctggaatcatatggaaaaagtttgatttgtaatttcaatacatattttaaatgtattgtgtcttacgtagtttgtccccccctttagcagggattcctttttaaagctattttggctggaatacaggtgacttttgtaaaccc

SEQ ID NO: 286313 - DNA, 747 bp, Artificial Sequence
  derived and/or modified sequence
atgaagcccgccagcatcagcgaggaggagctgctgaacctgatcaacaagctgaacaacgacgacaacgtggacggcctgctggtgcagctgcccctgcccgagcacatcgacgagagaagaatctgcaacgccgtgagccccgacaaggacgtggacggcttccacgtgatcaacgtgggcagaatgtgcctggaccagtacagcatgctgcccgccaccccctggggcgtgtgggagatcatcaagagaaccggcatccccaccctgggcaagaacgtggtggtggccggcagaagcaagaacgtgggcatgcccatcgccatgctgctgcacaccgacggcgcccacgagagacccggcggcgacgccaccgtgaccatcagccacagatacacccccaaggagcagctgaagaagcacaccatcctggccgacatcgtgatcagcgccgccggcatccccaacctgatcaccgccgacatgatcaaggagggcgccgccgtgatcgacgtgggcatcaacagagtgcacgaccccgtgaccgccaagcccaagctggtgggcgacgtggacttcgagggcgtgagacagaaggccggctacatcacccccgtgcccggcggcgtgggccccatgaccgtggccatgctgatgaagaacaccatcatcgccgccaagaaggtgctgagactggaggagagagaggtgctgaagagcaaggagctgggcgtggccaccaactag

SEQ ID NO: 286314 - DNA, 561 bp, Artificial Sequence
  derived and/or modified sequence
atgtgcctggaccagtacagcatgctgcccgccaccccctggggcgtgtgggagatcatcaagagaaccggcatccccaccctgggcaagaacgtggtggtggccggcagaagcaagaacgtgggcatgcccatcgccatgctgctgcacaccgacggcgcccacgagagacccggcggcgacgccaccgtgaccatcagccacagatacacccccaaggagcagctgaagaagcacaccatcctggccgacatcgtgatcagcgccgccggcatccccaacctgatcaccgccgacatgatcaaggagggcgccgccgtgatcgacgtgggcatcaacagagtgcacgaccccgtgaccgccaagcccaagctggtgggcgacgtggacttcgagggcgtgagacagaaggccggctacatcacccccgtgcccggcggcgtgggccccatgaccgtggccatgctgatgaagaacaccatcatcgccgccaagaaggtgctgagactggaggagagagaggtgctgaagagcaaggagctgggcgtggccaccaactag

SEQ ID NO: 286315 - DNA, 747 bp, Artificial Sequence
  derived and/or modified sequence
atgaaacctgcttctatatcagaggaagagctcctgaatctgattaataagcttaataacgacgataacgtcgatggccttttagtacagctccccctccctgaacatatcgacgaaaggagaatctgtaatgctgtttctcccgacaaggacgtggacggattccacgtgatcaacgtcggccggatgtgtttagatcagtattccatgttacctgccacaccctggggcgtgtgggagataataaaacgcactggcataccaaccctgggcaagaatgtggttgtagctggaaggagcaagaatgtaggaatgcctatcgcaatgctgctgcataccgacggcgcccatgagagaccaggaggggatgcaacagtgaccatcagccatcggtacacacccaaagaacaactgaaaaagcataccatactggccgatattgtgatcagcgccgccggcattcccaacctgattacagccgatatgatcaaagagggagccgctgtgatcgatgtgggcattaacagggttcacgatcccgtcaccgctaagccaaagctggtcggcgacgtggacttcgagggagtgcgtcagaaggctggctatataacccccgtcccggggggagtgggccccatgaccgtggccatgctaatgaagaataccattattgcagccaagaaggtgctgaggctggaggagagagaagtcttaaagagtaaggagctcggggtggcaactaactag

SEQ ID NO: 286316 - DNA, 561 bp, Artificial Sequence
  derived and/or modified sequence
atgtgcctggatcagtactctatgctgccagcaacaccttggggcgtgtgggaaatcattaagcgcactggaatccctactctgggcaaaaacgtggtcgtggcaggtagatccaagaacgtgggaatgcccatcgcaatgctgctccataccgacggggcgcacgaaaggccaggtggcgacgccaccgtgacaatctcacaccggtataccccaaaagaacaactcaaaaagcataccatactcgccgatatcgttatctcagccgcggggatccctaacctgatcacagctgacatgatcaaggaaggtgctgcagttatcgacgtgggaattaatcgagtacatgatcctgtgaccgcaaagcccaaactcgtgggtgacgtggattttgaaggcgtccggcagaaggcggggtatatcacccccgttcccggcggtgttggccccatgaccgtggctatgctgatgaagaataccatcatcgcagccaaaaaggtgctgcgcctagaggagcgggaagtgctgaagagtaaagaactgggagttgcaaccaactag

SEQ ID NO: 286317 - DNA, 747 bp, Artificial Sequence
  derived and/or modified sequence
atgaagccagccagcatcagcgaggaggagctgctgaacctgatcaacaagctgaacaatgatgacaacgtggatggcctgctggtgcagctgcccctgcctgagcacattgatgagcggcgcatctgcaatgctgtgtccccagacaaggatgtggatggcttccacgtgatcaacgtgggccgcatgtgcctggaccagtacagcatgctgcctgccaccccctggggcgtgtgggagatcatcaagaggacaggcatccccaccctgggcaagaatgtggtggtggccggccgcagcaagaatgtgggcatgcccatcgccatgctgctgcacacagatggagcccacgagaggcctggaggagatgccaccgtgaccatcagccaccgctacacccccaaggagcagctgaagaagcacaccatcctggccgacatcgtcatctctgctgctggcatccccaacctgatcacagctgacatgatcaaggagggcgctgctgtgattgatgtgggcatcaacagagtgcatgaccctgtgacagccaagcccaagctggtgggagatgtggactttgaaggagtgcggcagaaggccggctacatcacccctgtgcctggaggagtgggccccatgacagtggccatgctgatgaagaacaccatcatcgccgccaagaaggtgctgcggctggaggagcgggaggtgctgaagagcaaggagctgggcgtggccaccaactag

SEQ ID NO: 286318 - DNA, 561 bp, Artificial Sequence
  derived and/or modified sequence
atgtgcctggaccagtacagcatgctgcctgccaccccctggggcgtgtgggagatcatcaagaggacaggcatccccaccctgggcaagaatgtggtggtggccggccgcagcaagaatgtgggcatgcccatcgccatgctgctgcacacagatggagcccacgagaggcctggaggagatgccaccgtgaccatcagccaccgctacacccccaaggagcagctgaagaagcacaccatcctggccgacatcgtcatctctgctgctggcatccccaacctgatcacagctgacatgatcaaggagggcgctgctgtgattgatgtgggcatcaacagagtgcatgaccctgtgacagccaagcccaagctggtgggagatgtggactttgaaggagtgcggcagaaggccggctacatcacccctgtgcctggaggagtgggccccatgacagtggccatgctgatgaagaacaccatcatcgccgccaagaaggtgctgcggctggaggagcgggaggtgctgaagagcaaggagctgggcgtggccaccaactag

SEQ ID NO: 286319 - DNA, 1135 bp, Artificial Sequence
  derived and/or modified sequence
ctcccggcgcagtcaccggcgcggtctatggctgcgacttctctaatgtctgctttggctgcccggctgctgcagcccgcgcacagctgctcccttcgccttcgccctttccacctcgcggcagttcgagcatattgatgagagaaggatctgcaatgctgtttctccagacaaggatgttgatggctttcatgtaattaatgtaggacgaatgtgtttggatcagtattccatgttaccggctactccatggggtgtgtgggaaataatcaagcgaactggcattccaaccctagggaagaatgtggttgtggctggaaggtcaaaaaacgttggaatgcccattgcaatgttactgcacacagatggggcgcatgaacgtcccggaggtgatgccactgttacaatatctcatcgatatactcccaaagagcagttgaagaaacatacaattcttgcagatattgtaatatctgctgcaggtattccaaatctgatcacagcagatatgatcaaggaaggagcagcagtcattgatgtgggaataaatagagttcacgatcctgtaactgccaaacccaagttggttggagatgtggattttgaaggagtcagacaaaaagctgggtatatcactccagttcctggaggtgttggccccatgacagtggcaatgctaatgaagaataccattattgctgcaaaaaaggtgctgaggcttgaagagcgagaagtgctgaagtctaaagagcttggggtagccactaattaactactgtgtcttctgtgtcacaaacagcactccaggccagctcaagaagcaaagcaggccaatagaaatgcaatatttttaatttattctactgaaatggtttaaaatgatgccttgtatttattgaaagcttaaatgggtgggtgtttctgcacatacctctgcagtacctcaccagggagcattccagtatcatgcagggtcctgtgatctagccaggagcagccattaacctagtgattaatatgggagacattaccatatggaggatggatgcttcactttgtcaagcacctcagttacacattcgccttttctaggattgcatttcccaagtgctattgcaataacagttgatactca

SEQ ID NO: 286320 - DNA, 747 bp, Artificial Sequence
  derived and/or modified sequence
atgaagcccgccagcatcagcgaggaggagctgctgaacctgatcaataagctgaacaacgacgataacgtggacgggcttttggtgcagctccccctgcctgaacacatcgatgagcggaggatatgtaacgcagtttcgccagacaaagacgttgatggattccatgttatcaatgtgggtagaatgtgcctggaccagtacagtatgttgccagccacaccatggggggtgtgggaaattatcaagagaacggggatccctacactggggaagaatgttgttgtggccgggagaagcaagaacgtcgggatgcctattgctatgctcctgcataccgatggggctcatgaaaggcctggcggagatgcaacagtgacgattagccacaggtatactcctaaggagcagctcaaaaagcatacaattttggcagatatcgtcattagtgctgccggcatccccaatctgatcactgccgacatgataaaagagggggccgccgtaatcgatgtgggaatcaaccgagtgcacgaccccgtaaccgccaaaccaaagctggtcggggacgtcgattttgagggcgtcaggcagaaggctggctacattacaccagttcccggcggggttggccccatgacagtggccatgctgatgaagaataccatcatcgctgcaaagaaagtgttgagattagaggagagggaggtgctaaagagcaaggagcttggcgtggcgacaaattag

SEQ ID NO: 286321 - DNA, 561 bp, Artificial Sequence
  derived and/or modified sequence
atgtgcctggaccagtacagcatgctgcccgccaccccctggggcgtgtgggagattataaagagaaccggcataccgaccttaggtaagaacgtagtggtcgccggcaggtctaagaacgttggtatgcctatcgccatgctcctccataccgatggagcacacgaacggcccggcggtgatgcaactgtaaccatctcacaccggtataccccaaaagagcagctcaagaagcacacaattctcgccgacattgtgatatccgccgccggcatccctaatcttatcacagccgatatgatcaaggagggcgcagcagttatagatgtggggatcaaccgcgtccacgacccagtgaccgctaagcccaaactcgtgggcgatgttgacttcgagggtgtgcggcagaaagccgggtatattacacccgttccagggggtgttgggcctatgaccgttgctatgctcatgaaaaacaccatcatagccgcaaagaaggtcctcaggctggaggaaagagaagtcctgaagagcaaagagcttggggtggccacaaattag

SEQ ID NO: 286322 - DNA, 747 bp, Artificial Sequence
  derived and/or modified sequence
atgaagccagctagtataagcgaggaagagcttcttaacctcattaacaaactgaacaatgacgataacgttgacggtctgttggtgcagctccctctaccagagcacattgatgagcgccgaatttgtaatgcagtctctccagacaaagatgtggacggattccacgtgatcaacgttggccgaatgtgccttgaccaatacagcatgctccccgctacgccctggggagtgtgggaaattatcaaacggacaggtatcccaactctcggcaagaatgtggtggttgcaggtcggagtaaaaatgtaggtatgcctattgctatgctcctccacaccgatggggctcacgagcgcccaggcggtgatgcaacagtcacaataagccaccgctacacaccaaaagagcagctgaaaaagcacaccatcctcgccgatattgtgatctctgccgcaggcatccctaatctcattactgccgatatgatcaaggagggagccgctgtgatcgacgtggggatcaaccgtgtgcacgaccctgtgacagctaaacctaagcttgttggtgatgtggactttgagggcgtccgccagaaagcaggatacatcacgcctgtgccagggggtgtcggtccaatgaccgtcgctatgctgatgaagaataccattatcgcagcgaaaaaagtactgcgcctcgaagagagggaggtgttgaaatcaaaagagttaggcgtggctactaactag

SEQ ID NO: 286323 - DNA, 561 bp, Artificial Sequence
  derived and/or modified sequence
atgtgtctcgatcagtattctatgctgcccgctactccctggggcgtttgggagattattaaaaggacgggcatccctaccctcggtaaaaatgtcgttgttgccggtcgcagcaaaaatgtcggcatgcctatcgccatgctcttacacaccgatggggctcatgaacgccctggaggggacgctaccgtgactattagccacaggtatactcccaaggagcagctcaaaaagcacactatactagcggatatcgtgatcagtgccgcaggaatccctaacctgataactgcagatatgatcaaggagggggctgccgttattgacgtgggcattaatagggtacacgatccggtcaccgctaaaccaaagctggtgggagatgtcgactttgagggtgtacgccagaaggccggatacattacacctgtgcccggaggcgtggggcctatgactgttgctatgttgatgaaaaatacaattatagctgctaaaaaggtgttgcgattagaggagagggaggttctcaagagcaaagaactcggagtggccacaaattag

SEQ ID NO: 286324 - protein, 266 aa, Artificial Sequence
  derived and/or modified sequence
MGSKTLPAPVPIHPSLQLTNYSFLQAVNGLPTVPSDHLPNLYGFSALHAVHLHQWTLGYPAMHLPRSSFSKVPGTVSSLVDARFQLPAFPWFPHVIQPKPEITAGGSVPALKTKPRFDFANLALAATQEDPAKLGRGEGPGSPAGGLGALLDVTKLSPEKKPTRGRLPSKTKKEFVCKFCGRHFTKSYNLLIHERTHTDERPYTCDICHKAFRRQDHLRDHRYIHSKEKPFKCQECGKGFCQSRTLAVHKTLHSQVKELKTSKIKC

SEQ ID NO: 286325 - DNA, 1911 bp, Artificial Sequence
  derived and/or modified sequence
gctcggcctctccccggcacgttctcagctgctcctggttcagacccagcgagggagccgcgagcgaggctcaccgtccccggcgtgcaggatccggggctgctgagcgctcgctcccgcgtgtccggcgcttggagtccccgcggcaggagaggagtcgggacactagagctccaggggcgcctgtgggctccagggcctccggcttccccagtccccttcagctaaagccccagagacgtgctcagccccaggacctctgcggaacaagatccggattgagaagccactgcaactaccgaaatgggcagcaaaaccttgccggcgccggtgcctatccacccttccctgcagctcaccaactactccttccttcaggcagtgaacggcctgcccacagtgccttcggaccatctgcccaacctgtatggtttcagcgcgttgcacgctgtgcacctgcatcagtggacgctgggctacccggccatgcacttgccgcgctcttctttctccaaagtgccgggcacggtgtccagcttggtggatgcgcgcttccagctgcccgcctttccctggttccctcatgtcattcaacccaagcccgagatcaccgctggaggcagcgttccagcgctcaagaccaagccgcgctttgattttgccaacctggccttggcagcaacgcaagaagatccggccaagctcggtcgcggggagggcccaggctcccctgcaggtgggctgggtgccctcctcgacgtgaccaagctgtctccagaaaagaagcccacaaggggacgtctgccttccaagaccaagaaggaattcgtctgcaagttctgtggccgccacttcaccaagtcctacaacctacttatccatgagcggacgcacaccgacgagcggccctacacctgtgacatctgccacaaagccttccggaggcaagaccacctgcgagaccacagatatattcactccaaagagaagcccttcaagtgtcaagagtgtgggaaaggattctgccagtccaggactctcgctgtccacaagacgctacactcacaggtgaaggagctcaaaacctccaagatcaaatgctaaatagaacctgtgggtcacaaggaccctaggcccagcggccctctcctccatagggaccagaagcctgactctggcgggcagcgggagaggcgctcgctcgggaccttccacctctccaacattgtcccctgggtccctggcgcacgcggcacttcagagccccgcccggggccgcgaccccgaccgtccctgctgctcccctaggacgcggctaaactcttggccaaaaggcggtactcacgtggcggaagggaaactgcattaaaaaaagaacgaaagctccgcggagccgcagcggcgcctctcccagaagtattactttttctattgttattttatacgttttcttttttatttttgtctttgaccatataagcttgtaactctgactgcggagagtgagtggagagaggagaggcaacgaagtccttagcactggcagctcccacctcctcctcccgcccctgcccccacccccggagcctgcaaaagtgtaatccctgtatctgcttcagcctcctgccctagggaccgcggggcagccccctcccagctcttgcagctcagctggcggccgtgggctccgggactaggagagcgggacggggacctcgggcctggggtctgcagggggcccggcctccgctgccgcgacactgcgagggagcagccagccaagagccgggcgttatattgcgattggcactttatgctgaccatcggtaacggacatttatcactggagttttttttttttttaactattaaataaacggttattttacaggcaaaaaaaaaaaaaaaaaa

SEQ ID NO: 286326 - DNA, 801 bp, Artificial Sequence
  derived and/or modified sequence
atgggcagcaaaacactccccgcccccgtacctattcaccctagcctgcagctgaccaattatagcttcctccaggccgtaaacgggctgccaactgtgccttccgatcacctgccaaacctttacgggttcagtgcactacatgctgtgcatcttcaccagtggacgttgggatatcccgccatgcatctgcccagatcgtccttcagtaaggtaccgggtactgtttcttctctcgttgatgcacgcttccagctgcctgcatttccgtggttcccccatgtcatacaacctaagccagagatcacagcagggggaagcgtgcctgcccttaagaccaaaccaagatttgactttgcaaaccttgcccttgccgcaacccaggaggatcccgccaaactcgggaggggggaaggtcctggatccccagcagggggtctgggagcactgctcgatgtcacaaaactcagccctgaaaagaaaccgacgcgggggcggctgccttccaaaacaaagaaggagttcgtctgtaagttttgcggccggcactttaccaagtcttataatctgctgatacacgaacgcacccatacagatgagaggccatatacttgcgatatttgtcacaaggcctttaggcgccaggatcatctcagagaccaccggtacattcacagcaaggagaaacccttcaaatgtcaagaatgcggcaagggcttttgtcaaagccgcacgctggcagtgcacaaaacccttcatagtcaagttaaggagcttaaaacgtccaagattaaatgttag

SEQ ID NO: 286327 - DNA, 801 bp, Artificial Sequence
  derived and/or modified sequence
atgggatccaagactctacccgctcccgtcccgatccacccctctttacagctgaccaattattcttttttacaggccgtcaatggactgcccacagtcccgtcagaccacctgcccaacttgtatgggttcagcgccttacacgccgtgcatctgcatcagtggacgctgggataccccgctatgcacctcccacggtccagtttcagtaaagttccaggcactgtcagttcattggtagacgctcggttccagctgccagctttcccatggtttccccacgtcattcagcccaaacccgaaataacggctggaggatcagtacctgctctgaaaacgaaaccccgattcgacttcgccaatctggcgctcgctgccacacaagaggacccagcaaaactcggtcgcggcgaagggccagggagcccagccggcgggctgggggctttactggacgtcaccaagctctctcccgaaaagaaaccaacccgcggcagactcccatctaaaactaaaaaagagttcgtctgcaagttttgtggtcggcactttaccaagtcctataacctgcttatccatgagaggacgcatacagatgaacgtccgtatacatgcgacatctgccacaaggccttcagaagacaagatcacctgcgggaccataggtacatccattccaaggaaaagccttttaagtgccaggagtgtggaaagggcttttgccagtctaggactcttgcagtgcacaagaccctgcattcacaggtgaaggaattgaagaccagtaaaattaagtgttag

SEQ ID NO: 286328 - DNA, 801 bp, Artificial Sequence
  derived and/or modified sequence
atgggcagcaagaccctgcctgcccctgtgcccatccaccccagcctgcagctgaccaactacagcttcctgcaggccgtgaatggcctgcccaccgtgcccagcgaccacctgcccaacctgtatggcttcagcgccctgcatgctgtgcacctgcaccagtggaccctgggctacccagccatgcacctgcccaggagcagcttcagcaaggtgcccggcaccgtgagcagcctggtggatgcccgcttccagctgcctgccttcccctggttcccccacgtgatccagcccaagccagagatcacagctgggggctctgtgcctgccctgaagaccaagcccaggtttgattttgccaacctggccctggccgccacccaggaggaccctgccaagctgggccgcggggagggccctggcagccctgctgggggcctgggcgccctgctggatgtgaccaagctgagccctgagaagaagcccacccggggccgcctgcccagcaagaccaagaaggagtttgtgtgcaagttctgtggccgccacttcaccaagagctacaacctgctgattcatgagaggacccacacagatgagcggccctacacctgtgacatctgccacaaggccttccggcggcaggaccacctgcgggaccaccgctacatccacagcaaggagaagcccttcaagtgccaggagtgtgggaagggcttctgccagagcaggaccctggccgtgcacaagaccctgcacagccaggtgaaggagctgaagaccagcaagatcaagtgctag

SEQ ID NO: 286329 - DNA, 801 bp, Artificial Sequence
  derived and/or modified sequence
atgggcagcaagaccctgcccgcccccgtgcccatccaccccagcctccaactaactaactacagtttcctccaggccgttaatggcctccccaccgtcccctctgaccatctcccaaatctgtatggattcagtgccttacacgctgtccatttgcaccaatggactcttggttatccagctatgcacctacctagatctagcttcagcaaagtacccgggacggtgagctccctggtagacgccagattccagctgcccgcattcccatggtttcctcacgtaattcagccgaaaccagaaattactgcgggcggttcggtccctgctctcaagaccaagcctcggtttgatttcgctaatctggcacttgctgcgactcaggaagacccagcaaaactgggccgtggagaggggcctggcagtcccgctggcggccttggcgctcttcttgacgtgaccaaactgtcacctgaaaaaaaacccacacgaggtcggttaccatctaaaactaaaaaggaattcgtatgtaagttttgcggccgccattttaccaagtcctataacttgctaatccatgagaggacccacaccgacgaaaggccctatacctgcgacatttgtcataaggcattcaggaggcaggatcatctgagggaccatcgttacattcattccaaggaaaaaccttttaagtgtcaggaatgcggaaagggtttctgccagagtagaaccctggcagttcacaaaaccctgcactcccaggttaaagaactgaaaacctccaaaataaagtgctag

SEQ ID NO: 286330 - DNA, 801 bp, Artificial Sequence
  derived and/or modified sequence
atgggcagcaagaccctgcccgcccccgtgcccatccaccccagcctgcagctcacaaactattcctttctccaggccgtgaacgggcttccaaccgtcccctccgaccatttacctaatctatatggcttctccgcactgcacgccgtccacctgcaccaatggaccctgggttacccagcaatgcacctcccaagaagctctttttcaaaggtcccggggaccgtgtcatctctggtggacgcaagatttcagttacccgctttcccgtggttcccgcacgtcatccagcccaagccagagataacagctggcggctccgtccctgcattaaaaaccaaacctcggtttgattttgcaaacctggcgttagccgccacccaagaagaccccgcaaaattggggcgtggtgaaggaccgggaagccccgctggtgggctgggagccctactggacgtgacaaaactctccccagagaaaaagccaacccggggccggctgccctcaaagaccaagaaggagttcgtatgcaaattttgtggaagacactttacaaaatcttacaacctgttaatccatgagcgcacccacaccgacgagaggccttatacttgtgatatctgccacaaagctttccgcagacaggaccacctgcgggaccaccggtacatccactcaaaggagaaaccttttaaatgccaggaatgtggaaagggattttgccagagtcgcaccctcgccgtccacaaaacactgcactcacaggtcaaagaactaaaaacttctaaaatcaaatgttag

SEQ ID NO: 286331 - DNA, 1936 bp, Artificial Sequence
  derived and/or modified sequence
aaataagtaggcggctcggtgctaagggatgagtgagtcggagctcggcctctccccggcacgttctcagctgctcctggttcagacccagcgagggagccgcgagcgaggctcaccgtccccggcgtgcaggatccggggctgctgagcgctcgctcccgcgtgtccggcgcttggagtccccgcggcaggagaggagtcgggacactagagctccaggggcgcctgtgggctccagggcctccggcttccccagtccccttcagctaaagccccagagacgtgctcagccccaggacctctgcggaacaagatccggattgagaagccactgcaactaccgaaatgggcagcaaaaccttgccggcgccggtgcctatccacccttccctgcagctcaccaactactccttccttcaggcagtgaacggcctgcccacagtgccttcggaccatctgcccaacctgtatggtttcagcgcgttgcacgctgtgcacctgcatcagtggacgctgggctacccggccatgcacttgccgcgctcttctttctccaaagtgccgggcacggtgtccagcttggtggatgcgcgcttccagctgcccgcctttccctggttccctcatgtcattcaacccaagcccgagatcaccgctggaggcagcgttccagcgctcaagaccaagccgcgctttgattttgccaacctggccttggcagcaacgcaagaagatccggccaagctcggtcgcggggagggcccaggctcccctgcaggtgggctgggtgccctcctcgacgtgaccaagctgtctccagaaaagaagcccacaaggggacgtctgccttccaagaccaagaaggaattcgtctgcaagttctgtggccgccacttcaccaagtcctacaacctacttatccatgagcggacgcacaccgacgagcggccctacacctgtgacatctgccacaaagccttccggaggcaagaccacctgcgagaccacagatatattcactccaaagagaagcccttcaagtgtcaagagtgtgggaaaggattctgccagtccaggactctcgctgtccacaagacgctacactcacaggtgaaggagctcaaaacctccaagatcaaatgctaaatagaacctgtgggtcacaaggaccctaggcccagcggccctctcctccatagggaccagaagcctgactctggcgggcagcgggagaggcgctcgctcgggaccttccacctctccaacattgtcccctgggtccctggcgcacgcggcacttcagagccccgcccggggccgcgaccccgaccgtccctgctgctcccctaggacgcggctaaactcttggccaaaaggcggtactcacgtggcggaagggaaactgcattaaaaaaagaacgaaagctccgcggagccgcagcggcgcctctcccagaagtattactttttctattgttattttatacgttttcttttttatttttgtctttgaccatataagcttgtaactctgactgcggagagtgagtggagagaggagaggcaacgaagtccttagcactggcagctcccacctcctcctcccgcccctgcccccacccccggagcctgcaaaagtgtaatccctgtatctgcttcagcctcctgccctagggaccgcggggcagccccctcccagctcttgcagctcagctggcggccgtgggctccgggactaggagagcgggacggggacctcgggcctggggtctgcagggggcccggcctccgctgccgcgacactgcgagggagcagccagccaagagccgggcgttatattgcgattggcactttatgctgaccatcggtaacggacatttatcactggagttttttttttttttaactattaaataaacggttattttacaggca

SEQ ID NO: 286332 - DNA, 4175 bp, Artificial Sequence
  derived and/or modified sequence
aagcagttaacttgctcacgctcaattagccccgaataaaccactttaatagactctgcacacttcattaatgcccagcataggactggccgcagacctgggattggcgctccaccgcgcgagggacgcgagtgcccgcactgcgcagggactcgggatcccgagcgcgaattgcgtctgctgtgcgtggtcgggtccccttattctttcccgcaggtcctgaggcccaagctgtttgaggaatgggtgcctagcctggggaagggttttccatcctgtgtttaaagatcgaaagtattcgccctggggttccgcggtctgggaaaccggagccggaggagccgggggctcactcatcctttctggctggagaggctagggtgagactgtgtttttctcttaaccgacctcctgaaaccggatcgtgctttcggcccattcttgatactagtgtaaagagccacgtttcgaatgaatttcgtcctggggaaagtcgttggcgggagcctggggagcactggcttccgaatgcttcagaaaacaaggaacgggctgggccgcggaagaaaataaatgtagtgttggggaaaacaagatcgggcagatagcccggaaaggttggctcccaggaaccattatagctgcaagcactcccccttcccggcaccccctacggagcccaagacggctccggtcttggctctaaggaagaaggcgaggaaaggcctagcgaggttggtggtttctcccacccaggcacggagcgggttcgggacagtgtgcaggccagagtcccacagccacggccgctggcttggccttggataggccaagcacccagaggagcagggggaggcctccgcggcgcccagcggggtccgggacccggagataaggatctgatttccagcgcctggaagggaagaagaggtgacagcaattcaaagagcgctcatccctcctaagtccaggccgacctttgaagttagacaggcttctcctccttccccttccccaacccaaatgggtctcagcttcctctctggcccaatttgaaatttacttctccttgtgtccgagctctgggatagtctcaatttgtcccgggcacgacccgagcttggcgcagtagagatgaccgttgctgaagccacggcgctgccagcggcaccagcgctctgcttcagaggccagatcacgcagataatatgcctcctcttgccctgaggctaaattcattgcaacggtttttatccgagtgctaatttaaactgcgcaggcaaatcacggccagctcgtggtgtttttacaccccattcccaggaaggcctctttccttaggtcccaccacacagccagtggcccccgtgccagcttccaggagaaaaggttttcctgggtcaacattgccctcatacctcctgggaaaaggcactgcacatccctggacagagccaggctttgaaagcctcgctgcagcgaaaggcagaggagtctatgcctgggccttgccctgggctgagggtcagctcaacctggggagggggcacgccaaactagggagcagagcagaggccagtgcatcccagggaaggggaattgctccatgttagaggaaaggacctaggaagaggagagtaatgaagggtaaaggaagaagtcaacagcaggggattgaagctaggcaagagagaagggagtcccacggaccctgctgtgacaatgacttcttaagtagccccaagctaagagccaggagttcagtgcttgggcttcccaaggctccctgacagtttagactttgctcaccctgttctttcctccactggacacatctaaattaggagtgtctgggaggtagagatgaaaagcattttgcagagctcagatgtctccacggaggctggagaccatggccaaggaggtctggagatgccaacccctggtcacttcagtgtggctttcctctggccttgctcaagctctccaaccttgcacttggaggtacatagaccacaggaatggaggcctggcctcagtgttcttgcccataggcatacccacctgcccagggctcacaacacacaagaacatgctgacaacccaaagactcagctccctttttctttgggggagtgagggcactaacacccccttgtttgtgactgcagttgtttgacagagtaaatgaatgtggatattagcaacctccttgaaagcaaagtggtccccgagggctaaggcaaggcagagagtcagtccacaagcagctgcagagagagtggagccaacaggtttcacttacactaaggcagggaagcagatttaaggtcaaagttgagggttttgaggagaaagatgacagggcttctggaagccaaatcgaaggtcagccagaagaccttaatgaatgggagccaggaggtgcatgcatttgtgcgcctgtgtatgtgtgttgtctgtgaggctcttcatgggtgcaatgtgatcccgtgtgtgtgtgtgtgtgtgtgtgtgtgtgtgtgtgagattcaggggttcctgcatttttttaaagccagtgttgtactataaaacattggttgtcccagtctttgcaccttgtcaattctgcctcagaatgtctgaatccacgtgtgcaattctgtgtttatctgcaaataaatgtgtaagtatgttccccagctcctgttatctttgcaggagattgtgattctgtgttgacccgggcttacctggatgtcaatttctacaggacaggcagtttccctttgcttgttcctttctcagtgtcttgcatacagtaggcccttccctctatcaagttgtgtggctctgccagacgccatttggagggagcccttagaccaaggagggttctgaaaagagggctcccctgcgtcttacattcccaccctctttgtgagggcagtgggttttgggaatggggtcttagactcttagctcctgcgctgggtgtgaggagagggtgtggctcggctggaattcaggaggaaggcgacccaccctgaacttctttattcctctccacgcccctgccttcttcttttctttgcagatccggattgagaagccactgcaactaccgaaatgggcagcaaaaccttgccggcgccggtgcctatccacccttccctgcagctcaccaactactccttccttcaggcagtgaacggcctgcccacagtgccttcggaccatctgcccaacctgtatggtttcagcgcgttgcacgctgtgcacctgcatcagtggacgctgggctacccggccatgcacttgccgcgctcttctttctccaaagtgccgggcacggtgtccagcttggtggatgcgcgcttccagctgcccgcctttccctggttccctcatgtcattcaacccaagcccgagatcaccgctggaggcagcgttccagcgctcaagaccaagccgcgctttgattttgccaacctggccttggcagcaacgcaagaagatccggccaagctcggtcgcggggagggcccaggctcccctgcaggtgggctgggtgccctcctcgacgtgaccaagctgtctccagaaaagaagcccacaaggggacgtctgccttccaagaccaagaaggaattcgtctgcaagttctgtggccgccacttcaccaagtcctacaacctacttatccatgagcggacgcacaccgacgagcggccctacacctgtgacatctgccacaaagccttccggaggcaagaccacctgcgagaccacagatatattcactccaaagagaagcccttcaagtgtcaagagtgtgggaaaggattctgccagtccaggactctcgctgtccacaagacgctacactcacaggtgaaggagctcaaaacctccaagatcaaatgctaaatagaacctgtgggtcacaaggaccctaggcccagcggccctctcctccatagggaccagaagcctgactctggcgggcagcgggagaggcgctcgctcgggaccttccacctctccaacattgtcccctgggtccctggcgcacgcggcacttcagagccccgcccggggccgcgaccccgaccgtccctgctgctcccctaggacgcggctaaactcttggccaaaaggcggtactcacgtggcggaagggaaactgcatt

SEQ ID NO: 286333 - DNA, 801 bp, Artificial Sequence
  derived and/or modified sequence
atggggtcaaaaaccctgcccgcaccagtcccaatccacccttcattgcagttaactaactactcctttcttcaggccgtaaacggcctgccgacggtgccaagcgatcatttgccaaatctttacggtttcagcgctcttcacgccgtccacctgcatcagtggacactagggtatcccgcaatgcacttacccaggtcctccttttctaaagtccccggaacagtgagtagcctggtggatgccaggtttcagctcccggcattcccctggttcccccacgtcattcaaccaaagcctgagattacagccggagggtccgtgcctgctcttaagactaaaccacgcttcgactttgctaatcttgccttagcagccacccaagaagatcccgctaaactgggaagaggagagggaccaggcagtcccgcagggggactgggagcacttctcgacgtcaccaagctctccccagagaaaaagcctactcggggtagactcccctctaaaacaaaaaaggaatttgtttgcaaattttgtggacggcattttacaaagtcctataacttactgattcatgagcggacacatacggacgaacgaccgtatacttgcgacatttgtcataaggccttccgaaggcaggatcacctgagggaccaccgttatattcattcaaaggaaaaacctttcaagtgtcaagagtgtggtaagggcttttgccagtccaggacactagcagttcacaagacattacactcccaggttaaggagctcaagacttcaaaaataaagtgttag

SEQ ID NO: 286334 - DNA, 801 bp, Artificial Sequence
  derived and/or modified sequence
atgggcagcaaaacacttcctgcccctgttcctatacacccatctctgcagctgactaattacagctttctccaggccgtgaatggcctgcctacggttcccagcgatcaccttccgaacttatacggtttctccgcgctccatgcggttcatttgcaccaatggacactcggctatcctgccatgcacttgccgagatcttcctttagcaaagtgccgggtacggtgagtagtctcgtggacgcaagatttcagctgcccgcatttccttggtttccacacgtcatacagcccaagcctgaaatcactgctggcggatccgtgcctgcactgaaaactaagccgagattcgattttgccaaccttgccctggccgctacccaggaggacccggcaaaactgggacgcggagagggcccaggttcacccgcaggtggactgggagccttgttagacgtgactaagctgagtcctgaaaagaagccgactcgagggagactcccttcaaaaaccaaaaaagaattcgtttgtaaattctgcggcagacactttactaagtcgtacaatctcctgattcacgaacgaactcataccgacgaaaggccatatacgtgcgatatttgccataaggcatttcgaagacaagatcatttgagggaccaccgctatattcattcaaaggagaagcctttcaagtgccaagagtgtggcaagggcttctgtcagtccaggaccctggctgtccataagacgctgcactcacaggtaaaagagctgaagaccagtaaaattaaatgctag

SEQ ID NO: 286335 - DNA, 801 bp, Artificial Sequence
  derived and/or modified sequence
atgggcagcaagaccctgcccgcccccgtgcccatccaccccagcctgcagctgaccaactacagcttcctgcaggccgtgaacggcctgcccaccgtgcccagcgaccacctgcccaacctgtacggcttcagcgccctgcacgccgtgcacctgcaccagtggaccctgggctaccccgccatgcacctgcccagaagcagcttcagcaaggtgcccggcaccgtgagcagcctggtggacgccagattccagctgcccgccttcccctggttcccccacgtgatccagcccaagcccgagatcaccgccggcggcagcgtgcccgccctgaagaccaagcccagattcgacttcgccaacctggccctggccgccacccaggaggaccccgccaagctgggcagaggcgagggccccggcagccccgccggcggcctgggcgccctgctggacgtgaccaagctgagccccgagaagaagcccaccagaggcagactgcccagcaagaccaagaaggagttcgtgtgcaagttctgcggcagacacttcaccaagagctacaacctgctgatccacgagagaacccacaccgacgagagaccctacacctgcgacatctgccacaaggccttcagaagacaggaccacctgagagaccacagatacatccacagcaaggagaagcccttcaagtgccaggagtgcggcaagggcttctgccagagcagaaccctggccgtgcacaagaccctgcacagccaggtgaaggagctgaagaccagcaagatcaagtgctag

SEQ ID NO: 286336 - protein, 137 aa, Artificial Sequence
  derived and/or modified sequence
MILPTKAMATQELTVKRKLSGNTLQVQASSPVALGVRIPTVALHMMELFDTTVEQLYSIFTVKELTNKKIIMKWRCGNWPEEHYAMVALNFVPTLGQTELQLKEFLSICKEENMKFCWQKQHFEEIKGSLQLTPLNG

SEQ ID NO: 286337 - protein, 300 aa, Artificial Sequence
  derived and/or modified sequence
MAKWGQGNPHWIVEEREDGTNVNNWRWRTERDATSLSKGKFQELLVGIVVENDAGRGEINELKQVEGEASCSSRKGKLIFFYEWNIKLGWKGIVKESGVKHKGLIEIPNLSEENEVDDTEVSLSKKKGDGVILKDLMKTAGTAKVREALGDYLKALKTEFTTGMILPTKAMATQELTVKRKLSGNTLQVQASSPVALGVRIPTVALHMMELFDTTVEQLYSIFTVKELTNKKIIMKWRCGNWPEEHYAMVALNFVPTLGQTELQLKEFLSICKEENMKFCWQKQHFEEIKGSLQLTPLNG

SEQ ID NO: 286338 - DNA, 903 bp, Artificial Sequence
  derived and/or modified sequence
atggccaagtggggccagggcaacccccactggatcgtggaggagagagaggacggcaccaacgtgaacaactggagatggagaaccgagagagacgccaccagcctgagcaagggcaagttccaggagctgctggtgggcatcgtggtggagaacgacgccggcagaggcgagatcaacgagctgaagcaggtggagggcgaggccagctgcagcagcagaaagggcaagctgatcttcttctacgagtggaacatcaagctgggctggaagggcatcgtgaaggagagcggcgtgaagcacaagggcctgatcgagatccccaacctgagcgaggagaacgaggtggacgacaccgaggtgagcctgagcaagaagaagggcgacggcgtgatcctgaaggacctgatgaagaccgccggcaccgccaaggtgagagaggccctgggcgactacctgaaggccctgaagaccgagttcaccaccggcatgatcctgcccaccaaggccatggccacccaggagctgaccgtgaagagaaagctgagcggcaacaccctgcaggtgcaggccagcagccccgtggccctgggcgtgagaatccccaccgtggccctgcacatgatggagctgttcgacaccaccgtggagcagctgtacagcatcttcaccgtgaaggagctgaccaacaagaagatcatcatgaagtggagatgcggcaactggcccgaggagcactacgccatggtggccctgaacttcgtgcccaccctgggccagaccgagctgcagctgaaggagttcctgagcatctgcaaggaggagaacatgaagttctgctggcagaagcagcacttcgaggagatcaagggcagcctgcagctgacccccctgaacggctag

SEQ ID NO: 286339 - DNA, 2437 bp, Artificial Sequence
  derived and/or modified sequence
gccttctggcagtttctgggagctgcgaacgcgccgccccggggctcggcggccggaaacgctggcttcggagccttaggcgccgcggcctttccttgttttccgcccagtccacgccgccatggccaagtggggccaggggaacccccactggatcgtggaggagcgggaggacgggaccaacgtgaacaactggcgctggcgcggctggcggcggcctccttccgggatctggggagggccgggccgcgggagccggggctgccctggggtctgtgcggggccgcggggccagggggtcagggggccgccccccctcagctgctggacgcagggctcggccttcgcctctcggctcgggagagtccttgagtacggagaccggctaggagggttgcagctgcctctttttgaaagttgggttgggccccaagagtgacttccgacagacctttccactcccaccgtctgtggcctgagggccttcccttctcctcccgcccacccctctggatgtttcggggagttagaagggagctggattgagagactgtgttaggggcgggggtatggaacgtagtggaaagggcagaaatttggatctcagttcgcgcccaccccgcaggcgcctcccgcgagccgggccctctgtgagtgagacaagctccccttcctttacgcgcctcacctggcgcgtggggagaggtcggcagccctccgccgcagaacctccggaagggatgtcctctgccctgcgcctctggccggggctgtggtccctccaggccgtcgaggggatgctgaggccggtccccagaggagcatgacttggctggtccggaggagctctgagggcatgggcaatcttggctcgctgcaacctcagcttccagagttcaagcgagtctcctgcttcagcctcatgagtagctgggactacagatgcgtgccactacgtccgtctgatgacagagcgggatgccaccagcttgtccaaagggaagttccaggagctcctggtgggcatcgttgtggagaatgacgctggccgcggcgagatcaacgagttgaagcaggtggaaggggaggcttcgtgcagcagccgcaaaggaaagctgattttcttctatgagtggaacatcaaactgggctggaaaggcatcgttaaagaatctggagtgaagcacaagggattgattgaaatacccaatctttctgaggaaaatgaagtagatgacactgagaatttacaacgggaatgattttaccaacgaaagctatggcaacccaggaattgactgtcaaaagaaaactgagtgggaataccctgcaggttcaggcctcatctccagtggcactgggtgtaaggattcccactgtggctcttcacatgatggaactgtttgacacaactgtagagcagctgtatagcatcttcactgtaaaggagttaacaaataagaagatcatcatgaaatggagatgtgggaactggccagaagaacactatgccatggttgcactgaattttgtgcctactctagggcaaacagaattacaattgaaggagttcctatctatctgtaaagaagagaacatgaaattctgttggcagaagcagcattttgaagaaataaaaggttcactgcagctgacccccctaaatggttgaattaaaatttattataaggcattactttttgtaagcggaaaaagtgtcacatttacctcttccctatcttttgtttaaaaggactgtctttattttatattggatgaaatctatgaacatatatacaatgtaaagcattgtttgactctttattataactagacactgcattgatttaaaagtagcaaacaacctgaaattaagtattaacctgaccttccatcgatattcctctggaaataggtaagtcctgagtgcagatagttgatgtttcccaagctgaagcttgtcctatagcaagcttgcttgcagctgtacttttagttcaagatgacaaaaaataaatggcatgttgacactattcctttattttactttagggtttttaaggtgtgtagatcttaggtcgtaaaacagtggtatattgcattcaaaagcatgttgaggtgagggcaaattggctgtgttttgctccacatctccctgcacatctccctgctgtggttttgcacttcggtgtggagaggattgagaagtctgtggggacacattagttctgtggactgctggtaacacttccagtgaaacagcatataatggataaatgtttcccccctctttcacggttttctcactactttcacctgagaagactgaagcaacgtatgtaaacaaatgaaaagtcatcacaatcagtttaattaagtgcacagaatagcaatcaatcaatcagtcatgtcaataaaaataaaacaattattttta

SEQ ID NO: 286340 - DNA, 903 bp, Artificial Sequence
  derived and/or modified sequence
atggcaaaatggggtcagggaaacccacactggatcgtggaagagagagaggatgggacaaatgtaaataattggcgctggcgtaccgagcgggatgcgacatcattaagtaaagggaagttccaggagttactggtcggcatcgtggtggaaaatgatgcagggcgaggggagatcaatgagctcaagcaagtggagggtgaagcctcttgcagctcccggaaaggcaagctgatttttttctacgagtggaacatcaagctgggctggaagggtattgttaaggagagtggtgtaaaacacaaggggctgatcgagatccccaatctatccgaagagaacgaggtcgatgatacagaagtatccctgagcaaaaagaaaggagacggcgtgatcctgaaggaccttatgaagactgcggggactgcaaaggtgcgggaagctctgggcgattatctgaaggcgctgaagactgaatttactactggaatgatcctacccactaaggcgatggccacacaggagctgacagttaagcgcaagctctctggaaatacactgcaggttcaggctagttccccagtagcattaggggtgaggatccccacagtcgcccttcacatgatggagctgttcgatactaccgtcgagcagctgtactcgattttcaccgtgaaagagctgactaataaaaagataattatgaagtggcggtgtgggaactggcctgaagagcattatgcgatggttgcactgaattttgttccaaccttaggacagaccgaactccaattgaaggagttccttagtatttgcaaggaagaaaacatgaagttctgttggcaaaaacaacattttgaggaaattaaaggatccctccagctgacaccactaaacggttag

SEQ ID NO: 286341 - DNA, 903 bp, Artificial Sequence
  derived and/or modified sequence
atggccaagtggggccagggcaacccccactggatcgtggaggagagagaagatggcaccaacgtgaacaactggcgctggaggacagaaagagatgccaccagcctgagcaagggcaagttccaggagctgctggtgggcatcgtggtggagaatgatgctggccgcggggagatcaatgagctgaagcaggtggagggggaggccagctgcagcagcaggaagggcaagctgatcttcttctatgagtggaacatcaagctgggctggaagggcatcgtgaaggagagcggcgtgaagcacaagggcctgattgagatccccaacctgtctgaagaaaatgaggtggatgacacagaggtgtccctgagcaagaagaagggagatggagtcatcctgaaggacctgatgaagacagctggaacagccaaggtgcgggaggccctgggggactacctgaaggccctgaagacagagttcaccaccggcatgatcctgcccaccaaggccatggccacccaggagctgactgtgaagaggaagctgagcggcaacaccctgcaggtgcaggccagcagccctgtggccctgggcgtgcgcatccccaccgtggccctgcacatgatggagctgtttgacaccaccgtggagcagctgtacagcatcttcaccgtgaaggagctgaccaacaagaagatcatcatgaagtggaggtgtggcaactggccagaggagcactacgccatggtggccctgaactttgtgcccaccctgggccagacagagctgcagctgaaggagttcctgagcatctgcaaggaggagaacatgaagttctgctggcagaagcagcactttgaggagatcaagggcagcctgcagctgacccccctgaatggatag

SEQ ID NO: 286342 - DNA, 2922 bp, Artificial Sequence
  derived and/or modified sequence
ccacgccgccatggccaagtggggccaggggaacccccactggatcgtggaggagcgggaggacgggaccaacgtgaacaactggcgctggcgcggctggcggcggcctccttccgggatctggggagggccgggccgcgggagccggggctgccctggggtctgtgcggggccgcggggccagggggtcagggggccgccccccctcagctgctggacgcagggctcggccttcgcctctcggctcgggagagtccttgagtacggagaccggctaggagggttgcagctgcctctttttgaaagttgggttgggccccaagagtgacttccgacagacctttccactcccaccgtctgtggcctgagggccttcccttctcctcccgcccacccctctggatgtttcggggagttagaagggagctggattgagagactgtgttaggggcgggggtatggaacgtagtggaaagggcagaaatttggatctcagttcgcgcccaccccgcaggcgcctcccgcgagccgggccctctgtgagtgagacaagctccccttcctttacgcgcctcacctggcgcgtggggagaggtcggcagccctccgccgcagaacctccggaagggatgtcctctgccctgcgcctctggccggggctgtggtccctccaggccgtcgaggggatgctgaggccggtccccagaggagcatgacttggctggtccggaggagctctgagggcatgggcaatcttggctcgctgcaacctcagcttccagagttcaagcgagtctcctgcttcagcctcatgagtagctgggactacagatgcgtgccactacgtccgtctgatgtttgtatttttagtagagacagggtttcaccatgttggtcaggctgctctcgaactccagatctcgtgatccgcccgcctgggcctactaaagtgctgggattacaggcgtgagctagatctgactttctagtgtcctagccttggcccgatggacatgtcatttctctcagctcgtttctgtcccctaaagtgagaatattgcctgggaagattacattagacgatgtatatgcgaagacacttgatagctggtattgtcatgattctgattagttcactactgctactttccctgtggcctaggctttgcctatttccagtgggcgagctagctagatcctcctcccttaaataagccagtgtttttaagacagaatactacttgcatagtggacaataatatcttaaagaactgagcaggatgaaaagaatttgatagaaagcaggtttgaggagcacattggaggttggcaggtttcgaggctgcttgagaggacttgggccgatctgggctgggcttggacgtgaccctggcacccaggcaggtggatcccagctggggcttccattcacgactttctggtccctggcaggacagagcgggatgccaccagcttgtccaaagggaagttccaggagctcctggtgggcatcgttgtggagaatgacgctggccgcggcgagatcaacgagttgaagcaggtggaaggggaggcttcgtgcagcagccgcaaaggaaagctgattttcttctatgagtggaacatcaaactgggctggaaaggcatcgttaaagaatctggagtgaagcacaagggattgattgaaatacccaatctttctgaggaaaatgaagtagatgacactgagaatttacaacgggaatgattttaccaacgaaagctatggcaacccaggaattgactgtcaaaagaaaactgagtgggaataccctgcaggttcaggcctcatctccagtggcactgggtgtaaggattcccactgtggctcttcacatgatggaactgtttgacacaactgtagagcagctgtatagcatcttcactgtaaaggagttaacaaataagaagatcatcatgaaatggagatgtgggaactggccagaagaacactatgccatggttgcactgaattttgtgcctactctagggcaaacagaattacaattgaaggagttcctatctatctgtaaagaagagaacatgaaattctgttggcagaagcagcattttgaagaaataaaaggttcactgcagctgacccccctaaatggttgaattaaaatttattataaggcattactttttgtaagcggaaaaagtgtcacatttacctcttccctatcttttgtttaaaaggactgtctttattttatattggatgaaatctatgaacatatatacaatgtaaagcattgtttgactctttattataactagacactgcattgatttaaaagtagcaaacaacctgaaattaagtattaacctgaccttccatcgatattcctctggaaataggtaagtcctgagtgcagatagttgatgtttcccaagctgaagcttgtcctatagcaagcttgcttgcagctgtacttttagttcaagatgacaaaaaataaatggcatgttgacactattcctttattttactttagggtttttaaggtgtgtagatcttaggtcgtaaaacagtggtatattgcattcaaaagcatgttgaggtgagggcaaattggctgtgttttgctccacatctccctgcacatctccctgctgtggttttgcacttcggtgtggagaggattgagaagtctgtggggacacattagttctgtggactgctggtaacacttccagtgaaacagcatataatggataaatgtttcccccctctttcacggttttctcactactttcacctgagaagactgaagcaacgtatgtaaacaaatgaaaagtcatcacaatcagtttaattaagtgcacagaatagcaatcaatcaatcagtcatgtcaataaaaataaaacaattattttta

SEQ ID NO: 286343 - DNA, 903 bp, Artificial Sequence
  derived and/or modified sequence
atggccaagtggggccagggcaacccccactggatcgtggaggagcgtgaggacggcaccaatgtcaataactggcggtggaggacagaaagagatgcaacatccctgtctaaggggaagtttcaagagcttttagtcggcattgtggtggagaatgacgccggtcggggcgaaatcaacgagcttaagcaggtagagggcgaggcgagctgctcctctcgcaaagggaagctcatattcttttacgagtggaatatcaagctaggatggaaaggaattgttaaagagagcggtgtgaagcacaaaggactaattgaaatccccaacctgtccgaggagaacgaggtagacgatacggaggtatccctgtctaagaagaagggcgatggggtgatcttgaaagacctgatgaagaccgccggcaccgccaaggtcagagaggccctgggcgactatctcaaggcactgaaaacggaatttacaaccgggatgatcctgcccaccaaggcgatggccacccaggagctgacagttaagcgtaagctgagcggaaacacgttacaggtgcaggcttctagccccgtggctctgggtgtgcggattccaaccgtggctttacatatgatggaactttttgacacaacagttgagcagctgtacagcatctttacggttaaagaactgaccaacaaaaagatcattatgaaatggcggtgcggaaattggcccgaagaacattacgccatggtcgccttaaacttcgtgcccacattgggccagactgagttgcaactgaaggaatttttatctatttgtaaggaggagaacatgaagttctgctggcaaaagcaacactttgaagaaattaaggggtccctgcagctgacccctctcaatggctag

SEQ ID NO: 286344 - DNA, 903 bp, Artificial Sequence
  derived and/or modified sequence
atggccaagtgggggcaggggaacccccactggatcgtcgaagagcgagaggacgggactaacgtgaacaattggagatggcggactgaacgagacgccacctcactgagcaagggtaagttccaggagctgttggtcggaatagtggtggagaacgatgccggtaggggggaaatcaacgagctcaagcaggtggaaggtgaagcaagctgttcttcccgcaagggaaagctgatctttttctatgagtggaacatcaagctgggctggaagggaatagtaaaagagagtggtgtgaagcacaaggggctgattgagatcccaaatttaagcgaagagaacgaagtggatgataccgaagttagcctgagtaagaagaaaggcgacggagtgattctgaaagatttaatgaagaccgccggaacagctaaagtgcgggaggctttaggtgactacctcaaggccctcaaaactgagtttaccactggcatgatcctgcctactaaggccatggcaacacaggagcttaccgtgaagaggaagctatccggaaacacactgcaggtgcaggcaagcagccccgtggcactcggagtgaggattcctaccgtagctctacacatgatggaactcttcgacaccacggtggaacagctctacagtattttcactgtcaaggaattgactaataagaagataattatgaaatggaggtgtgggaactggcccgaggagcactatgcaatggttgctctgaacttcgtgcctacacttggtcaaaccgagcttcagttgaaggagttcctctctatatgtaaagaagaaaatatgaaattctgctggcagaagcagcacttcgaagaaatcaaagggagtttgcagctcaccccgttgaacggctag

SEQ ID NO: 286345 - DNA, 1667 bp, Artificial Sequence
  derived and/or modified sequence
atggccaagtggggccaggggaacccccactggatcgtggaggagcgggaggacgggaccaacgtgaacaactggcgctggcggacagagcgggatgccaccagcttgtccaaagggaagttccaggagctcctggtgggcatcgttgtggagaatgacgctggccgcggcgagatcaacgagttgaagcaggtggaaggggaggcttcgtgcagcagccgcaaaggaaagctgattttcttctatgagtggaacatcaaactgggctggaaaggcatcgttaaagaatctggagtgaagcacaagggattgattgaaatacccaatctttctgaggaaaatgaagtagatgacactgaggtatcgttgagtaaaaagaaaggagatggggttatactgaaggatcttatgaaaactgcaggcactgccaaggtcagggaggcccttggagattacctgaaggcacttaagacggaatttacaacgggaatgattttaccaacgaaagctatggcaacccaggaattgactgtcaaaagaaaactgagtgggaataccctgcaggttcaggcctcatctccagtggcactgggtgtaaggattcccactgtggctcttcacatgatggaactgtttgacacaactgtagagcagctgtatagcatcttcactgtaaaggagttaacaaataagaagatcatcatgaaatggagatgtgggaactggccagaagaacactatgccatggttgcactgaattttgtgcctactctagggcaaacagaattacaattgaaggagttcctatctatctgtaaagaagagaacatgaaattctgttggcagaagcagcattttgaagaaataaaaggttcactgcagctgacccccctaaatggttgaattaaaatttattataaggcattactttttgtaagcggaaaaagtgtcacatttacctcttccctatcttttgtttaaaaggactgtctttattttatattggatgaaatctatgaacatatatacaatgtaaagcattgtttgactctttattataactagacactgcattgatttaaaagtagcaaacaacctgaaattaagtattaacctgaccttccatcgatattcctctggaaataggtaagtcctgagtgcagatagttgatgtttcccaagctgaagcttgtcctatagcaagcttgcttgcagctgtacttttagttcaagatgacaaaaaataaatggcatgttgacactattcctttattttactttagggtttttaaggtgtgtagatcttaggtcgtaaaacagtggtatattgcattcaaaagcatgttgaggtgagggcaaattggctgtgttttgctccacatctccctgcacatctccctgctgtggttttgcacttcggtgtggagaggattgagaagtctgtggggacacattagttctgtggactgctggtaacacttccagtgaaacagcatataatggataaatgtttcccccctctttcacggttttctcactactttcacctgagaagactgaagcaacgtatgtaaacaaatgaaaagtcatcacaatcagtttaattaagtgcacagaatagcaatcaatcaatcagtcatgtcaataaaaataaaacaattattttt

SEQ ID NO: 286346 - protein, 418 aa, Artificial Sequence
  derived and/or modified sequence
MTEETHPDDDSYIVRVKAVVMTRDDSSGGWFPQEGGGISRVGVCKVMHPEGNGRSGFLIHGERQKDKLVVLECYVRKDLVYTKANPTFHHWKVDNRKFGLTFQSPADARAFDRGVRKAIEDLIEGSTTSSSTIHNEAELGDDDVFTTATDSSSNSSQKREQPTRTISSPTSCEHRRIYTLGHLHDSYPTDHYHLDQPMPRPYRQVSFPDDDEEIVRINPREKIWMTGYEDYRHAPVRGKYPDPSEDADSSYVRFAKGEVPKHDYNYPYVDSSDFGLGEDPKGRGGSVIKTQPSRGKSRRRKEDGERSRCVYCRDMFNHEENRRGHCQDAPDSVRTCIRRVSCMWCADSMLYHCMSDPEGDYTDPCSCDTSDEKFCLRWMALIALSFLAPCMCCYLPLRACYHCGVMCRCCGGKHKAAA

SEQ ID NO: 286347 - DNA, 1257 bp, Artificial Sequence
  derived and/or modified sequence
atgaccgaggagacccaccccgacgacgacagctacatcgtgagagtgaaggccgtggtgatgaccagagacgacagcagcggcggctggttcccccaggagggcggcggcatcagcagagtgggcgtgtgcaaggtgatgcaccccgagggcaacggcagaagcggcttcctgatccacggcgagagacagaaggacaagctggtggtgctggagtgctacgtgagaaaggacctggtgtacaccaaggccaaccccaccttccaccactggaaggtggacaacagaaagttcggcctgaccttccagagccccgccgacgccagagccttcgacagaggcgtgagaaaggccatcgaggacctgatcgagggcagcaccaccagcagcagcaccatccacaacgaggccgagctgggcgacgacgacgtgttcaccaccgccaccgacagcagcagcaacagcagccagaagagagagcagcccaccagaaccatcagcagccccaccagctgcgagcacagaagaatctacaccctgggccacctgcacgacagctaccccaccgaccactaccacctggaccagcccatgcccagaccctacagacaggtgagcttccccgacgacgacgaggagatcgtgagaatcaaccccagagagaagatctggatgaccggctacgaggactacagacacgcccccgtgagaggcaagtaccccgaccccagcgaggacgccgacagcagctacgtgagattcgccaagggcgaggtgcccaagcacgactacaactacccctacgtggacagcagcgacttcggcctgggcgaggaccccaagggcagaggcggcagcgtgatcaagacccagcccagcagaggcaagagcagaagaagaaaggaggacggcgagagaagcagatgcgtgtactgcagagacatgttcaaccacgaggagaacagaagaggccactgccaggacgcccccgacagcgtgagaacctgcatcagaagagtgagctgcatgtggtgcgccgacagcatgctgtaccactgcatgagcgaccccgagggcgactacaccgacccctgcagctgcgacaccagcgacgagaagttctgcctgagatggatggccctgatcgccctgagcttcctggccccctgcatgtgctgctacctgcccctgagagcctgctaccactgcggcgtgatgtgcagatgctgcggcggcaagcacaaggccgccgcctag

SEQ ID NO: 286348 - DNA, 1257 bp, Artificial Sequence
  derived and/or modified sequence
atgaccgaggagacacacccggacgacgatagctacatcgtgcgcgtgaaggcagtggtgatgacccgggacgacagctcaggaggatggttcccgcaagaagggggaggaatctcccgtgtaggcgtgtgcaaagttatgcaccccgagggcaacggccggtctggatttctaatacacggagagcgacagaaggataagctggtggtgcttgagtgctacgtgcggaaagacctcgtgtatactaaagccaaccctacgtttcaccactggaaggtagacaatcgaaaattcgggctgacctttcagagcccagcagatgctcgcgcgtttgacaggggtgtgcgcaaagccatcgaagatctaatcgaggggtccactacttcgagcagcaccatccataacgaggccgagttaggcgatgatgatgttttcaccacagcaaccgacagttcgagcaatagttcgcaaaaacgtgagcagcctacccgcactatcagctcacctaccagctgcgaacaccggagaatctatacactgggacatctgcacgatagctaccctactgatcattatcacctggaccagcctatgccccgcccatatcgccaggtcagcttccctgatgacgatgaggagatcgttaggataaatccacgcgaaaaaatctggatgaccggctacgaggactacagacacgcccccgtcagagggaaatacccagatccgtcagaagatgccgactccagttacgttagatttgccaagggcgaggtgcccaagcatgattacaactacccctatgtagactcctccgattttggactgggcgaagaccctaagggccgcggtggcagtgtaattaagacacagccctcccgaggtaagagtcgacgccgcaaagaagatggagaacgttcacgttgcgtgtactgccgggacatgttcaatcacgaggaaaatagaagagggcattgccaggatgcccccgactccgtgaggacctgcatacggagggtctcctgcatgtggtgtgccgacagcatgctgtaccactgcatgtccgatcctgagggtgattacaccgacccctgctcctgcgacacgagtgatgagaagttctgcctgcgttggatggccttaatcgccctgtcattcctggccccgtgcatgtgttgctatctgccccttagggcttgctaccattgcggggtgatgtgtaggtgttgtggcggtaaacataaggctgctgcctag

SEQ ID NO: 286349 - DNA, 1257 bp, Artificial Sequence
  derived and/or modified sequence
atgacagaggagacccacccagatgatgacagctacatcgtgcgggtgaaggctgtggtgatgaccagagatgacagcagcggcggctggttcccccaggagggcggcggcatcagccgggtgggcgtgtgcaaggtgatgcaccctgagggcaatggccgcagcggcttcctgatccacggggagcggcagaaggacaagctggtggtgctggagtgctacgtgaggaaggacctggtgtacaccaaggccaaccccaccttccaccactggaaggtggacaacaggaagtttggcctgaccttccagagccctgcagatgcccgggcctttgaccggggcgtgaggaaggccatcgaggacctgattgagggcagcaccaccagcagcagcaccatccacaatgaagctgagctgggagatgatgatgtgttcaccacagccacagacagcagcagcaacagcagccagaagcgggagcagcccaccaggaccatcagcagccccaccagctgtgagcaccggcgcatctacaccctgggccacctgcatgacagctaccccacagaccactaccacctggaccagcccatgccccggccctaccggcaggtgtccttcccagatgatgatgaggagatcgtgcgcatcaacccccgggagaagatctggatgacaggctatgaggactacagacatgcccctgtgcggggcaagtacccagaccccagtgaagatgctgacagcagctatgtgcgctttgccaagggggaggtgcccaagcatgactacaactacccctacgtggacagcagtgactttggcctgggggaggaccccaagggccggggcggcagcgtcatcaagacccagcccagccggggcaagagcagaagaaggaaggaggatggagagaggagccgctgtgtgtactgccgggacatgttcaaccacgaggagaacagaagaggccactgccaggatgccccagacagcgtgaggacctgcatccggcgggtgtcctgcatgtggtgtgccgacagcatgctgtaccactgcatgtctgaccctgagggggactacacagacccctgcagctgtgacaccagtgatgagaagttctgcctgcgctggatggccctgattgccctgtccttcctggccccctgcatgtgctgctacctgcccctgcgggcctgctaccactgcggcgtgatgtgccgctgctgcggcggcaagcacaaggctgctgcctag

SEQ ID NO: 286350 - DNA, 1257 bp, Artificial Sequence
  derived and/or modified sequence
atgaccgaggagacccaccccgacgacgacagctacatcgtgcgggtcaaggctgttgtgatgacccgggatgattcctccggcggctggttcccacaggaagggggtggaataagccgggtgggggtgtgtaaagtcatgcaccctgagggcaacggccgctccggttttttaatacatggtgagcgtcagaaagataaattggtcgtactcgagtgttatgttcgtaaagaccttgtgtacaccaaagctaatccaacctttcatcactggaaggttgataataggaagttcggactgaccttccagtcaccggctgacgcccgggccttcgatagaggcgtgagaaaggcaatcgaggacctgatcgagggatccacaacaagctcaagtacgatccataacgaagcagaactaggcgatgacgatgtgtttacaaccgccacagacagttcctccaactcaagccagaagcgcgaacaaccgacgcggaccattagcagcccaacctcatgtgaacatcggagaatctacaccctgggacatctccacgattcatatccaaccgaccattaccaccttgaccagcccatgcctcgcccatatcgtcaggtctcgttccccgacgacgacgaggaaatagtccgcatcaatccacgagaaaaaatttggatgacaggttatgaggactatcgacatgcccctgtcagggggaagtatcccgacccttcagaggacgcagactcttcctatgttcgcttcgctaagggtgaagtccccaagcatgattataattacccatatgtggattcttcagactttgggttgggagaggatcctaaaggtagaggggggtcagtgataaagacacaacctagtcgcggcaaatcccgcaggaggaaagaggacggagaacggagcagatgcgtgtactgcagggatatgttcaatcacgaagagaacagaaggggccactgccaggacgcccctgatagtgtcagaacgtgcatacgacgcgtgagctgtatgtggtgcgctgactccatgctgtaccactgcatgagcgaccccgagggcgattacaccgacccatgcagctgcgatacctccgacgagaagttctgcttgcggtggatggccctgatcgctttgtcatttttagctccatgcatgtgctgttacctgccattgcgcgcctgctatcactgcggagttatgtgcaggtgttgcggaggtaagcacaaggccgccgcctag

SEQ ID NO: 286351 - DNA, 1257 bp, Artificial Sequence
  derived and/or modified sequence
atgaccgaggagacccatccagacgacgatagctacatagttagagttaaagccgtcgtaatgacccgcgacgacagcagcggcggatggttcccacaggagggtgggggaatctcacgagtgggggtctgcaaggtgatgcatcctgaggggaatggcagatctgggtttttaatccacggtgagcgacagaaagataaacttgtcgttttggagtgctacgtgcgcaaggacctcgtttatacaaaggcaaatccaacgttccaccactggaaggtggataaccggaaatttggccttacatttcagtctccagccgacgctagagcctttgaccgaggagtgagaaaagccatcgaggatcttattgagggatccaccacaagcagtagtaccatccacaatgaggcagagctgggagacgatgacgtttttaccaccgcgaccgacagcagctctaattcttctcagaaacgcgagcaacccactagaacaatttcaagccctacaagctgcgagcatagaagaatttataccctggggcacctccacgactcgtacccaacagatcactatcacctggaccaaccaatgcctcgcccttataggcaggtctcgtttcccgatgacgacgaagaaattgtaagaatcaaccctagggagaagatctggatgactgggtatgaggattaccggcatgctccggtgcgcggaaagtaccctgatccatctgaggacgcggatagcagctatgtcaggttcgccaaaggcgaagtccccaagcacgattataactacccttacgttgattcctctgactttggtttgggcgaggacccaaagggtagggggggatctgtgattaaaactcagccatcgagaggcaagtcacgccgacgcaaagaggacggagagcgcagccggtgcgtgtactgtcgtgacatgtttaatcatgaggaaaataggaggggacactgtcaggacgctcccgactctgtgagaacttgtattaggagagtgagctgcatgtggtgtgctgacagtatgctgtaccattgcatgagtgaccccgaaggggactacaccgatccatgtagctgcgacacgtccgatgagaagttctgccttcgttggatggcccttatagctttaagcttcttggccccatgcatgtgttgctatctgcctttgcgcgcttgctatcattgtggggtaatgtgcagatgctgcgggggaaaacacaaggcggcagcatag

SEQ ID NO: 286352 - DNA, 4097 bp, Artificial Sequence
  derived and/or modified sequence
tgcaccccttcccccaaaccctatcccgcgccctgcttccccttctgctgcggcgccctcttcatctctagccgccccccctccccaaatcaggcgatctccggagatgtgaagaaggggggcgagcggacaggaagatgaagggagcaaagctgcccgccgcgggacaggcgtctaggtgaacaagaaaatgaccgaagaaacacacccagacgatgacagctatattgtgcgtgtcaaggctgtggttatgaccagagatgactccagcgggggatggttcccacaggaaggaggcgggatcagtcgcgtcggggtctgtaaggtcatgcaccccgaaggcaatggacgaagcggctttctcatccatggtgaacgacagaaagacaaactggtggtattggaatgctatgtaagaaaggacttggtctacaccaaagccaatccaacgtttcatcactggaaggtcgataataggaagtttggacttactttccaaagccctgctgatgcccgagcctttgacaggggagtaaggaaagcaatcgaagaccttatagaaggttcaacaacgtcatcttccaccatccataatgaagctgagcttggcgatgatgacgtttttacaacagctacagacagttcttctaattcctctcagaagagagagcaacctactcggacaatctcctctcccacatcctgtgagcaccggaggatttataccctgggccacctccacgactcataccccacagaccactatcacctcgatcagccgatgccaaggccctaccgccaggtgagcttcccggacgacgacgaggagatcgtgcgcatcaacccccgggagaagatctggatgacggggtacgaggattaccggcacgcacccgtcaggggcaagtacccggacccctcggaggacgcggactcctcctacgtgcgcttcgccaagggcgaggtccccaagcatgactacaactacccctacgtggactcctcagactttggcctaggcgaggaccccaaaggccgcgggggcagcgtgatcaagacgcagccctcccggggcaagtcgcggcggcggaaggaggacggagagcgctcgcggtgcgtgtactgcagggacatgttcaaccacgaggagaaccgccggggccactgccaggacgcgcccgactccgtgagaacttgcatccgccgggtgagctgcatgtggtgcgcggacagcatgctctatcactgtatgtcggaccccgagggagactatacagacccttgctcgtgcgatactagcgacgagaagttttgcctccggtggatggctcttattgccttgtctttcctggccccctgtatgtgctgttacctgccccttcgggcctgctaccactgcggagtgatgtgcaggtgctgtggcgggaagcacaaagcggccgcgtgactcagtttccctcccttctccctccatccgcagccacaggggaactcgtctcttacatactctcatcttctcccccgctcccttccactccaaggagcgaggagggcaagcggcctcccagctccctggtacctcgaggcaccattccagccagggacgctgccgggtagactctccactccccctgccgcccacactgcagcagccacatccatacacacacgctcgcacagtgttctgaggaaggaaccttcgccacagactcctgtactattaacaatctgtaaccaagctaactgtctcatccatgtgttgatttcctgtttcctcctcccccgcctcttccagttcaaaggagtctgcaattggaactgctgattttcggtgggttttgtagttgatttttccaagagcgtcgaagactctctttctcttggttcaccttgcctgtcgctagcaagcatctggttcagcggaaatgggatgtgagaatgatgaaacccgacagaagtatctcagcctgcagtcagttattatgtataggaggtgagctagttaacaaacttgtaccacaaaacaatatcgctttaacttttctaaagccaaatttcccatgtaagctgcagtttctatctttagcccatcatcattttctgcccccccaaaatctgttgaaatgattcactgatgcaaaacattcacccgtaatagactgagaattgagccttaacttcagattaacttgtgagaatcaggaaaattccttcaactgcattgcatcctcttggaccagggctagaatggggatttcaggtttctatgagcctccccattacccctaaagtagaacattttttaaattgtgttgccaccacttctaaaaatttagcaatattagaataggatactagtgaagtaagaaattttgcttgttgttttgcaaaccaaatagtttcctcaaacacaaatcagtgttcccacgaacaagttccagttgagaaacactaaggttatggtgaataaaaccatagggagcttcttccccccaacccctggctattttatattaatggggagaggggatttttaaatgtcataaatttgaagagtggtgggttgcattttcttcatgggtttatgttttcgtttcattttggactcaatttcacatcaccaaattcctcatttatacttggggaaaaaacaaggccatatgtaaaaacccttccaatgcctaagtgtctttctcctgcaactccaaacccagactcgccactttgggtgcacaggtggttaggtcagccaactggttctgcctgtcgccttgccacggaggaggcttctaattagctggaaaagagtatttttctaatacgttgcaaggattagccaaatcttcttattgaagaaagaagaaaagtgaagagtggttacctatacctagcatagtacaatcagaacctcgtggagaccaccggggacaggcttgcggacgccggctgttcttcccgccacgatctttctgtggtagcggccagcagaagacatggcctgctccccactccctttccccactccttctttattgcacacaggacaccagtcttcaaggaaagggacttttttccagtctgccaatcatattgggaaagtgctagctgtgctcaccttcatggggctgtttccagctcgtccacaagctcatcgattttctttagtagattaccggtgtaaatacccagtgtgcttatgagtcagttagtagacgtcttcattcattggagtaactggtttaggctttccagtttggaaaaggagcagagagctgtccatctggattgatggaagaaaagagaacctcatccatgcctggagaacatctagaaaaccttcagccagcctccagtgctgtcgagagaccaccttcccccgacccggaggcacttccttggggtctttctctagggtctcttctctacaaagcacaacactaatgttcgtttccttagacctcagttcaagtgcccctatttatttcaataagaacgcacatatcccagctgttttttgtttgtcacctctatttagttgttacctgtttctctcttctttcaccccttgtccttttccacccttttaagagttacgctagcagatcttactccacgtatactttttggtttgtgaaggcatcggttaagggcacaaagacagccatggggacatttatgtaaatacgtctctaattgccacactgcagctgaacagtgtgtagtattttcccagtcagctttgccatactgacgtcaatcatttgagagaaattattcagattttatttttgtatctgtggtaacaaaacattaaccaaaagattttctgtccagaagcctccccgaccccccaagctatttgctcacattaacaaattaaagtgcctgaagcataattcattctttacctgtatactaaaaaccctgttgtattgatttttttataataagcctttttacctctgtgtaaaaaatatatatacaagtgtatgatgtacattttagttcttaacttttttttatggtttctaatatgtatgaccaatgtagccattgctttaaaatgtaccgtgtaaatataaacacatcctatcaga

SEQ ID NO: 286353 - protein, 987 aa, Artificial Sequence
  derived and/or modified sequence
MGENLAKKIMFFLLTIKLILNHILDNSEDDTKSLFLIIKIIGDLLQFQGSHKHEFDSRWKSFNLVKKSMENRLHGKKQHIRALLIDRVMLQHELRTLTVEGCEYKKIHQDMIRDLLRLSTSSYSQVRNKAQQTFFAALGAYNFCCRDIIPLVLEFLRPDRQGVTQQQFKGALYCLLGNHSGVCLANLHDWDCIVQTWPAIVSSGLSQAMSLEKPSIVRLFDDLAEKIHRQYETIGLDFTIPKSCVEIAELLQQSKNPSINQILLSPEKIKEGIKRQQEKNADALRNYENLVDTLLDGVEQRNLPWKFEHIGIGLLSLLLRDDRVLPLRAIRFFVENLNHDAIVVRKMAISAVAGILKQLKRTHKKLTINPCEISGCPKPTQIIAGDRPDNHWLHYDSKTIPRTKKEWESSCFVEKTHWGYYTWPKNMVVYAGVEEQPKLGRSREDMTEAEQIIFDHFSDPKFVEQLITFLSLEDRKGKDKFNPRRFCLFKGIFRNFDDAFLPVLKPHLEHLVADSHESTQRCVAEIIAGLIRGSKHWTFEKVEKLWELLCPLLRTALSNITVETYNDWGACIATSCESRDPRKLHWLFELLLESPLSGEGGSFVDACRLYVLQGGLAQQEWRVPELLHRLLKYLEPKLTQVYKNVRERIGSVLTYIFMIDVSLPNTTPTISPHVPEFTARILEKLKPLMDVDEEIQNHVMEENGIGEEDERTQGIKLLKTILKWLMASAGRSFSTAVTEQLQLLPLFFKIAPVENDNSYDELKRDAKLCLSLMSQGLLYPHQVPLVLQVLKQTARSSSWHARYTVLTYLQTMVFYNLFIFLNNEDAVKDIRWLVISLLEDEQLEVREMAATTLSGLLQCNFLTMDSPMQIHFEQLCKTKLPKKRKRDPGSVGDTIPSAELVKRHAGVLGLGACVLSSPYDVPTWMPQLLMNLSAHLNDPQPIEMTVKKTLSNFRRTHHDNWQEHKQQFTDDQLLVLTDLLVSPCYYA

SEQ ID NO: 286354 - protein, 1066 aa, Artificial Sequence
  derived and/or modified sequence
MNHDFQALALESRGMGELLPTKKFWEPDDSTKDGQKGIFLGDDEWRETAWGASHHSMSQPIMVQRRSGQGFHGNSEVNAILSPRSESGGLGVSMVEYVLSSSPADKLDSRFRKGNFGTRDAETDGPEKGDQKGKASPFEEDQNRDLKQGDDDDSKINGRGLPNGMDADCKDFNRTPGSRQASPTEVVERLGPNTNPSEGLGPLPNPTANKPLVEEFSNPETQNLDAMEQVGLESLQFDYPGNQVPMDSSGATVGLFDYNSQQQLFQRTNALTVQQLTAAQQQQYALAAAQQPHIAGVFSAGLAPAAFVPNPYIISAAPPGTDPYTAAGLAAAATLAGPAVVPPQYYGVPWGVYPANLFQQQAAAAANNTASQQAASQAQPGQQQVLRAGAGQRPLTPNQGQQGQQAESLAAAAAANPTLAFGQGLATGMPGYQVLAPTAYYDQTGALVVGPGARTGLGAPVRLMAPTPVLISSAAAQAAAAAAAGGTASSLTGSTNGLFRPIGTQPPQQQQQQPSTNLQSNSFYGSSSLTNSSQSSSLFSHGPGQPGSTSLGFGSGNSLGAAIGSALSGFGSSVGSSASSSATRRESLSTSSDLYKRSSSSLAPIGQPFYNSLGFSSSPSPIGMPLPSQTPGHSLTPPPSLSSHGSSSSLHLGGLTNGSGRYISAAPGAEAKYRSASSTSSLFSSSSQLFPPSRLRYNRSDIMPSGRSRLLEDFRNNRFPNLQLRDLIGHIVEFSQDQHGSRFIQQKLERATPAERQMVFNEILQAAYQLMTDVFGNYVIQKFFEFGSLDQKLALATRIRGHVLPLALQMYGCRVIQKALESISSDQQVISEMVKELDGHVLKCVKDQNGNHVVQKCIECVQPQSLQFIIDAFKGQVFVLSTHPYGCRVIQRILEHCTAEQTLPILEELHQHTEQLVQDQYGNYVIQHVLEHGRPEDKSKIVSEIRGKVLALSQHKFASNVVEKCVTHASRAERALLIDEVCCQNDGPHSALYTMMKDQYANYVVQKMIDMAEPAQRKIIMHKIRPHITTLRKYTYGKHILAKLEKYYLKNSPDLGPIGGPPNGML

SEQ ID NO: 286355 - DNA, 3201 bp, Artificial Sequence
  derived and/or modified sequence
atgaatcacgatttccaggcactggctttggaatctcgggggatgggcgaattactgcccacaaagaagttctgggagcctgatgattctaccaaggacggtcaaaaggggatattccttggcgacgacgaatggcgggaaactgcttggggcgccagtcaccactccatgagtcagccgatcatggtgcaacggcgtagtggtcagggctttcacggaaattctgaagtcaacgcgattttgtctccccgcagcgagtctggcgggctgggggtgagcatggtagagtacgtgctttcttccagtcccgctgataaacttgacagtaggttccgtaagggcaattttggcacaagagacgctgagaccgacggacccgagaagggtgaccagaagggcaaagcaagcccatttgaggaggaccagaaccgggacctgaagcagggagatgatgacgactctaagattaatggacgggggttgcctaacggaatggacgccgattgtaaggactttaaccgcactcctgggagccgccaggctagccctacggaagtcgttgaacgattgggtccgaatactaatcctagcgagggactaggcccgctgcccaatcctaccgccaacaagcccctagtcgaggaattctctaatccggaaacacagaatctggacgcaatggaacaagtcggactagagtccctgcagtttgactatccaggcaaccaggttcctatggactcttcaggggctactgtcggcctctttgactataacagtcaacagcagctgtttcagcgcaccaacgctctcaccgtgcagcagctgactgcagctcagcagcagcagtatgcactcgctgctgcacagcagccacacatcgccggggtattttccgcagggttggcgcctgcggcctttgtaccaaacccatatattatctctgccgcacctcccggcacagatccatataccgctgctggactcgccgcagccgcaaccttggctgggcctgccgttgtaccaccgcagtattacggagtgccatggggagtgtatcctgcaaatttgtttcaacagcaagctgctgcagcagctaacaatacagcttcccaacaggccgcctcacaggcacagcccgggcagcagcaggtcctgcgtgctggggctggtcagaggcccctaacgccaaatcagggacaacaggggcagcaggcagaatcactggctgcggcggcagcggcgaatccaactctggcgttcgggcaaggattagccaccggaatgcccggctatcaggttctggcaccaacagcctattacgaccaaacaggagctttggtggtggggcccggagcccgaaccggcctgggcgctccagtgcgacttatggcccctacacccgtgttaatcagcagcgcagcagcccaggctgccgccgctgcggcagccggtggcaccgcgtcttcccttaccgggagcacgaatggattgttccgtcctatcgggacccagccccctcagcagcaacaacagcagccgagtaccaatttacaatcaaactctttctacgggagctcatccttgactaactctagccagagctcttcactgtttagtcacggcccaggccaacctggctctacgagcctcggcttcgggtcgggcaatagtctgggagcagctattggcagcgcactgtccggatttggtagttccgtgggatcttctgcttcatcttctgccactcggcgagaaagcctgtccacctcgagtgacctgtacaaacgcagcagtagtagccttgcacctattgggcaaccattttacaactcattaggtttctcttcctccccaagcccaatcggaatgccactgcctagccagactcccggacattccctcacaccccccccctccctgagttcacacgggtcatcctccagtttacacttgggaggcctaactaacggaagcgggcgttacatttctgcggccccaggagctgaagcgaagtaccgatcagcatcctcaacaagctctctgttttcgagttcctcgcagcttttcccaccaagcaggctgagatataatcgaagcgatatcatgccttctgggaggtcgcggcttctggaagatttcaggaacaataggtttcctaatctgcagctgcgcgacctgattgggcacatcgtggagttttctcaggatcagcatggcagccggttcattcagcagaagctcgaaagagccacacccgccgagcgccagatggtttttaacgaaatcttgcaggccgcgtaccagcttatgacagacgtttttggaaactacgtcatccagaagttttttgaatttggctcattggatcagaaactggcactcgccacacggattcgcggccacgtcctcccactggccttacagatgtacggttgtcgtgttatccaaaaggccctggagtctattagttccgaccagcaggtgatctcagagatggtgaaagaactcgacgggcacgtcctaaagtgcgtgaaggaccaaaacggaaaccacgtggtacaaaaatgcattgaatgcgtgcagccacagtcactgcagttcatcatcgatgccttcaaaggtcaggttttcgtgctgtcgacccatccctatgggtgtagggtcattcagcgcatcctcgaacactgtactgcggaacagacgttaccaatccttgaagagcttcatcagcacactgagcagctcgtgcaagaccagtatggcaactacgttatacaacatgtcttggagcacggacgtccagaagataaatccaaaattgtcagtgagatcaggggcaaagtgctggctctaagccaacacaaattcgcatccaacgtcgttgaaaagtgcgtgacccacgcaagtagggcagagcgagccctacttattgacgaagtttgctgccagaacgatggacctcacagcgcgttatacacaatgatgaaagatcaatacgccaattacgtggtgcagaaaatgattgatatggccgaaccggcacagcgcaagatcattatgcataaaattcggccgcacatcactaccctgcgcaaatacacctatggtaagcatatattggcaaagctggaaaagtactatcttaagaatagccccgacctcggacccataggcggccctccaaatggtatgctgtag

SEQ ID NO: 286356 - DNA, 105 bp, Artificial Sequence
  derived and/or modified sequence
atgaatcacgattttcaagctttagctcttgaatctcgcggcatgggggaattgcttccaactaaaaaattttgggagcccgacgactccacaaaggacgggtag

SEQ ID NO: 286357 - DNA, 3201 bp, Artificial Sequence
  derived and/or modified sequence
atgaaccacgacttccaggccctggccctggagagccggggcatgggagagctgctgcccaccaagaagttctgggagccagatgacagcaccaaggatggccagaagggcatcttcctgggagatgatgagtggagggagacagcctggggcgccagccaccacagcatgagccagcccatcatggtgcagaggagaagtggccagggcttccacggcaacagcgaggtgaatgccatcctgagccccaggtctgagagcggcggcctgggcgtgtccatggtggagtatgtgctgagcagcagccctgctgacaagctggacagccgcttcagaaaaggaaactttggcaccagagatgctgagacagatggccctgagaagggggaccagaagggcaaggccagcccctttgaggaggaccagaacagagacctgaagcagggagatgatgatgacagcaagatcaatggccggggcctgcccaacggcatggatgctgactgcaaggacttcaacagaacacctggcagccggcaggccagccccacagaggtggtggagcggctgggccccaacaccaaccccagcgagggcctgggccccctgcccaaccccacagccaacaagcccctggtggaggagttcagcaaccctgagacccagaacctggatgccatggagcaggtgggcctggagagcctgcagtttgactacccaggcaaccaggtgcccatggacagcagcggggccaccgtgggcctgtttgactacaacagccagcagcagctgttccagaggaccaatgccctgactgtgcagcagctgacagctgcccagcagcagcagtatgccctggccgccgcccagcagccccacatcgccggggtcttctctgctggcctggccccagctgcctttgtgcccaacccctacatcatctctgctgcccctcctggaacagacccctacacagctgctggcctggccgccgccgccaccctggccggccctgctgtggtgcccccccagtactacggcgtgccctggggcgtgtacccagccaacctcttccagcagcaggccgctgctgctgccaacaacacagccagccagcaggccgccagccaggcccagcccggccagcagcaggtgctgcgggccggggccggccagaggcccctgacccccaaccagggccagcagggccagcaggccgagagcctggccgctgctgctgctgccaaccccaccctggccttcggccagggcctggccaccggcatgcctggctaccaggtgctggcccccacagcctactatgaccagacaggagccctggtggtgggccctggggccaggacaggcctgggcgcccctgtgcggctgatggcccccacccctgtgctgatcagcagcgctgctgcccaggccgctgctgctgctgctgctgggggcacagccagcagcctgaccggcagcaccaacggcctcttccggcccatcggcacccagcccccccagcagcagcagcagcagcccagcaccaacctgcagagcaacagcttctacggcagcagcagcctgaccaacagcagccagagcagcagcctcttcagccacggccctggccagcccggcagcaccagcctgggctttggaagtggcaacagcctgggcgccgccatcggcagcgccctgagcggcttcggcagctctgtgggcagcagcgccagcagcagcgccacccggcgggagagcctgagcaccagcagtgacctgtacaagaggagcagcagcagcctggcccccatcggccagcccttctacaacagcctgggcttcagcagcagccccagccccatcggcatgcccctgcccagccagaccccaggccacagcctgaccccaccacccagcctgagcagccacggcagcagcagcagcctgcacctgggcggcctgaccaatggaagtggccgctacatctctgctgcccctggagctgaggccaagtacagaagtgccagcagcaccagcagcctcttcagcagcagcagccagctgtttcctcccagccggctgcgctacaacagaagtgacatcatgcccagcggccgcagccggctgctggaggacttcaggaacaaccgcttccccaacctgcagctgcgggacctgattggccacatcgtggagttcagccaggaccagcacggcagccgcttcatccagcagaagctggagcgggccaccccagctgagcggcagatggtgttcaatgagatcctgcaggccgcctaccagctgatgacagatgtgtttggaaactacgtgatccagaagttctttgaatttggcagcctggaccagaagctggccctggccacccgcatccggggccacgtgctgcccctggccctgcagatgtatggctgcagggtcatccagaaggccctggagagcatcagcagtgaccagcaggtgatcagcgagatggtgaaggagctggatggccacgtgctgaagtgtgtgaaggaccagaatggaaaccacgtggtgcagaagtgcattgaatgtgtgcagccccagagcctgcagttcatcattgatgccttcaagggccaggtgtttgtgctgagcacccacccctacggctgcagggtcatccagaggatcctggagcactgcacagctgagcagaccctgcccatcctggaggagctgcaccagcacacagagcagctggtgcaggaccagtatggcaactacgtgatccagcacgtgctggagcacggccggcctgaggacaagagcaagatcgtgtctgagatccggggcaaggtgctggccctgagccagcacaagtttgccagcaatgtggtggagaagtgtgtgacccacgccagcagagctgagcgggccctgctgattgatgaggtgtgctgccagaatgatggcccccacagcgccctgtacaccatgatgaaggaccagtatgccaactacgtggtgcagaagatgattgacatggccgagcccgcccagaggaagatcatcatgcacaagatccggccccacatcaccaccctgaggaagtacacctacggcaagcacatcctggccaagctggagaagtactacctgaagaacagcccagacctgggccccatcggcggccccccaaatggcatgctgtag

SEQ ID NO: 286358 - DNA, 105 bp, Artificial Sequence
  derived and/or modified sequence
atgaaccacgacttccaggccctggccctggagagccggggcatgggagagctgctgcccaccaagaagttctgggagccagatgacagcaccaaggatggatag

SEQ ID NO: 286359 - DNA, 3201 bp, Artificial Sequence
  derived and/or modified sequence
atgaaccacgacttccaggccctggccctggagagccggggcatgggagaactccttcctactaagaagttttgggaacccgacgacagcacaaaggatggacagaaggggatcttcctcggcgacgatgagtggagggagaccgcatggggggcatcgcatcacagcatgtcacagcccattatggttcaacggcgatctggccaaggattccacggaaactccgaggtgaatgctattctgtcccccagaagcgaatccgggggtctgggtgtgagtatggtagagtacgtcctttcctcctcaccggccgataagctcgactcaaggttcaggaagggcaatttcggcactagggacgctgagacagacgggccagagaagggggatcagaaaggcaaagcctctcccttcgaggaagatcagaatagggatttgaaacagggggatgatgacgattccaagatcaatggaaggggccttcccaacggcatggacgccgactgcaaagactttaataggactcccgggtctaggcaggcctcccccaccgaggtggtggagcgcctgggacccaatacaaatccaagtgagggacttggaccattgccaaaccctactgcaaataaacctctggttgaggagttctccaaccctgagactcaaaacctcgatgccatggagcaagttggtctggaatcactgcaattcgattacccgggcaaccaggtgccgatggacagctctggggccactgtgggactcttcgactacaactcacagcaacagctatttcagaggaccaacgccctgactgtgcaacagttgaccgccgcccagcagcaacagtacgctctcgccgccgcccagcagcctcacatagctggagtcttctctgcgggactggcacccgccgccttcgtgcccaatccatatataatttcagctgcacctccaggcacggatccatatacagctgccgggctcgctgcagccgccacgctggctggcccagctgttgtgccgccacaatactatggcgtgccttggggtgtttatccggccaacttgttccagcagcaggctgccgccgcagctaataataccgctagtcaacaggccgcatcccaggcccagcctggccaacaacaggtgctgcgagctggagctggacagcgcccacttaccccgaaccagggacaacaaggtcagcaagccgagtcattggctgccgcagctgccgcaaaccccaccctggcctttgggcaaggcctcgctacgggcatgcccggctaccaggtcctagcccctaccgcctattacgaccagacaggcgccctagtggtgggtccaggcgcccgcaccggactgggggcccctgttcggctcatggcgcctacccctgtcctgatatccagcgcggccgctcaggctgccgctgccgctgcagccggcggtactgcttccagtctcacaggatccacaaacggactgttcaggccgattggtacccagccaccacagcagcagcagcagcagccctccaccaacctccagtctaactccttctacggatctagctccctgacgaattctagtcagagctcttcactgttctcccacggcccaggccagccaggcagcacctcgctgggatttggcagtgggaattctttgggggcagcgattggcagcgcgctttccggatttgggagttcagtcggcagttccgccagcagtagcgcaacgcggcgggagagcctttcaacttccagcgatctatataagcggtcttcttcctcgctggcccccatcgggcagccattttataattcccttggcttctcctccagcccctctccaatcgggatgccgctcccctctcagacaccgggccactccttgactccccctcccagtctgtcatcacatggcagtagttcatctctccatcttgggggactcaccaatggcagtgggagatatatctcagccgcccctggcgcggaggctaagtaccggtcagccagttcaacctcaagcctgttcagcagctcaagtcagctcttcccaccctccaggctccgatataaccgaagtgacatcatgcctagcggccgttccagactgctggaggactttcgcaataatcggtttcccaatcttcagctacgcgatcttattggccacattgtcgagttcagccaggaccaacacggctcgcgttttattcagcagaaattagagcgtgccacccctgccgaacggcaaatggtgtttaatgaaatactacaagcagcgtaccaactgatgactgacgtgttcggcaattacgtgattcagaagttttttgagttcggctctctcgatcagaagttggcccttgctactaggataaggggacatgtcctccccctggcattgcagatgtacggctgccgggtaatccaaaaagcactggaaagtatctcctccgaccagcaggttatttccgaaatggtcaaggagttggatggccatgtgctgaaatgcgttaaggatcaaaatggaaatcatgttgtgcagaaatgcatcgaatgtgtacaacctcaatctttgcagttcattatcgatgctttcaagggccaagttttcgtgctaagtacccacccctacggatgtagggtaattcagagaatcctcgagcactgcaccgccgaacagacgttaccaatcctggaagagctacaccagcataccgagcaactcgtccaggatcagtatggaaactatgtcatacaacacgttctggagcatggtcgaccagaagataaaagcaaaattgtttccgagatccgggggaaggtactagcactgagtcagcataaatttgcctccaacgtcgtagagaaatgtgtgacgcatgcttccagggccgagcgagcactcttaatcgacgaggtgtgctgccagaatgatggtccacattcagcactgtacaccatgatgaaagatcagtatgcaaattatgttgtccagaaaatgattgacatggcagaacccgcccagcggaagatcataatgcataaaatacgtccacatattacgactctgaggaaatacacctatggcaaacatatccttgcaaaacttgagaagtactacctgaaaaatagtccagatctcggtccaatcggcggccctcccaatggaatgctgtag

SEQ ID NO: 286360 - DNA, 105 bp, Artificial Sequence
  derived and/or modified sequence
atgaaccacgacttccaggccctggccctggagagccggggcatgggagagctcctcccaactaaaaagttctgggaaccagacgactctactaaagacgggtag

SEQ ID NO: 286361 - DNA, 3201 bp, Artificial Sequence
  derived and/or modified sequence
atgaatcacgacttccaggccctagcgctagagtcaaggggcatgggcgagcttctacccaccaagaagttctgggaaccagacgattcaaccaaagacggtcagaaggggatatttctgggagatgacgagtggagggagacagcctggggggcatctcaccacagtatgtcacagcccattatggtgcaacgaaggagtggtcagggattccacgggaatagtgaagtgaatgcaattttgtcgccccgatctgaatctggcggacttggagtgtcgatggtggaatacgtgctctcttctagccctgcggataaattagattcgagattccggaagggaaacttcggcacaagggacgcagaaactgatggtccggagaagggcgatcagaaggggaaggcctcgcccttcgaagaggatcaaaaccgtgaccttaaacagggtgacgacgacgatagcaagattaatggcaggggccttcctaacggtatggacgccgattgtaaagacttcaataggacccctggctcaagacaggcctctccgacagaagtggtggagcggctgggaccgaatacgaatccctcagaaggtctggggcctctgcctaatcctaccgctaacaagcccttggtggaagaattttcaaatccggagacacagaatctggatgccatggaacaggtcggactggaatctttgcaattcgactatccagggaaccaggtccctatggacagctctggggctactgtgggcctgttcgactataactctcagcagcagctgttccagcgcactaacgccctgacagtccagcaactgaccgccgctcaacaacagcagtacgctttggctgcagctcagcagccgcatatcgccggtgtgttctcagcaggacttgcccctgccgcttttgtgcccaacccatatataatttccgccgcacccccaggtactgatccatacaccgctgcgggactggcagccgcagctacacttgccggtccagcagtcgtgccacctcagtactatggtgttccttggggggtctacccggcaaatcttttccagcagcaggccgcagccgctgccaataacaccgctagtcagcaggcagctagccaagcccagcccggtcagcagcaggttctaagggctggagccggtcagcgcccattgactcccaatcaagggcagcaaggccagcaagcagaatctctggccgcagcagctgcggcaaaccccacgttggctttcggacagggcctcgccactggcatgcctggataccaagtgctcgcacccaccgcctactatgatcagaccggagcccttgtggtgggaccaggtgcacggaccggactgggcgcaccggtgcgactgatggcccctaccccggtgcttatttcttcagctgccgcacaggctgctgcagccgctgctgcagggggaacagcctcttcacttactggctctaccaacggtctttttcgccctattggaacacagccccctcaacaacaacagcaacaaccctccactaacctgcagtcaaattctttttatggcagctcgagtctgaccaacagcagccagagtagttcactttttagtcacgggcctgggcaaccagggtctacctcattgggatttggatccggtaactcactaggcgctgcaataggctctgcgctgtcaggattcgggtcctctgtggggtcaagtgctagctcaagcgctacccggagagagagcctcagcacttcaagcgatctctataaaagaagttctagcagtttggcccctatcggacagcctttctacaacagtctaggattctcctcctccccgtccccgataggcatgcccctcccatcgcagacacccggtcattcactgactcctcctccatcgctgtcctcccacggctcatctagtagtctgcatcttggtggcttgacgaatgggtctgggaggtatatttcggctgcacctggggcagaggccaagtatagaagtgcaagcagcacctctagcctgttctcaagcagttctcagctctttccgccttccaggctccgctataaccggtccgacatcatgcctagcgggagaagccgactgttagaggattttaggaataaccgattccccaatctgcagctgagagatctcattgggcacattgttgaattctctcaggaccagcacgggagtagattcatccagcaaaagctcgagcgagccaccccagcggaacggcagatggtgttcaatgagatcctgcaggcagcataccagctgatgaccgatgtcttcggcaactacgtaattcagaagttttttgagtttgggtccctggatcagaagctggctttggcaacccgcatccggggacatgtgctgccattggctctgcagatgtacggttgccgggttattcagaaagctcttgagtcgatatcgagcgaccaacaggttatatcagaaatggtcaaagaactagacgggcacgtgcttaagtgtgttaaagatcagaatgggaatcacgtcgtgcagaagtgcattgaatgtgtccaacctcagtccctgcagttcattattgatgcattcaagggacaggtgtttgtcctgtcaacccatccatacggatgtcgagtgatccagcgtatcctggagcattgcacagcggaacagactctgccgatcctcgaagaattacaccaacatacagagcagcttgtgcaggatcagtacggtaattacgtgattcagcatgtactggaacacggacgcccagaggacaaatctaagattgtctccgaaattcggggtaaggtattggcattatcacagcataagttcgcttcgaacgtagttgagaaatgcgtgacacatgcttcacgcgctgaaagagcactgttgatcgatgaggtatgttgccagaatgatggcccacactccgcactgtataccatgatgaaggaccagtacgctaactatgtcgtgcaaaaaatgatcgacatggccgagcctgcccagagaaagattatcatgcataagatacgccctcacattactactctgcgcaaatatacctatggtaaacacattctcgccaagctcgagaagtattacttgaaaaattcacccgacctgggaccaattggaggtcctccaaacggaatgctctag

SEQ ID NO: 286362 - DNA, 105 bp, Artificial Sequence
  derived and/or modified sequence
atgaatcacgacttccaagccctggctttggagtccaggggcatgggcgagctgttgcctactaaaaaattctgggagcctgatgactcaaccaaagacgggtag

SEQ ID NO: 286363 - DNA, 6117 bp, Artificial Sequence
  derived and/or modified sequence
aacaggtttgatctgtggatgaaatgaatcatgattttcaagctcttgcattagaatctcggggaatgggagagcttttgcctaccaaaaagttttgggaacctgatgattcaacaaaagatggacaaaaaggcatatttcttggggatgatgaatggagagagactgcatggggagcttctcaccattcaatgtcccagcctattatggtacagagaagatctggacagggttttcatggaaacagtgaagtaaatgcaatactgtctccgcgatcagaaagtggaggccttggtgtgagcatggtagaatatgtattaagttcttctcctgctgataaattggattctcgatttaggaagggaaattttggcactagagatgctgaaacagatggacctgagaaaggagatcaaaaaggcaaggcttctccatttgaggaggaccaaaacagagatcttaaacaaggagatgatgatgattctaaaataaatggcagaggtttgccaaatggaatggatgccgattgcaaagattttaatcgtactcctggaagtcgtcaagcctctccaactgaagtagttgagcgcttgggccccaatactaatccctcagaaggactggggcctcttcctaatcctacagctaataaaccacttgttgaagaattttcaaatcctgaaactcagaatctggatgccatggaacaagttggtctggaatccttacagtttgactatcctggtaatcaggtaccaatggactcttcaggagctactgtaggcctttttgactacaattcccagcagcagctctttcagaggactaatgcactaacagttcaacagttaactgcagctcaacagcagcaatatgcattagcagcagctcagcagccacatatagctggtgtattctcagcaggccttgctccagctgcatttgtgccaaatccatacattattagtgctgctcctccagggaccgatccgtatactgcagcaggattggctgcagcagctacattagcaggtccagcagtggttccacctcagtattacggcgttccatggggggtgtatccagccaacttatttcagcagcaagctgcagctgcggcaaataacacagccagtcagcaagcagcatcacaagctcagcctggacagcaacaggttctccgtgctggagcaggtcagcgtcctcttactcccaatcagggtcagcaagggcagcaagcagaatcacttgcggcagctgcagcagcaaatccaacattggcttttggtcagggtcttgctactggcatgccaggctatcaagtactagctccaactgcctattatgatcagactggtgccttagtggttggccctggagcaaggactggccttggagctccagttcggttaatggctccaacacctgttttaattagttcagcagcagcacaagctgcagcagcagcagcagctggaggaactgcaagtagccttacaggcagcacaaatggtctgtttcggccaattggcactcagccaccacagcagcagcaacagcagccaagcactaatctgcaatctaattcattttatggaagcagttctttgactaatagctcccagagtagttctttattttctcatggacctggtcaacctggaagtacatctcttggctttggaagtggtaactctttgggtgctgctataggctcagccctcagtggatttggttcatcagttggcagttctgcaagtagtagtgccacaaggagagagtctctatctactagctctgacttgtacaaaagatctagtagcagcctagcacccatagggcaaccattttacaatagtctgggattttcctcctctccaagtccaataggcatgcctctgccaagccaaactccaggacattcacttacgccaccgccatcactttcatcacatggatcctcatccagtttgcatttaggaggactgacaaatggtagtggtcgatatatctctgcagcacctggagcagaagcaaaatatcgaagtgcttcaagcacttccagtctatttagctccagcagccagctctttcctccttcccggcttcggtataataggtctgatattatgccttctggccgcagtagattattggaagatttcagaaacaaccgcttcccaaaccttcagcttagagacttgattggacatatagttgagttttctcaagaccagcatggttctagattcatacagcaaaaactagagagagctactccagctgagcgacagatggtatttaatgaaattctgcaagcagcctatcaattaatgactgatgtttttggcaactatgttatacagaagttttttgagtttgggagtctggatcaaaaattagccctggctactcgtattcgtggtcatgttctacccttagccttgcagatgtatggctgccgcgttattcagaaagcattagaatctatttcttctgaccagcaggtaattagtgaaatggtaaaggagctggatggtcatgtgctcaaatgtgtgaaagatcagaatggaaaccatgttgtacaaaaatgtatcgaatgtgttcagccacagtcactacagttcatcattgatgctttcaagggacaagtatttgtgctttcaactcatccttatggctgcagagtaattcagcgcatcctagagcattgcactgcagaacagaccttacctatcttagaagaactccaccaacatacagagcagttggtacaggatcagtatggcaattatgttattcagcatgtactggaacacggtcgacctgaagacaagagcaaaattgtttccgaaatcaggggaaaggttttagccctgagtcaacacaaatttgccagcaatgtagtagaaaagtgtgttactcatgcctcccgtgctgagagagctttactgattgacgaggtttgctgccagaatgatggtcctcacagtgccttatacaccatgatgaaggaccagtatgccaattacgtggttcaaaagatgattgatatggctgaacctgctcagagaaagataatcatgcacaagattcgacctcacattactactttgcgcaaatacacatacgggaagcatatactggccaagttggaaaagtattatttgaagaatagcccggacctaggacctattggaggaccaccaaatggaatgctgtaaattacaggagcaagagaaagaagataatttaaccatgtgaaaagaatttttttgtgtgtgaattatcaaaacacaactcaactatgaatcttcaatttttttttaaagcaaaactatttattgactttattcatccatttgtaaattttttaaggttcttgtgtatatttggggggtgggggatgaattataaattatattcagccctgagtggagacctatcagattggattgctggcaaagcacagaatgcctgtatatgatgtaactgtatcaaaaataaaaagctgtcacatattttgtaaatttttaccttgtaaagtcacaaaaatagtttttaaaggaaaaagtacagtattcttttaataaactggctcacagtctggtaggtctacaaccccatagcacaacaggtttatagagatgtatatagaattatagtccttatttttttcctttgcgtgaaaccttttataacagattaacaatcaactgcataaatattattaatattttaaaaagagttaagttgtattttgataattcacaaactatcatgcaaataacgagtaagtagacaagaataaagtggtttgagatgaaaagaacctaacattatttacagtagatgtggttttaatacaattactgccctaaaatgtctctggcaatgtacagaaatattgtatatacttacatatgtaattgttgtaagagttaaatacaaaatcatggtgacacttccaattaagtgcactaaatgaaaagttaagtcacttattaacttttcagtttggtttgcaatgagaaagagtggaaatttgtattttgttttgcttatagaattacagacatgttgaggaagtgttgagctttattttgctttttcatagaggcagaaagtaggaaccagatagagatgaaaaggggccactgaaaagtgaatttgatagctcagcatttaagcatgattacatattcagatagctctttttgctttctataaatatatgcattgtgtgtgtagtaatagatgtaagtttacactttgaaaggaaatcttgtttcaatgtttattataaaagccttgctaatttagtagtgatgctttccttggttgtacaggtgtacatttgtaaaccttcatgctgtaaatggaatttgttttatctctttgggatacatttgcattttagtgtacatttacgtccctgccctctttgacctggcaatatagtgttgtataatgtaaatttatttctccaaatcgagagtgattttttaaaaattttttatctttatatggtttcagaagtatgaaccagctttctttttattattgtgagatcattttgttttataacatagttgttgactgttaatatggacctgctagaatttggatcactttcaattgaagtcagggtattgtgcataatagaaagtattggactgagatatttggttaccatggaggccaatgcttttttcatcttattaaatgtgatgtgacttttttctttgtacagaagagtactgtatttttgaatagcctactcccaagtaagagcaaatctgtatgataacattttttcctctggacataagacataacagtaacacgatgtacatttacaagcggccttatgtacatttcccaacaatctttttaaggcaaaattgtgaccatatgtgtataattaaaatcgtttttaatcctttgcctatgaaaatattttggaaaaaaacttgctgtgtatattcagtttctgaaagataaagaaagtgctttgtattttgttgaagtcagtattttgtataaacatttatgttgacccacttatgttcagtgctgaaaactaaaatgaacatgctattctgtcagctgaatatggaagagatctttttttactagagatctgcagaagaaacgcaatcttctgagcacaatatggaatctaaaggttttatcacttagttgttcatattatgaacctaaaaataatggcataaagtttggggatgccaggcatactttttcatgtttggtgttgagttattttacttttctaacccaacattccttggtgagaccattaaatccaaacacttgtcaccgttccttctcatagtcactctgggtcatcagcatgtcccagtcactgcagcaacgccttgtgtttgtttcatttttttaaaacccacacaaagccgctgtctcactttttcctactttaccaacctcagagtatttcggcccgtatcgaacttttgttctcagtatcagcccatggtttcaggatcaaagctgtcatgttggagattggtaatggctttcctgtctttgtacagttgaattcctagtcttccttcatccttgccctctgttggcacaggcattatctctgcaattttagaaaatgacaagtagagaatactacattgagaaactaaaccctcttcttggggtcctgatactcattcccatttgtcccagtgctgacaacccaatcttcccaatactttcaggcctgctctacaaaagtacctgttcttgtagaaattttacagtctgccattttgggtgcccaccccaatttttaccttttagtaagttggcatgaaattttggtaaaatctgaaaatcacatttcagaataaaacaattgggcaaaactacctaggctttactcttgagtgtctccttttgatagggattgtttctggaccagtttgtctaagtcctggctcttattggttcatatgaaataatgttaacttcacttctttgtatattatgtataaattagaaaatgaaaaatgtgtgaataacattgtatgaaataaacctggtcttgtgtttttctctagataaaatacccctctgtacctc

SEQ ID NO: 286364 - DNA, 3201 bp, Artificial Sequence
  derived and/or modified sequence
atgaaccacgacttccaggccctggccctggagagcagaggcatgggcgagctgctgcccaccaagaagttctgggagcccgacgacagcaccaaggacggccagaagggcatcttcctgggcgacgacgagtggagagagaccgcctggggcgccagccaccacagcatgagccagcccatcatggtgcagagaagaagcggccagggcttccacggcaacagcgaggtgaacgccatcctgagccccagaagcgagagcggcggcctgggcgtgagcatggtggagtacgtgctgagcagcagccccgccgacaagctggacagcagattcagaaagggcaacttcggcaccagagacgccgagaccgacggccccgagaagggcgaccagaagggcaaggccagccccttcgaggaggaccagaacagagacctgaagcagggcgacgacgacgacagcaagatcaacggcagaggcctgcccaacggcatggacgccgactgcaaggacttcaacagaacccccggcagcagacaggccagccccaccgaggtggtggagagactgggccccaacaccaaccccagcgagggcctgggccccctgcccaaccccaccgccaacaagcccctggtggaggagttcagcaaccccgagacccagaacctggacgccatggagcaggtgggcctggagagcctgcagttcgactaccccggcaaccaggtgcccatggacagcagcggcgccaccgtgggcctgttcgactacaacagccagcagcagctgttccagagaaccaacgccctgaccgtgcagcagctgaccgccgcccagcagcagcagtacgccctggccgccgcccagcagccccacatcgccggcgtgttcagcgccggcctggcccccgccgccttcgtgcccaacccctacatcatcagcgccgccccccccggcaccgacccctacaccgccgccggcctggccgccgccgccaccctggccggccccgccgtggtgcccccccagtactacggcgtgccctggggcgtgtaccccgccaacctgttccagcagcaggccgccgccgccgccaacaacaccgccagccagcaggccgccagccaggcccagcccggccagcagcaggtgctgagagccggcgccggccagagacccctgacccccaaccagggccagcagggccagcaggccgagagcctggccgccgccgccgccgccaaccccaccctggccttcggccagggcctggccaccggcatgcccggctaccaggtgctggcccccaccgcctactacgaccagaccggcgccctggtggtgggccccggcgccagaaccggcctgggcgcccccgtgagactgatggcccccacccccgtgctgatcagcagcgccgccgcccaggccgccgccgccgccgccgccggcggcaccgccagcagcctgaccggcagcaccaacggcctgttcagacccatcggcacccagcccccccagcagcagcagcagcagcccagcaccaacctgcagagcaacagcttctacggcagcagcagcctgaccaacagcagccagagcagcagcctgttcagccacggccccggccagcccggcagcaccagcctgggcttcggcagcggcaacagcctgggcgccgccatcggcagcgccctgagcggcttcggcagcagcgtgggcagcagcgccagcagcagcgccaccagaagagagagcctgagcaccagcagcgacctgtacaagagaagcagcagcagcctggcccccatcggccagcccttctacaacagcctgggcttcagcagcagccccagccccatcggcatgcccctgcccagccagacccccggccacagcctgacccccccccccagcctgagcagccacggcagcagcagcagcctgcacctgggcggcctgaccaacggcagcggcagatacatcagcgccgcccccggcgccgaggccaagtacagaagcgccagcagcaccagcagcctgttcagcagcagcagccagctgttcccccccagcagactgagatacaacagaagcgacatcatgcccagcggcagaagcagactgctggaggacttcagaaacaacagattccccaacctgcagctgagagacctgatcggccacatcgtggagttcagccaggaccagcacggcagcagattcatccagcagaagctggagagagccacccccgccgagagacagatggtgttcaacgagatcctgcaggccgcctaccagctgatgaccgacgtgttcggcaactacgtgatccagaagttcttcgagttcggcagcctggaccagaagctggccctggccaccagaatcagaggccacgtgctgcccctggccctgcagatgtacggctgcagagtgatccagaaggccctggagagcatcagcagcgaccagcaggtgatcagcgagatggtgaaggagctggacggccacgtgctgaagtgcgtgaaggaccagaacggcaaccacgtggtgcagaagtgcatcgagtgcgtgcagccccagagcctgcagttcatcatcgacgccttcaagggccaggtgttcgtgctgagcacccacccctacggctgcagagtgatccagagaatcctggagcactgcaccgccgagcagaccctgcccatcctggaggagctgcaccagcacaccgagcagctggtgcaggaccagtacggcaactacgtgatccagcacgtgctggagcacggcagacccgaggacaagagcaagatcgtgagcgagatcagaggcaaggtgctggccctgagccagcacaagttcgccagcaacgtggtggagaagtgcgtgacccacgccagcagagccgagagagccctgctgatcgacgaggtgtgctgccagaacgacggcccccacagcgccctgtacaccatgatgaaggaccagtacgccaactacgtggtgcagaagatgatcgacatggccgagcccgcccagagaaagatcatcatgcacaagatcagaccccacatcaccaccctgagaaagtacacctacggcaagcacatcctggccaagctggagaagtactacctgaagaacagccccgacctgggccccatcggcggcccccccaacggcatgctgtag

SEQ ID NO: 286365 - DNA, 105 bp, Artificial Sequence
  derived and/or modified sequence
atgaaccacgacttccaggccctggccctggagagcagaggcatgggcgagctgctgcccaccaagaagttctgggagcccgacgacagcaccaaggacggctag

SEQ ID NO: 286366 - protein, 245 aa, Artificial Sequence [sequence omitted]

SEQ ID NO: 286367 - DNA, 738 bp, Artificial Sequence
  derived and/or modified sequence
atgtctaactccggcgactatgagatcctttattgggatattcccaatggctgtaaactcattcggaatcgctcagattgcaaggacatcgactggacaacatacacctgcgtcctgggcttccaggtgtttggagtgtggcccgaggggtctgatggaacagatattaacgccctcgtaaggtcccacaaccgcaaggtaatcgcagtggcagatgacttttgtaaggttcatttattccaatacccttgctcaaaggcaaaagcaccttctcataagtattccgcccacagtagtcacgtcaccaatgtgtctttcacacataacgacagtcacctcatcagtactgggggtaaagacatgtcaattatccagtggaaactagtggagaagctctcactccctcagaatgagactgtggctgataccaccttgaccaaggccccagtgtcgtctactgaatcggtgatccagagcaatacaccaacccctcctccgagccagcctctaaatgagacggccgaagaggaatctaggatctcaagttcacctaccctgctagagaattctctcgagcaaaccgttgagcctagcgaggatcactcagaggaggagagcgaagaaggctcaggggatttgggagaacctctgtacgaagagccttgcaacgagatttctaaggaacaagccaaagctacacttttggaggaccagcaggacccctctccatccagttag

SEQ ID NO: 286368 - DNA, 738 bp, Artificial Sequence
  derived and/or modified sequence
atgagcaacagcggggactatgagatcctgtactgggacatccccaacggctgcaagctgatccggaacagaagtgactgcaaggacatcgactggaccacctacacctgtgtgctgggcttccaggtgtttggagtgtggccagagggcagtgatggaacagacatcaatgccctggtgcgcagccacaacaggaaggtgattgctgtggctgatgacttctgcaaggtgcacctgttccagtacccctgcagcaaggccaaggcccccagccacaagtacagcgcccacagcagccacgtgaccaacgtgtccttcacccacaatgacagccacctgatcagcactggaggcaaggacatgagcatcatccagtggaagctggtggagaagctgagcctgccccagaatgaaacagtggccgacaccaccctgaccaaggcccctgtgagcagcacagaatctgtcatccagagcaacacccccaccccaccacccagccagcccctgaatgaaacagctgaggaggagagccgcatcagcagcagccccaccctgctggagaacagcctggagcagacagtggagcccagcgaggaccacagcgaggaggagagcgaggagggcagcggggacctgggggagcccctgtatgaggagccctgcaatgagatcagcaaggagcaggccaaggccaccctgctggaggaccagcaggaccccagccccagcagctag

SEQ ID NO: 286369 - DNA, 738 bp, Artificial Sequence
  derived and/or modified sequence
atgagcaacagcggcgactacgagatcctgtactgggacatccccaatggttgcaagttgattcgcaatcgatctgactgtaaagatattgactggaccacttacacatgcgtgcttggatttcaggtgtttggagtttggcccgagggctcagacggcaccgatattaacgccctagttcggtctcacaaccggaaggtgatcgccgtggctgacgacttctgtaaggtgcacctcttccagtacccatgctccaaggctaaagcccccagtcacaagtattcagcccactcaagccatgtcacaaatgtctctttcacacacaacgattctcaccttataagcaccggcggaaaggacatgagcattattcagtggaagctggtggaaaaactgtcgttgccacaaaacgaaactgtcgcagacacaaccctgaccaaggcaccggtcagctccactgaatccgtgatccagtccaacactccaacaccaccccctagccagcctttgaatgaaaccgcagaggaagagagccggatctccagtagccctactcttctcgaaaattcactcgaacagacagtcgaacctagcgaagatcattcagaagaagagagtgaggagggcagcggcgacctcggagaacccctctacgaagagccctgcaatgaaatttcaaaggagcaagcgaaggcaaccctccttgaggaccagcaggatccctccccttcctcatag

SEQ ID NO: 286370 - DNA, 738 bp, Artificial Sequence
  derived and/or modified sequence
atgtctaattcaggagactatgaaatcctgtactgggacattcccaatggctgtaaactgattcgaaaccgttcggactgcaaagatatcgattggactacctacacgtgcgtcttgggcttccaggtgtttggcgtgtggccagaggggagcgatgggaccgacataaatgcactcgtgcggagccacaacaggaaagtcatcgcggtcgccgatgatttttgcaaggtgcacctgtttcagtacccctgctctaaagccaaagcccctagccacaagtactcggcccacagcagccacgtgacaaacgtgagcttcacgcataatgactcccacttgatttctaccggagggaaggatatgtcgattattcaatggaagctcgtggaaaaactgagtctcccccaaaacgagaccgtcgctgacaccaccttgaccaaagctccagtgtcaagcaccgaatcggttatacagtctaacacgcctactcccccaccctcccagcccctgaacgagaccgcggaagaggaatcacgtatctcctcctcacccactctgcttgagaactctctcgaacagacagtggagccttctgaagatcactctgaggaagagtcagaggagggatccggcgatctgggagagcccttatatgaagaaccctgtaacgaaatttccaaagagcaagcaaaagccaccctgctggaggaccagcaggacccatcaccaagttcatag

SEQ ID NO: 286371 - DNA, 738 bp, Artificial Sequence
  derived and/or modified sequence
atgagcaacagcggcgactacgagatcctgtactgggacatccccaacggctgcaagctgatcagaaacagaagcgactgcaaggacatcgactggaccacctacacctgcgtgctgggcttccaggtgttcggcgtgtggcccgagggcagcgacggcaccgacatcaacgccctggtgagaagccacaacagaaaggtgatcgccgtggccgacgacttctgcaaggtgcacctgttccagtacccctgcagcaaggccaaggcccccagccacaagtacagcgcccacagcagccacgtgaccaacgtgagcttcacccacaacgacagccacctgatcagcaccggcggcaaggacatgagcatcatccagtggaagctggtggagaagctgagcctgccccagaacgagaccgtggccgacaccaccctgaccaaggcccccgtgagcagcaccgagagcgtgatccagagcaacacccccacccccccccccagccagcccctgaacgagaccgccgaggaggagagcagaatcagcagcagccccaccctgctggagaacagcctggagcagaccgtggagcccagcgaggaccacagcgaggaggagagcgaggagggcagcggcgacctgggcgagcccctgtacgaggagccctgcaacgagatcagcaaggagcaggccaaggccaccctgctggaggaccagcaggaccccagccccagcagctag

SEQ ID NO: 286372 - DNA, 1455 bp, Artificial Sequence
  derived and/or modified sequence
tcagcaaacaaatcaaagctcatgatggcagtgtgttcacactttgtcagatgagaaatgggatgttattaactggaggagggaaagacagaaaaataattctgtgggatcatgatctgaatcctgaaagagaaatagaggttcctgatcagtatggcacaatcagagctgtagcagaaggaaaggcagatcaatttttagtaggcacatcacgaaactttattttacgaggaacatttaatgatggcttccaaatagaagtacagggtcatacagatgagctttggggtcttgccacacatcccttcaaagatttgctcttgacatgtgctcaggacaggcaggtgtgcctgtggaactcaatggaacacaggctggaatggaccaggctggtagatgaaccaggacactgtgcagattttcatccaagtggcacagtggtggccataggaacgcactcaggcagggacattccagctacatcacacaccttgactggtccccagacaacaagtatataatgtctaactcgggagactatgaaatattgtactgggacattccaaatggctgcaaactaatcaggaatcgatcggattgtaaggacattgattggacgacatatacctgtgtgctaggatttcaagtatttggtgtctggccagaaggatctgatgggacagatatcaatgcactggtgcgatcccacaatagaaaggtgatagctgttgccgatgacttttgtaaagtccatctgtttcagtatccctgctccaaagcaaaggctcccagtcacaagtacagtgcccacagcagccatgtcaccaatgtcagttttactcacaatgacagtcacctgatatcaactggtggaaaagacatgagcatcattcagtggaaacttgtggaaaagttatctttgcctcagaatgagactgtagcggatactactctaaccaaagcccccgtctcttccactgaaagtgtcatccaatctaatactcccacaccgcctccttctcagcccttaaatgagacagctgaagaggaaagtagaataagcagttctcccacacttctggagaacagcctggaacaaactgtggagccaagtgaagaccacagcgaggaggagagtgaagagggcagcggagaccttggtgagcctctttatgaagagccatgcaacgagataagcaaggagcaggccaaagccacccttctggaggaccagcaagacccttcgccctcgtcctaacaccctggcttcagtgcaactcttttccttcagctgcatgtgattttgtgataaagttcaggtaacaggatgggcagtgatggagaatcactgttgattgagattttggtttccatgtgatttgttttcttcaatagtcttattttcagtctctcaaatacagccaacttaaagttttagtttggtgtttattgaaa

SEQ ID NO: 286373 - DNA, 249 bp, Artificial Sequence
  derived and/or modified sequence
atgagcgagggcgagagccagaccgtgctgagcagcggcagcgaccccaaggtggagagcagcagcagcgcccccggcctgaccagcgtgagcccccccgtgaccagcaccaccagcgccgccagccccgaggaggaggaggagagcgaggacgagagcgagatcctggaggagagcccctgcggcagatggcagaagagaagagaggaggtgaaccagagaaacgtgcccggcatcgacagcgcctag

SEQ ID NO: 286374 - DNA, 468 bp, Artificial Sequence
  derived and/or modified sequence
atgagcgagggcgagagccagaccgtgctgagcagcggcagcgaccccaaggtggagagcagcagcagcgcccccggcctgaccagcgtgagcccccccgtgaccagcaccaccagcgccgccagccccgaggaggaggaggagagcgaggacgagagcgagatcctggaggagagcccctgcggcagatggcagaagagaagagaggaggtgaaccagagaaacgtgcccggcatcgacagcgcctacctggccatggacaccgaggagggcgtggaggtggtgtggaacgaggtgcagttcagcgagagaaagaactacaagctgcaggaggagaaggtgagagccgtgttcgacaacctgatccagctggagcacctgaacatcgtgaagttccacaagtactgggccgacatcaaggagaacaaggccagagtgatcttcatcaccgagtacatgagcagctag

SEQ ID NO: 286375 - DNA, 585 bp, Artificial Sequence
  derived and/or modified sequence
gtgtagagaagggatggatagtgaatgccaaggttagttctagctggataaattagccaagggtttcagctggataagttggctgagggtgctacaggtctagccttaaggctgtctcactgaaacattttggagtctggagtcatctgttctgaatagcgcccacatagtttatatttttttattttttgagacagagtctcactctgttgcccaagctggagtgcagtggcacgatctcagctcactgcaacctctgcctcccgggttcaagtgattctcctgcctcagcctcctgagtagctgggactacagtgcaggcctgagtgttccttccagcatgtcggagggggagtcccagacagtacttagcagtggctcagacccaaaggtagaatcctcatcttcagctcctggcctgacatcagtgtcacctcctgtgacctccacaacctcagctgcttccccagaggaagaagaagaaagtgaagatgagtctgagattttggaagagtcgccctgtgggcgctggcagaagaggcgagaagaggtgaatcaacggaatgtaccaggtattgacagtgc

SEQ ID NO: 286376 - DNA, 249 bp, Artificial Sequence
  derived and/or modified sequence
atgagcgagggggagtcccagaccgttctctcatccgggtctgatccaaaggtcgaaagcagctcatccgctccggggttgaccagtgtaagtccacccgtcacttcaaccacttctgccgctagtccagaggaagaggaggaaagcgaggatgagtctgagattctggaggaatccccatgcggtcggtggcagaaaagaagggaggaggtgaatcaacggaacgtgcctgggatcgactccgcctag

SEQ ID NO: 286377 - DNA, 468 bp, Artificial Sequence
  derived and/or modified sequence
atgtctgagggtgagtcacaaactgtcctgtcctctggctcagacccaaaggttgagtcaagctcatctgcccccggccttacatccgtgtctccaccagtgacctccacaacttcagcggccagcccagaagaggaggaggagtccgaagacgagtccgagatcctggaagagtctccttgcggacggtggcagaagcgccgcgaagaggtcaaccagcggaacgtcccaggtatcgactccgcttacctcgccatggacacagaggagggcgtggaggtagtgtggaatgaagtgcaattctcggaacgaaaaaactacaagctgcaagaggaaaaagtaagggcggtgtttgataatcttatccagctagagcatctgaatattgttaagttccacaaatattgggcagatattaaagaaaacaaggctcgggtgatttttatcactgaatacatgagctcgtag

SEQ ID NO: 286378 - DNA, 249 bp, Artificial Sequence
  derived and/or modified sequence
atgtctgagggggagagccagacagtgctgagcagcggcagtgaccccaaggtggagagcagcagcagcgcccctggcctgacctctgtgagcccccctgtgaccagcaccaccagcgctgccagccctgaggaggaggaggagagtgaagatgaaagtgagatcctggaggagagcccctgtggccgctggcagaagagaagagaggaggtgaaccagagaaatgtgcccggcattgattctgcctag

SEQ ID NO: 286379 - DNA, 468 bp, Artificial Sequence
  derived and/or modified sequence
atgtctgagggggagagccagacagtgctgagcagcggcagtgaccccaaggtggagagcagcagcagcgcccctggcctgacctctgtgagcccccctgtgaccagcaccaccagcgctgccagccctgaggaggaggaggagagtgaagatgaaagtgagatcctggaggagagcccctgtggccgctggcagaagagaagagaggaggtgaaccagagaaatgtgcccggcattgattctgcctacctggccatggacacagaggagggcgtggaggtggtgtggaatgaggtgcagttcagcgagaggaagaactacaagctgcaggaggagaaggtgcgggctgtgtttgacaacctgatccagctggagcacctgaacatcgtgaagttccacaagtactgggccgacatcaaggagaacaaggcccgggtcatcttcatcacagagtacatgagcagctag

SEQ ID NO: 286380 - DNA, 249 bp, Artificial Sequence
  derived and/or modified sequence
atgagcgagggcgagagccagaccgtgctgagcagcggcagcgaccccaaggttgagtcaagctcatcagcacctgggctgacatctgtaagccctcccgtgacctcaaccacaagcgctgcctcccctgaggaggaggaggaaagtgaggatgagtccgagattctggaggagtcaccctgtggcagatggcagaagcggcgggaagaggtgaatcagcgcaacgtaccaggaatcgacagtgcctag

SEQ ID NO: 286381 - DNA, 468 bp, Artificial Sequence
  derived and/or modified sequence
atgagcgagggcgagagccagaccgtgctgagcagcggcagcgacccgaaggtggaatcatccagcagtgcccccggcctcacctccgtgagcccacccgtgacctctacaacaagtgcagcttccccagaggaggaagaggaaagtgaagatgaatcagaaattctggaggagtctccctgcggaaggtggcagaagaggagagaagaggttaatcagaggaacgtccctggaatcgattccgcctacttggccatggatacagaagagggagtagaggtggtatggaacgaggtgcagttttccgaacggaaaaattacaagctgcaggaagagaaagttagagccgtttttgataatttgatccagctcgagcacctgaacatcgtaaaattccacaagtactgggcagacatcaaagagaataaggctcgggtaattttcatcaccgagtatatgagttcatag

SEQ ID NO: 286382 - DNA, 249 bp, Artificial Sequence
  derived and/or modified sequence
atgtccgaaggcgaaagccagaccgtgcttagtagtggcagtgatcccaaggtcgagtcttcgtctagtgctcccggactaaccagcgtgagtcccccagtgacatcgaccactagtgcagcttctcctgaggaagaagaagaatcagaagacgaatccgagatcctggaagagagcccttgtggacgttggcagaagcggagagaggaagtgaatcagaggaatgtgcctggcatagattcagcgtag

SEQ ID NO: 286383 - DNA, 674 bp, Artificial Sequence
  derived and/or modified sequence
gaggtggccgccgctggctccctgggccccagcctggttcccgcgcgggccgcggctgccttccagacgcagggcatgcgacctgttggagtgtgaaattctaggggccgggttcctccccagagcggttttatttccgactggactgtgctgcgggtctcagaggccctctggtccgttcaggtgcaggcctgagtgttccttccagcatgtcggagggggagtcccagacagtacttagcagtggctcagacccaaaggtagaatcctcatcttcagctcctggcctgacatcagtgtcacctcctgtgacctccacaacctcagctgcttccccagaggaagaagaagaaagtgaagatgagtctgagattttggaagagtcgccctgtgggcgctggcagaagaggcgagaagaggtgaatcaacggaatgtaccaggtattgacagtgcatacctggccatggatacagaggaaggtgtagaggttgtgtggaatgaggtacagttctctgaacgcaagaactacaagctgcaggaggaaaaggttcgtgctgtgtttgataatctgattcaattggagcatcttaacattgttaagtttcacaaatattgggctgacattaaagagaacaaggccagggtcatttttatcacagaatacatgtcatct

SEQ ID NO: 286384 - DNA, 468 bp, Artificial Sequence
  derived and/or modified sequence
atgagcgaaggggaaagccagactgtgctgagtagtggcagcgaccctaaagtagaatcaagttcaagcgccccagggctcacaagtgtgtcacccccagtgacctccactacctctgccgcttcacctgaagaggaggaggagtctgaggatgagtctgagattctggaagagtctccatgcggcagatggcagaagaggcgcgaggaggtgaaccagaggaacgtgcctggaatagactcagcttacttggccatggataccgaggagggagtggaggtcgtgtggaatgaagtgcagttcagcgagaggaagaattacaagctacaagaagagaaagttcgagcagtctttgataatctgatccagctcgaacatttaaacatcgtcaaattccacaaatattgggccgacatcaaggaaaataaggcgagggtaatttttataaccgaatacatgagttcttag

SEQ ID NO: 286385 - protein, 120 aa, Artificial Sequence
  derived and/or modified sequence
MCHLYEGPVVGGWYKVLDRFIPGTTKVDALKKMLLDQGGFAPCFLGCFLPLVGALNGLSAQDNWAKLQRDYPDALITNYYLWPAVQLANFYLVPLHYRLAVVQCVAVIWNSYLSWKAHRL

SEQ ID NO: 286386 - protein, 115 aa, Artificial Sequence
  derived and/or modified sequence
MGLGDIISQQLVERRGLQEHQRGRTLTMVSLGCGFVGPVVGGWYKVLDRFIPGTTKVDALKKMLLDQGGFAPCFLGCFLPLVGALNGLSAQDNWAKLQRDYPDALITNYYLWPAV

SEQ ID NO: 286387 - protein, 121 aa, Artificial Sequence
  derived and/or modified sequence
  misc_feature (1)..(1): Xaa can be any naturally occurring amino acid
XSLMGLGDIISQQLVERRGLQEHQRGRTLTMVSLGCGFVGPVVGGWYKVLDRFIPGTTKVDALKKMLLDQDYPDALITNYYLWPAVQLANFYLVPLHYRLAVVQCVAVIWNSYLSWKAHRL

SEQ ID NO: 286388 - protein, 67 aa, Artificial Sequence
  derived and/or modified sequence
  misc_feature (1)..(1): Xaa can be any naturally occurring amino acid
XDSQGKKTGFTGIKKGDYPDALITNYYLWPAVQLANFYLVPLHYRLAVVQCVAVIWNSYLSWKAHRL

SEQ ID NO: 286389 - DNA, 348 bp, Artificial Sequence
  derived and/or modified sequence
atggggctaggggacattatttcccagcagctggtcgagcgaaggggcctccaggagcaccagcgtggacggacactgactatggtgtctctgggctgcgggttcgttggtcctgtcgtggggggctggtataaggtgctggacaggtttatccctggaacaacaaaggttgatgccctgaaaaaaatgctgctggaccagggtggcttcgcaccatgcttcctgggatgctttctgcccttggtaggcgccttgaatggtctctccgctcaagataactgggctaaactgcagcgtgactacccggacgcgctgatcactaactactatttgtggcctgccgtttag

SEQ ID NO: 286390 - DNA, 366 bp, Artificial Sequence
  derived and/or modified sequence
tagagtctcatgggtctgggtgacatcatctctcagcagttggttgagcggagggggcttcaagaacaccagcgggggcgcacactgacaatggttagcctggggtgcggctttgttgggcccgtggtcggtggatggtacaaggttctcgatagatttataccaggaacaacaaaagtcgatgctctaaaaaagatgctactcgaccaggactaccctgacgccctgattacaaattattacttgtggccagcagtacaactcgctaatttctacctggtgccattacactataggctcgccgtcgttcaatgtgtcgcggtaatttggaacagttacctgtcatggaaagctcatagactctag

SEQ ID NO: 286391 - DNA, 348 bp, Artificial Sequence
  derived and/or modified sequence
atgggcctgggggacatcatcagccagcagctggtggagcggcggggcctgcaggagcaccagaggggccgcaccctgaccatggtgtccctgggctgcggctttgtgggccctgtggtgggcggctggtacaaggtgctggaccgcttcatccctggcaccaccaaggtggatgccctgaagaagatgctgctggaccagggcggctttgccccctgcttcctgggctgcttcctgcccctggtgggcgccctgaatggcctgagcgcccaggacaactgggccaagctgcagagggactacccagatgccctgatcaccaactactacctgtggccagctgtgtag

SEQ ID NO: 286392 - DNA, 366 bp, Artificial Sequence
  derived and/or modified sequence
tgaagcctgatgggcctgggggacatcatcagccagcagctggtggagcggcggggcctgcaggagcaccagaggggccgcaccctgaccatggtgtccctgggctgcggctttgtgggccctgtggtgggcggctggtacaaggtgctggaccgcttcatccctggcaccaccaaggtggatgccctgaagaagatgctgctggaccaggactacccagatgccctgatcaccaactactacctgtggccagctgtgcagctggccaacttctacctggtgcccctgcactaccgcctggccgtggtgcagtgtgtggccgtcatctggaacagctacctgtcctggaaggcccaccggctgtag

SEQ ID NO: 286393 - DNA, 575 bp, Artificial Sequence
  derived and/or modified sequence
ggagggaggctcggcgctcaggaagcatggcactctggcgggcataccagcgggccctggccgctcacccgtggaaagtacaggtcctgacagctggcctcctggactgaaggacacgcttcctgctcctcactccaagaagccacttcttgcccctctgccttctgcgcatgaaactcaaaagccacaaaagaatattgctgtctgccatccccacgagggtccctgatgggcctgggtgacattatctcacagcagctggtggagaggcggggtctgcaggaacaccagagaggccggactctgaccatggtgtccctgggctgtggctttgtgggccctgtggtaggaggctggtacaaggttttggatcggttcatccctggcaccaccaaagtggatgcactgaagaagatgttgttggatcaggggggctttgccccgtgttttctaggctgctttctcccactggtaggggcacttaatggactgtcagcccaggacaactgggccaaactacagcgggattatcctgatgcccttatcaccaactactatctatggcctgctgtgca

SEQ ID NO: 286394 - DNA, 482 bp, Artificial Sequence
  derived and/or modified sequence
ggtccctgatgggcctgggtgacattatctcacagcagctggtggagaggcggggtctgcaggaacaccagagaggccggactctgaccatggtgtccctgggctgtggctttgtgggccctgtggtaggaggctggtacaaggttttggatcggttcatccctggcaccaccaaagtggatgcactgaagaagatgttgttggatcaggattatcctgatgcccttatcaccaactactatctatggcctgctgtgcagttagccaacttctacctggtcccccttcattacaggttggccgttgtccaatgtgttgctgttatctggaactcctacctgtcctggaaggcacatcggctctaagcctgcctcactccatcgtttccaccttgcagtgatgcagcttgaccctggaacggtcagacaacctcctcaaagtgggcataccagtttccacggggttgggttgccggtcagagc

SEQ ID NO: 286395 - DNA, 348 bp, Artificial Sequence
  derived and/or modified sequence
atgggcctgggcgacatcatcagccagcagctggtggagcggcggggcctccaagaacatcaacgcggacggactctcacaatggtttcacttgggtgtggtttcgtcggacccgtggttggcggatggtacaaggtgttagatcgttttatccctggtacgaccaaggtcgatgccctgaagaagatgcttctagatcaaggaggattcgccccttgctttctcggctgtttcctgccactagtaggcgccttgaacggactgtccgcacaagataactgggccaaactacagagggattatcctgatgccctgataaccaattactatctttggccagccgtgtag

SEQ ID NO: 286396 - DNA, 366 bp, Artificial Sequence
  derived and/or modified sequence
tgaagcctgatgggcctgggcgacatcatcagccagcagctggtggaacgacgcggcttgcaggaacaccagcgggggaggacgttaaccatggtgtctctcgggtgtggttttgttggaccggtggtcggcgggtggtataaggtcttggacagatttatcccagggacaactaaagtggacgctctgaagaaaatgctacttgatcaagactacccagatgctttaataaccaactactacttgtggcccgccgtgcaactggctaatttctatcttgtaccgctgcactatcgcctggccgtggttcagtgcgtggcagtaatctggaactcttatttgtcctggaaagcccatagactctag

SEQ ID NO: 286397 - DNA, 348 bp, Artificial Sequence
  derived and/or modified sequence
atgggactcggggacataatcagtcaacaacttgtcgaacgacggggactgcaagagcatcagagggggaggacccttactatggtgtcactgggatgcggatttgtcggacccgtggttggaggctggtataaggtgttggatagattcatccctggcaccactaaagtggacgctttaaagaaaatgttgctggaccagggaggcttcgctccctgttttttgggatgctttctaccattggtcggagccctaaatgggctgagcgcccaagataactgggccaagctgcagagggactatcctgatgccctgattacaaattattacctgtggcccgctgtgtag

SEQ ID NO: 286398 - DNA, 366 bp, Artificial Sequence
  derived and/or modified sequence
tgaagtttgatggggctgggagacattattagccagcagctggtcgaaagacgagggctccaggaacaccaaaggggtaggactctcacaatggtgagtctgggctgtgggttcgtggggccagtagtgggagggtggtacaaggtgcttgatcgatttatcccaggcactacaaaagtcgatgctctgaaaaaaatgctcctggaccaggactatcccgatgcgctaataactaactattatctgtggccggctgtccaattagctaacttttatctggtgcctcttcattaccgtctggctgtagtgcagtgtgtggccgtcatctggaattcttacctctcgtggaaagctcatagactatag

SEQ ID NO: 286399 - DNA, 348 bp, Artificial Sequence
  derived and/or modified sequence
atgggcctgggcgacatcatcagccagcagctggtggagagaagaggcctgcaggagcaccagagaggcagaaccctgaccatggtgagcctgggctgcggcttcgtgggccccgtggtgggcggctggtacaaggtgctggacagattcatccccggcaccaccaaggtggacgccctgaagaagatgctgctggaccagggcggcttcgccccctgcttcctgggctgcttcctgcccctggtgggcgccctgaacggcctgagcgcccaggacaactgggccaagctgcagagagactaccccgacgccctgatcaccaactactacctgtggcccgccgtgtag

SEQ ID NO: 286400 - DNA, 366 bp, Artificial Sequence
  derived and/or modified sequence
tgaagcctgatgggcctgggcgacatcatcagccagcagctggtggagagaagaggcctgcaggagcaccagagaggcagaaccctgaccatggtgagcctgggctgcggcttcgtgggccccgtggtgggcggctggtacaaggtgctggacagattcatccccggcaccaccaaggtggacgccctgaagaagatgctgctggaccaggactaccccgacgccctgatcaccaactactacctgtggcccgccgtgcagctggccaacttctacctggtgcccctgcactacagactggccgtggtgcagtgcgtggccgtgatctggaacagctacctgagctggaaggcccacagactgtag

SEQ ID NO: 286401 - DNA, 159 bp, Artificial Sequence
  derived and/or modified sequence
atggcaaatgagcacacattaattcaccccgctagcatcgaagatcccctggaggctcggcctatgtccgacgaagaccccgaagacgaggatgccctgcccgctcgatggaagaaggagatgggacggaagcgcaagcgtaccatcgctacgctgtag

SEQ ID NO: 286402 - DNA, 381 bp, Artificial Sequence
  derived and/or modified sequence
atgtggtacgtgagcaccaggggcgtagcaccccgagtgaatttcgagggggcactcttttcggggtacgccccagacgggggactcttcatgccagaggaattgccccagttagacagagggaccctgtgtcagtggtcaacgctttcatatccaggcctggttaaggaactgtgtgcgctattcattggctctgagctattgcctaaggatgaactgaatgacctgattgatcgtgctttcagtcgatttagacaccgggaggtggtacacctgtcaagactcagaaacggcctgaacgtgctggaactttggcacggggtcacctatgccttcaaggacctgtctctgtcctgtaccactcagttccttcagtattag

SEQ ID NO: 286403 - DNA, 577 bp, Artificial Sequence
  derived and/or modified sequence
gggacgcggactcgggagtgcgcacattcgcagcccgggcagccctgctgcgcaccgggcctcgcgccccgcgccccgcgccccgcgccccgcgccccgcaccgctttgctgaattggcctgggaatgctgcccctggaaggcattggacagaacagggacagtcctgttgcgtgaggggcatgggcctccaggatcatgtggtatgtcagcaccaggggcgtagccccacgggtcaactttgagggggccctcttctctggctatgcacctgacgggggcctctttatgcctgaagagctcccacagttggacagagggaccctgtgccagtggagcacactctcctatcctggcctggtgaaggagctgtgtgccctcttcattggctctgagctccttccaaaagatgaattaaatgatctgatcgaccgagccttcagcagattccgtcacagagaagtggtccatctgtccaggttgaggaatgggctgaacgtgttggagctgtggcatggcgtcacatatgcatttaaggacctgtccctgtcctgcacaacacagttcctgcagtactt

SEQ ID NO: 286404 - DNA, 381 bp, Artificial Sequence
  derived and/or modified sequence
atgtggtatgtaagcacccgcggcgtggctccacgagttaatttcgaaggcgccctgttctctggctacgcgcctgatggaggcttatttatgcctgaagaacttcctcagctggacagagggacactgtgccaatggtcaaccctgtcttaccccggccttgtgaaggaactctgcgcgctttttatcgggagcgaactattgccaaaggacgagctgaacgacctaatcgaccgggccttctcccgatttagacacagggaagtcgtgcacctttccagattgcgaaacggtcttaatgtgctagagctgtggcacggcgtaacgtatgcctttaaggatctgagcctgagttgcacaactcaatttctgcagtattag

SEQ ID NO: 286405 - DNA, 381 bp, Artificial Sequence
  derived and/or modified sequence
atgtggtatgtaagcacccgcggcgtggctccacgagttaatttcgaaggcgccctgttctctggctacgcgcctgatggaggcttatttatgcctgaagaacttcctcagctggacagagggacactgtgccaatggtcaaccctgtcttaccccggccttgtgaaggaactctgcgcgctttttatcgggagcgaactattgccaaaggacgagctgaacgacctaatcgaccgggccttctcccgatttagacacagggaagtcgtgcacctttccagattgcgaaacggtcttaatgttcttgagctttggcacggcgttacgtacgcctttaaagacctctccctctcatgtacaacacaatttctgcaatactag

SEQ ID NO: 286406 - DNA, 381 bp, Artificial Sequence
  derived and/or modified sequence
atgtggtacgtgagcaccagaggcgtggcccccagagtgaacttcgagggcgccctgttcagcggctacgcccccgacggcggcctgttcatgcccgaggagctgccccagctggacagaggcaccctgtgccagtggagcaccctgagctaccccggcctggtgaaggagctgtgcgccctgttcatcggcagcgagctgctgcccaaggacgagctgaacgacctgatcgacagagccttcagcagattcagacacagagaggtggtgcacctgagcagactgagaaacggcctgaacgtgctggagctgtggcacggcgtgacctacgccttcaaggacctgagcctgagctgcaccacccagttcctgcagtactag

SEQ ID NO: 286407 - DNA, 381 bp, Artificial Sequence
  derived and/or modified sequence
atgtggtatgtgtctacaaggggagtggctccaagagttaactttgaaggggccttgttctccgggtacgcccctgatggtggtctgttcatgccagaagagcttcctcaacttgaccgaggcacactctgccaatggtctacgttgagttaccccggcctggttaaagaactgtgcgcactcttcatcggatctgaactgttgccaaaggacgaactcaatgatctgattgatcgagctttctcaaggttccgtcaccgcgaagtggtgcatctgagccgtctgcggaacggtctcaacgtccttgagttgtggcatggagttacctatgctttcaaagatctgtctctgagctgcaccactcagtttctgcaatattag

SEQ ID NO: 286408 - DNA, 381 bp, Artificial Sequence
  derived and/or modified sequence
atgtggtacgtgtccacccggggcgtggccccccgggtgaactttgaaggagccctcttcagcggctacgccccagatggcggcctcttcatgcctgaggagctgccccagctggaccggggcaccctgtgccagtggagcaccctgagctacccaggcctggtgaaggagctgtgtgccctcttcatcggcagcgagctgctgcccaaggatgagctgaatgacctgattgaccgggccttcagccgcttccgccaccgggaggtggtgcacctgagccggctgagaaatggcctgaatgtgctggagctgtggcacggcgtgacctacgccttcaaggacctgagcctgagctgcaccacccagttcctgcagtactag

SEQ ID NO: 286409 - DNA, 381 bp, Artificial Sequence
  derived and/or modified sequence
atgtggtacgtgagcacccggggcgtggccccccgggtgaacttcgaaggagccttgttttccggctacgcacccgacggcgggctttttatgcctgaagaactgcctcagctggatcgcggcactctgtgtcagtggtccaccctgtcctacccagggctggttaaggaactctgtgctctgttcatagggtctgaacttctgcccaaggacgagctaaacgacttaatcgaccgagccttcagcaggtttcgccacagggaggtggttcacctgtcccgactccggaatgggctgaacgtgttggagctgtggcacggcgtcacatacgccttcaaagacttgagcttgtcttgtactacccagttcctccaatattag

SEQ ID NO: 286410 - RNA, 381 nt, Artificial Sequence
  derived and/or modified sequence
augugguauguaagcacccgcggcguggcuccacgaguuaauuucgaaggcgcccuguucucuggcuacgcgccugauggaggcuuauuuaugccugaagaacuuccucagcuggacagagggacacugugccaauggucaacccugucuuaccccggccuugugaaggaacucugcgcgcuuuuuaucgggagcgaacuauugccaaaggacgagcugaacgaccuaaucgaccgggccuucucccgauuuagacacagggaagucgugcaccuuuccagauugcgaaacggucuuaaugugcuagagcuguggcacggcguaacguaugccuuuaaggaucugagccugaguugcacaacucaauuucugcaguauuag

SEQ ID NO: 286411 - RNA, 381 nt, Artificial Sequence
  derived and/or modified sequence
augugguauguaagcacccgcggcguggcuccacgaguuaauuucgaaggcgcccuguucucuggcuacgcgccugauggaggcuuauuuaugccugaagaacuuccucagcuggacagagggacacugugccaauggucaacccugucuuaccccggccuugugaaggaacucugcgcgcuuuuuaucgggagcgaacuauugccaaaggacgagcugaacgaccuaaucgaccgggccuucucccgauuuagacacagggaagucgugcaccuuuccagauugcgaaacggucuuaauguucuugagcuuuggcacggcguuacguacgccuuuaaagaccucucccucucauguacaacacaauuucugcaauacuag

SEQ ID NO: 286412 - DNA, 795 bp, Artificial Sequence
  derived and/or modified sequence
atgaacccctttgtgttgatcgacttggcaggggctttcgcactatgcatcacgtacatgttaatcgaaatcaataactatttcgctgtggacactgcctctgccattgctatcgctctaatgacatttggcacgatgtaccccatgagcgtatattcgggtaaagtcttgctgcagactacccctcctcacgtcattgggcagttggacaaactgatccgcgaagtttcaactctggatggtgtcctagaagtgaggaatgagcacttttggaccttgggcttcgggagcctcgccggctcggttcacgtacgcattcgccgcgacgcaaatgagcagatggtgcttgcccacgtgactaatcgactgtataccttggtgagtaccttgaccgtccagatctttaaagatgactggatcagacctgccctcctgagtggaccggtggccgccaacgtcctcaacttctccgatcaccacgtgatccctatgcccttgctaaaaggaacagatgatctcaaccccgtgaccagcacacccgccaaaccatcttcaccgccgcctgaattctcttttaacacacccggtaagaatgtgaacccagtgattctcttaaacactcagactcgcccatacggcttcggcttgaatcacggccacactccttatagcagtatgctgaatcaaggactaggagttcccggaatcggcgcaacccaaggtctgcggacggggttcaccaatatccctagccgatatggaaccaacaacaggatcggacagcctcgcccatag

SEQ ID NO: 286413 - DNA, 795 bp, Artificial Sequence
  derived and/or modified sequence
atgaacccctttgtgctgattgacctggccggggcctttgccctgtgcatcacctacatgctgattgagatcaacaactactttgctgtggacacagccagcgccatcgccatcgccctgatgaccttcggcaccatgtaccccatgtctgtgtacagcggcaaggtgctgctgcagaccaccccaccccacgtgattggccagctggacaagctgatccgggaggtgtccaccctggatggagtgctggaggtgagaaatgagcacttctggaccctgggcttcggcagcctggccggctctgtgcacgtgcgcatcagaagagatgccaatgagcagatggtgctggcccacgtgaccaacagactctacaccctggtgtccaccctgactgtgcagatcttcaaggatgactggatccggcctgccctgctgagcggccctgtggccgccaacgtgctgaacttcagtgaccaccacgtgatccccatgcccctgctgaagggcacagatgacctgaaccctgtgaccagcaccccagccaagcccagcagccccccacctgagttctccttcaacaccccaggcaagaatgtgaaccctgtgatcctgctgaacacccagacccggccctacggcttcggcctgaaccacggccacaccccctacagctccatgctgaaccagggcctgggcgtgcccggcatcggggccacccagggcctgaggacaggcttcaccaacatccccagccgctatggcaccaacaacagaattggccagccccggccctag

SEQ ID NO: 286414 - DNA, 795 bp, Artificial Sequence
  derived and/or modified sequence
atgaaccccttcgtgctgatcgacctggccggcgccttcgccctgtgcatcacatacatgcttatagagatcaataactatttcgccgtcgacacagctagcgctatagccatcgctctaatgacatttgggactatgtatcctatgtcagtgtactctgggaaggttcttcttcagaccactcccccccatgtgatcggacagttggacaagctaattcgcgaggtgagtaccctggacggggtcctggaagtgcgaaacgaacacttctggaccctgggattcggcagtcttgccggaagcgtgcatgtcaggatacgccgagatgccaacgaacagatggtgctggcgcatgtgaccaataggctttacaccctcgtttcgacactaacagttcagatctttaaggacgactggatacggcctgctctgctctccgggcctgtcgcggcaaatgtgctaaatttttcagaccatcatgttattccgatgcccttactgaaaggaactgacgacctcaaccctgtcacctctacacccgccaaaccatcaagcccgcctccagagttctcgttcaacacccccgggaagaacgttaatcctgttatcttgctgaatacccaaaccagaccttatggctttggcctcaaccatgggcacaccccttactccagcatgcttaaccagggcctgggcgtgcccggcatcggtgctactcagggacttcggactggattcacgaatattccttccaggtacggtactaataacagaatcggccagccccgaccttag

SEQ ID NO: 286415 - DNA, 795 bp, Artificial Sequence
  derived and/or modified sequence
atgaacccattcgtgttgatagacctggccggagcattcgctttatgtatcacctacatgttgattgagatcaacaattattttgctgtcgacaccgcgtccgcaatagcgattgcactgatgacttttggcaccatgtatcccatgtctgtgtactctggtaaggtactactgcagactacaccgcctcatgtgatcggtcagcttgacaaactcataagagaagtgtcaacccttgatggcgtgcttgaggttcgaaatgaacacttttggacgcttggttttgggtctctcgcaggatcagtccatgttcggatccgcagagacgcgaatgagcaaatggtgctggctcatgtgactaatcgcctgtacacattggtttccacactgactgtgcagatattcaaggacgactggatccgaccagcccttttgtcagggcctgtggcggcaaatgtcctgaacttctcggatcaccacgttatcccgatgccactcctcaaaggcactgatgatctaaatcctgtgaccagtactccagccaagccttcttcccccccacctgaattctcctttaacactccaggaaaaaacgtgaatccggtcatcctactgaatactcagactcgtccctacggatttggactgaaccatgggcacactccctattcctcaatgctcaatcagggtctgggagtacccggtattggggctacacagggactccggaccggatttactaacatcccctctcggtacggaactaacaatagaatcggccagcccaggccctag

SEQ ID NO: 286416 - DNA, 795 bp, Artificial Sequence
  derived and/or modified sequence
atgaaccccttcgtgctgatcgacctggccggcgccttcgccctgtgcatcacctacatgctgatcgagatcaacaactacttcgccgtggacaccgccagcgccatcgccatcgccctgatgaccttcggcaccatgtaccccatgagcgtgtacagcggcaaggtgctgctgcagaccacccccccccacgtgatcggccagctggacaagctgatcagagaggtgagcaccctggacggcgtgctggaggtgagaaacgagcacttctggaccctgggcttcggcagcctggccggcagcgtgcacgtgagaatcagaagagacgccaacgagcagatggtgctggcccacgtgaccaacagactgtacaccctggtgagcaccctgaccgtgcagatcttcaaggacgactggatcagacccgccctgctgagcggccccgtggccgccaacgtgctgaacttcagcgaccaccacgtgatccccatgcccctgctgaagggcaccgacgacctgaaccccgtgaccagcacccccgccaagcccagcagccccccccccgagttcagcttcaacacccccggcaagaacgtgaaccccgtgatcctgctgaacacccagaccagaccctacggcttcggcctgaaccacggccacaccccctacagcagcatgctgaaccagggcctgggcgtgcccggcatcggcgccacccagggcctgagaaccggcttcaccaacatccccagcagatacggcaccaacaacagaatcggccagcccagaccctag

SEQ ID NO: 286417 - protein, 1880 aa, Artificial Sequence
  derived and/or modified sequence
MGVKKKKEMQVAALTICHQDLETLKSFADVEGKNLASLLLHCVQLTDGVSQIHYIKQIVPLLEKADKNGMCDPTIQSCLDILAGIYLSLSLKNPLKKVLASSLNSLPDFFLPEAMHRFTSRLQEELNTTDLYSYRKVTDNISSCMENFNLGRASVNNLLKNVLHFLQKSLIEILEENRKCAGNHIIQTQLMNDLLVGIRVSMMLVQKVQDFQGNLWKTSDSPIWQNMCGLLSIFTKVLSDDDLLQTVQSTSGLAIILFIKTMFHPSEKIPHLISSVLLRSVDCTSVPEWFMSSCRSLCCGDISQSAVLFLCQGTLAMLDWQNGSMGRSGEALLLDTAHVLFTLSSQIKEPTLEMFLSRILASWTNSAIQVLESSSPSLTDSLNGNSSIVGRLLEYVYTHWEHPLDALRHQTKIMFKNLLQMHRLTVEGADFVPDPFFVELTESLLRLEWHIKGKYTCLGCLVECIGVEHILAIDKTIPSQILEVMGDQSLVPYASDLLETMFRNHKSHLKSQTAESSWIDQWHETWVSPLLFILCEGNLDQKSYVIDYYLPKLLSYSPESLQYMVKILQTSIDAKTGQEQSFPSLGSCNSRGALGALMACLRIARAHGHLQSATDTWENLVSDARIKQGLIHQHCQVRIDTLGLLCESNRSTEIVSMEEMQWIQFFITYNLNSQSPGVRQQICSLLKKKLFCRIQESSQVLYKLEQSKSKREPENELTKQHPSVSLQQYKNFMSSICNSLFEALFPGSSYSTRFSALTILGSIAEVFHVPEGRIYTVYQLSHDIDVGRFQTLMECFTSTFEDVKILAFDLLMKLSKTAVHFQDSGKLQGLFQAALELSTSTKPYDCVTASYLLNFLIWQDALPSSLSAYLTQQVACDNGDRPAAVVERNTLMVIKCLMENLEEEVSQAENSLLQAAAAFPMYGRVHCITGALQKLSLNSLQLVSEWRPVVEKLLLMSYRLSTVVSPVIQSSSPEGLIPMDTDSESASRLQMILNEIQPRDTNDYFNQAKILKEHDSFDMKDLNASVVNIDTSTEIKGKEVKTCDVTAQMVLVCCWRSMKEVALLLGMLCQLLPMQPVPESSDGLLTVEQVKEIGDYFKQHLLQSRHRGAFELAYTGFVKLTEVLNRCPNVSLQKLPEQWLWSVLEEIKCSDPSSKLCATRRSAGIPFYIQALLASEPKKGRMDLLKITMKELISLAGPTDDIQSTVPQVHALNILRALFRDTRLGENIIPYVADGAKAAILGFTSPVWAVRNSSTLLFSALITRIFGVKRAKDEHSKTNRCGHSPVYHSREMAARALVPFVMIDHIPNTIRTLLSTLPSCTDQCFRQNHIHGTLLQVFHLLQAYSDSKHGTNSDFQHELTDITVCTKAKLWLAKRQNPCLVTRAVYIDILFLLTCCLNRSAKDNQPVLESLGFWEEVRGIISGSELITGFPWAFKVPGLPQYLQSLTRLAIAAVWAAAAKSGERETNVPISFSQLLESAFPEVRSLTLEALLEKFLAAASGLGEKGVPPLLCNMGEKFLLLAMKENHPECFCKILKILHCMDPGEWLPQTEHCVHLTPKEFLIWTMDIASNERSEIQSVALRLASKVISHHMQTCVENRELIAAELKQWVQLVILSCEDHLPTESRLAVVEVLTSTTPLFLTNPHPILELQDTLALWKCVLTLLQSEEQAVRDAATETVTTAMSQENTCQSTEFAFCQVDASIALALALAVLCDLLQQWDQLAPGLPILLGWLLGESDDLVACVESMHQVEEDYLFEKAEVNFWAETLIFVKYLCKHLFCLLSKSGWRPPSPEMLCHLQRMVSEQCHLLSQFFRELPPAAEFVKTVEFTRLRIQEERTLACLRLLAFLEGKEGEDTLVLSVWDSYAESRQLTLPRTEAAC

SEQ ID NO: 286418 - DNA, 5643 bp, Artificial Sequence
  derived and/or modified sequence
atgggcgtgaagaagaagaaggagatgcaggtggccgccctgaccatctgccaccaggacctggagaccctgaagagcttcgccgacgtggagggcaagaacctggccagcctgctgctgcactgcgtgcagctgaccgacggcgtgagccagatccactacatcaagcagatcgtgcccctgctggagaaggccgacaagaacggcatgtgcgaccccaccatccagagctgcctggacatcctggccggcatctacctgagcctgagcctgaagaaccccctgaagaaggtgctggccagcagcctgaacagcctgcccgacttcttcctgcccgaggccatgcacagattcaccagcagactgcaggaggagctgaacaccaccgacctgtacagctacagaaaggtgaccgacaacatcagcagctgcatggagaacttcaacctgggcagagccagcgtgaacaacctgctgaagaacgtgctgcacttcctgcagaagagcctgatcgagatcctggaggagaacagaaagtgcgccggcaaccacatcatccagacccagctgatgaacgacctgctggtgggcatcagagtgagcatgatgctggtgcagaaggtgcaggacttccagggcaacctgtggaagaccagcgacagccccatctggcagaacatgtgcggcctgctgagcatcttcaccaaggtgctgagcgacgacgacctgctgcagaccgtgcagagcaccagcggcctggccatcatcctgttcatcaagaccatgttccaccccagcgagaagatcccccacctgatcagcagcgtgctgctgagaagcgtggactgcaccagcgtgcccgagtggttcatgagcagctgcagaagcctgtgctgcggcgacatcagccagagcgccgtgctgttcctgtgccagggcaccctggccatgctggactggcagaacggcagcatgggcagaagcggcgaggccctgctgctggacaccgcccacgtgctgttcaccctgagcagccagatcaaggagcccaccctggagatgttcctgagcagaatcctggccagctggaccaacagcgccatccaggtgctggagagcagcagccccagcctgaccgacagcctgaacggcaacagcagcatcgtgggcagactgctggagtacgtgtacacccactgggagcaccccctggacgccctgagacaccagaccaagatcatgttcaagaacctgctgcagatgcacagactgaccgtggagggcgccgacttcgtgcccgaccccttcttcgtggagctgaccgagagcctgctgagactggagtggcacatcaagggcaagtacacctgcctgggctgcctggtggagtgcatcggcgtggagcacatcctggccatcgacaagaccatccccagccagatcctggaggtgatgggcgaccagagcctggtgccctacgccagcgacctgctggagaccatgttcagaaaccacaagagccacctgaagagccagaccgccgagagcagctggatcgaccagtggcacgagacctgggtgagccccctgctgttcatcctgtgcgagggcaacctggaccagaagagctacgtgatcgactactacctgcccaagctgctgagctacagccccgagagcctgcagtacatggtgaagatcctgcagaccagcatcgacgccaagaccggccaggagcagagcttccccagcctgggcagctgcaacagcagaggcgccctgggcgccctgatggcctgcctgagaatcgccagagcccacggccacctgcagagcgccaccgacacctgggagaacctggtgagcgacgccagaatcaagcagggcctgatccaccagcactgccaggtgagaatcgacaccctgggcctgctgtgcgagagcaacagaagcaccgagatcgtgagcatggaggagatgcagtggatccagttcttcatcacctacaacctgaacagccagagccccggcgtgagacagcagatctgcagcctgctgaagaagaagctgttctgcagaatccaggagagcagccaggtgctgtacaagctggagcagagcaagagcaagagagagcccgagaacgagctgaccaagcagcaccccagcgtgagcctgcagcagtacaagaacttcatgagcagcatctgcaacagcctgttcgaggccctgttccccggcagcagctacagcaccagattcagcgccctgaccatcctgggcagcatcgccgaggtgttccacgtgcccgagggcagaatctacaccgtgtaccagctgagccacgacatcgacgtgggcagattccagaccctgatggagtgcttcaccagcaccttcgaggacgtgaagatcctggccttcgacctgctgatgaagctgagcaagaccgccgtgcacttccaggacagcggcaagctgcagggcctgttccaggccgccctggagctgagcaccagcaccaagccctacgactgcgtgaccgccagctacctgctgaacttcctgatctggcaggacgccctgcccagcagcctgagcgcctacctgacccagcaggtggcctgcgacaacggcgacagacccgccgccgtggtggagagaaacaccctgatggtgatcaagtgcctgatggagaacctggaggaggaggtgagccaggccgagaacagcctgctgcaggccgccgccgccttccccatgtacggcagagtgcactgcatcaccggcgccctgcagaagctgagcctgaacagcctgcagctggtgagcgagtggagacccgtggtggagaagctgctgctgatgagctacagactgagcaccgtggtgagccccgtgatccagagcagcagccccgagggcctgatccccatggacaccgacagcgagagcgccagcagactgcagatgatcctgaacgagatccagcccagagacaccaacgactacttcaaccaggccaagatcctgaaggagcacgacagcttcgacatgaaggacctgaacgccagcgtggtgaacatcgacaccagcaccgagatcaagggcaaggaggtgaagacctgcgacgtgaccgcccagatggtgctggtgtgctgctggagaagcatgaaggaggtggccctgctgctgggcatgctgtgccagctgctgcccatgcagcccgtgcccgagagcagcgacggcctgctgaccgtggagcaggtgaaggagatcggcgactacttcaagcagcacctgctgcagagcagacacagaggcgccttcgagctggcctacaccggcttcgtgaagctgaccgaggtgctgaacagatgccccaacgtgagcctgcagaagctgcccgagcagtggctgtggagcgtgctggaggagatcaagtgcagcgaccccagcagcaagctgtgcgccaccagaagaagcgccggcatccccttctacatccaggccctgctggccagcgagcccaagaagggcagaatggacctgctgaagatcaccatgaaggagctgatcagcctggccggccccaccgacgacatccagagcaccgtgccccaggtgcacgccctgaacatcctgagagccctgttcagagacaccagactgggcgagaacatcatcccctacgtggccgacggcgccaaggccgccatcctgggcttcaccagccccgtgtgggccgtgagaaacagcagcaccctgctgttcagcgccctgatcaccagaatcttcggcgtgaagagagccaaggacgagcacagcaagaccaacagatgcggccacagccccgtgtaccacagcagagagatggccgccagagccctggtgcccttcgtgatgatcgaccacatccccaacaccatcagaaccctgctgagcaccctgcccagctgcaccgaccagtgcttcagacagaaccacatccacggcaccctgctgcaggtgttccacctgctgcaggcctacagcgacagcaagcacggcaccaacagcgacttccagcacgagctgaccgacatcaccgtgtgcaccaaggccaagctgtggctggccaagagacagaacccctgcctggtgaccagagccgtgtacatcgacatcctgttcctgctgacctgctgcctgaacagaagcgccaaggacaaccagcccgtgctggagagcctgggcttctgggaggaggtgagaggcatcatcagcggcagcgagctgatcaccggcttcccctgggccttcaaggtgcccggcctgccccagtacctgcagagcctgaccagactggccatcgccgccgtgtgggccgccgccgccaagagcggcgagagagagaccaacgtgcccatcagcttcagccagctgctggagagcgccttccccgaggtgagaagcctgaccctggaggccctgctggagaagttcctggccgccgccagcggcctgggcgagaagggcgtgccccccctgctgtgcaacatgggcgagaagttcctgctgctggccatgaaggagaaccaccccgagtgcttctgcaagatcctgaagatcctgcactgcatggaccccggcgagtggctgccccagaccgagcactgcgtgcacctgacccccaaggagttcctgatctggaccatggacatcgccagcaacgagagaagcgagatccagagcgtggccctgagactggccagcaaggtgatcagccaccacatgcagacctgcgtggagaacagagagctgatcgccgccgagctgaagcagtgggtgcagctggtgatcctgagctgcgaggaccacctgcccaccgagagcagactggccgtggtggaggtgctgaccagcaccacccccctgttcctgaccaacccccaccccatcctggagctgcaggacaccctggccctgtggaagtgcgtgctgaccctgctgcagagcgaggagcaggccgtgagagacgccgccaccgagaccgtgaccaccgccatgagccaggagaacacctgccagagcaccgagttcgccttctgccaggtggacgccagcatcgccctggccctggccctggccgtgctgtgcgacctgctgcagcagtgggaccagctggcccccggcctgcccatcctgctgggctggctgctgggcgagagcgacgacctggtggcctgcgtggagagcatgcaccaggtggaggaggactacctgttcgagaaggccgaggtgaacttctgggccgagaccctgatcttcgtgaagtacctgtgcaagcacctgttctgcctgctgagcaagagcggctggagaccccccagccccgagatgctgtgccacctgcagagaatggtgagcgagcagtgccacctgctgagccagttcttcagagagctgccccccgccgccgagttcgtgaagaccgtggagttcaccagactgagaatccaggaggagagaaccctggcctgcctgagactgctggccttcctggagggcaaggagggcgaggacaccctggtgctgagcgtgtgggacagctacgccgagagcagacagctgaccctgcccagaaccgaggccgcctgctag

SEQ ID NO: 286419 - DNA, 5643 bp, Artificial Sequence
  derived and/or modified sequence
atgggggtgaagaaaaaaaaggaaatgcaggttgcggccttgaccatctgtcaccaggacctggaaacactaaagtcatttgccgatgtagaaggtaaaaatctcgcctctctgcttctacattgcgtgcaactgactgatggggtcagtcaaatccattatatcaaacagattgtgcctcttctcgagaaggcggataagaatggtatgtgcgatcccaccattcagagctgcctagatatcctggccggcatttatctaagcctgtcattgaagaatccactgaaaaaggtcttagcctcttctcttaacagcctgcccgacttttttctcccagaagctatgcacagatttacttccagactgcaggaagagttgaacaccacagatctgtactcgtacagaaaagtgactgataacatctcatcatgcatggaaaactttaacttaggcagggcctcagttaacaatctgctgaagaacgtcctccatttccttcagaagtcactaattgagatcctcgaagagaatcgcaaatgtgcaggcaaccacatcattcaaacgcagcttatgaatgatctgcttgtgggtataagggtgtcaatgatgctggttcaaaaagtccaggattttcagggaaatctctggaagacttccgactcccctatttggcagaacatgtgcggccttctctccatatttacgaaagtcctgagcgatgatgatcttcttcagacagtgcaaagtacatcaggcctggctatcatcctcttcatcaagactatgtttcatccttcagaaaagatcccccatttgatcagcagcgtgctgttgagaagcgtagactgcacctccgtgccagaatggttcatgtcgtcgtgtagaagcctgtgctgtggcgatatctctcagtcagcagtgcttttcctgtgtcagggtactctggctatgctggattggcagaacggctctatgggtcgttcaggcgaagccctgctcctggacacagcccacgtcctcttcaccctttcgtcccagatcaaagagcccacgcttgaaatgttcctctctcgcattcttgccagctggaccaattccgctatccaggtgctggaaagcagcagtccttcgttaacagactccctcaacgggaattcgtcgatcgtggggagactgcttgagtacgtctacacacattgggaacatcccttggacgccctgcggcatcagacaaaaatcatgttcaaaaacctgctgcaaatgcacaggctgacggtcgagggcgccgattttgtgcctgacccttttttcgtagaactaacggaatcgctgcttcggttggaatggcacattaaaggtaagtatacctgtcttggctgtcttgtggagtgcatcggggtcgagcacatcctggcgatagacaagactattccatcgcagatcctagaagtcatgggggaccaatctctagtcccgtacgctagcgacctgctggagactatgttccggaatcataaaagccatttgaaatctcaaaccgccgaatcgagttggatcgatcagtggcacgagacatgggtctcgcccctccttttcatactctgtgagggaaaccttgatcaaaaatcatacgtcatcgactattatctaccaaagctcttgtcctactcccccgaatcgctgcagtacatggtgaagatccttcagaccagcattgacgcaaagacaggacaggaacagagcttcccgtcccttggcagctgtaactcccggggggctttgggggccctgatggcctgcttacgaatagcacgcgctcacgggcatctgcagtcagccacggacacgtgggaaaatctcgtgtcggatgcacggatcaaacagggtttgatccaccagcactgccaagtgcggatcgacactctcggattactgtgtgagtccaaccgctcaactgaaattgtgtccatggaggagatgcagtggatacagtttttcattacatacaacctcaattcacagtctccgggggtgagacagcagatatgtagccttttgaagaagaaactcttctgcagaatacaggaatcttcgcaggtcttatataaactcgaacagagcaagtctaaacgcgaaccagagaatgagcttacaaagcaacacccatcagtgtctctgcagcagtacaaaaacttcatgtcatccatctgtaacagtcttttcgaggccctatttcccggttctagctacagcaccagattttctgctctgacaattctcgggtcaatcgcagaggtgttccacgtgccagaagggaggatctataccgtatatcaactttctcacgatattgatgtggggcgctttcagaccctcatggaatgtttcacctccacattcgaggatgtgaaaatcctcgcctttgatctcctgatgaagctttcaaagaccgccgtccacttccaggatagtggcaaactccagggactcttccaagccgctttggaattaagtactagtactaagccttatgactgtgtaaccgcatcttacctcctgaactttcttatatggcaggatgccctgccctcttctttgtccgcttatttgacccaacaggtggcgtgtgataatggagatagacccgctgctgtcgtggaacgtaacactttaatggtgattaagtgtcttatggagaatctggaagaagaggtgagccaagccgagaatagccttctgcaagccgccgctgccttcccaatgtacggaagagtgcattgtatcacaggggctctacagaagctgtccttgaactcactgcagcttgttagcgaatggaggcccgtggtcgagaaattgctccttatgagttatcggttgtctactgtggtgtcccctgtaatccaatcctcaagcccagaggggctgatcccaatggacacagacagtgagagcgcaagccggctgcagatgatactcaacgaaatccaaccccgggatacgaacgattattttaatcaggcgaagatcctgaaagaacatgattccttcgacatgaaagacttaaatgcttcagtcgtcaatatcgatacaagcactgagataaaaggcaaggaggttaaaacatgcgacgtgacagcacagatggtgcttgtttgctgctggaggtccatgaaagaggtcgctctgctactgggcatgctctgccagctgctacctatgcaacctgtacctgagtctagcgatggtctgctcaccgtggagcaggtgaaggaaattggcgactacttcaaacagcacctacttcagagccgccatcgcggcgcttttgaactcgcttacacggggttcgtgaagctgactgaagtgttgaacagatgccccaatgtctcccttcagaagttaccagaacagtggttgtggagtgtgcttgaagaaattaaatgtagcgacccctccagcaagctgtgcgctaccaggcggtccgccggaattccattctacatacaggcactgttggcctctgaacctaagaagggacgcatggatctactgaaaataacgatgaaggaacttattagcctggctggacctaccgacgacatccaaagtaccgtgccccaggttcacgccctcaacatccttcgcgctctcttccgggacacccgccttggcgagaatatcataccatacgtggccgacggcgcaaaggccgctatcctcggcttcacctccccagtgtgggcggtgaggaactccagcactctcctgttcagcgcgctcatcaccagaatttttggagtgaaaagagccaaagatgaacattctaagacaaacagatgtgggcactctccagtgtatcattcgcgtgaaatggccgccagagcccttgtgcctttcgtgatgatagatcacataccaaatacaattaggacactcttgtcgacattgccttcttgcacagatcagtgctttcgccagaatcacatccacgggactctgctccaagtctttcatttgctacaggcatactccgacagcaaacacgggacaaattccgatttccagcatgagttgacagatatcaccgtatgtacaaaagccaaattatggctggcaaaacggcagaacccctgcctcgtgaccagagctgtgtacattgacatcttgttcctactaacttgttgtctcaataggtctgcaaaagacaatcagcccgtactggagtccctcggtttctgggaggaggtcagagggataatctctgggtcagaactcatcacagggttcccatgggcgttcaaggtgcctgggttacctcagtatcttcagagtctgaccagactggccatagccgcggtctgggccgccgcagcgaagagcggcgaaagggaaacgaacgtgcctatctccttttcccagctactggaaagcgcatttcccgaggttaggtcactgacactggaagcactattagagaaatttcttgctgcggcctccggtctgggtgaaaagggagtcccacccctgctgtgtaacatgggtgaaaagttcctgctgcttgccatgaaggagaaccatcccgagtgcttttgtaagatccttaaaattcttcactgcatggatcctggggaatggctgccgcagactgagcattgcgtgcacctcactcccaaggaattcctaatctggactatggacatcgcatcaaatgaaagaagcgagatacagtcagtcgcccttcggttggccagcaaagtcattagccaccacatgcagacttgcgtggaaaatcgtgagcttatagctgccgagttgaaacaatgggtacagcttgtgattctgagttgtgaggaccacctgccaactgagtctcgactggctgtagtagaggtcctgacctcaacaaccccactgtttctcacaaatccgcatcctatcctcgaactccaggacaccttggctctgtggaagtgcgttcttacgctgctgcaatcggaggagcaggctgtccgggatgcggccaccgaaactgtgactaccgctatgtcacaggagaacacgtgtcaatccactgaattcgccttctgccaggtcgacgcatcaattgccctggccctcgcactcgccgtactgtgtgatctgctacaacaatgggatcaattggctccgggtctgcctatcctcttgggatggctgctgggggagtcagatgatctggtagcctgcgtcgagagcatgcatcaggtggaggaagattatctgttcgagaaagcagaagtcaatttctgggctgagacactcatatttgtaaaatacttatgtaaacatcttttctgtttgctgtcaaaatccggctggcgaccaccaagcccagaaatgttgtgccacctgcagagaatggtaagcgaacagtgtcatcttctgtcccaatttttccgggagctgcccccagccgctgaattcgtcaagactgtggaattcacaagacttagaatccaagaagagcggaccctagcttgcctacggttacttgctttcctcgagggaaaagagggagaagacacattagttctgagcgtttgggacagctacgccgagagccgccagctcacattgccccgtaccgaagccgcctgttag

SEQ ID NO: 286420 - DNA, 5643 bp, Artificial Sequence
  derived and/or modified sequence
atgggcgtgaagaagaagaaggagatgcaggtggccgccctgaccatctgccaccaggacctggagaccctgaagagctttgctgatgtggagggcaagaacctggccagcctgctgctgcactgtgtgcagctgacagatggagtgtcccagatccactacatcaagcagatcgtgcccctgctggagaaggctgacaagaatggcatgtgtgaccccaccatccagagctgcctggacatcctggccggcatctacctgagcctgagcctgaagaaccccctgaagaaggtgctggccagcagcctgaacagcctgcctgacttcttcctgcctgaggccatgcaccgcttcaccagccggctgcaggaggagctgaacaccacagacctgtacagctacaggaaggtgacagacaacatcagcagctgcatggagaacttcaacctgggccgggcctctgtgaacaacctgctgaagaatgtgctgcacttcctgcagaagagcctgattgagatcctggaggagaacagaaaatgtgccggcaaccacatcatccagacccagctgatgaatgacctgctggtgggcatccgggtgtccatgatgctggtgcagaaggtgcaggacttccagggcaacctgtggaagaccagtgacagccccatctggcagaacatgtgtggcctgctgagcatcttcaccaaggtgctgagtgatgatgacctgctgcagacagtgcagagcaccagcggcctggccatcatcctcttcatcaagaccatgttccaccccagcgagaagatcccccacctgatcagctctgtgctgctgcggtctgtggactgcacctctgtgcctgagtggttcatgagcagctgccgcagcctgtgctgcggggacatcagccagagcgctgtgctcttcctgtgccagggcaccctggccatgctggactggcagaatggctccatgggccgcagcggggaggccctgctgctggacacagcccacgtgctcttcaccctgagcagccagatcaaggagcccaccctggagatgttcctgagccgcatcctggcctcctggaccaacagcgccatccaggtgctggagagcagcagccccagcctgacagacagcctgaatggaaacagcagcatcgtgggccgcctgctggagtatgtgtacacccactgggagcaccccctggatgccctgcggcaccagaccaagatcatgttcaagaacctgctgcagatgcaccggctgactgtggagggcgctgactttgtgcctgaccccttctttgtggagctgacagagagcctgctgcggctggagtggcacatcaagggcaagtacacctgcctgggctgcctggtggagtgcattggagtggagcacatcctggccatcgacaagaccatccccagccagatcctggaggtgatgggagaccagagcctggtgccctatgccagtgacctgctggagaccatgttcaggaaccacaagagccacctgaagagccagacagctgagagctcctggattgaccagtggcatgagacctgggtgagccccctgctcttcatcctgtgtgagggcaacctggaccagaagagctatgtgattgactactacctgcccaagctgctgagctacagccctgagagcctgcagtacatggtgaagatcctgcagaccagcattgatgccaagacaggccaggagcagagcttccccagcctgggcagctgcaacagcagaggagccctgggcgccctgatggcctgcctgagaattgcccgggcccacggccacctgcagagcgccacagacacctgggagaacctggtgtctgatgcccgcatcaagcagggcctcatccaccagcactgccaggtgagaattgacaccctgggcctgctgtgtgagagcaacagaagcacagagatcgtgtccatggaggagatgcagtggatccagttcttcatcacctacaacctgaacagccagagccctggggtgcggcagcagatctgcagcctgctgaagaagaagctgttctgccgcatccaggagagcagccaggtgctgtacaagctggagcagagcaagagcaagcgggagccagaaaatgagctgaccaagcagcaccccagcgtgtccctgcagcagtacaagaacttcatgagcagcatctgcaacagcctgtttgaggccctcttccctggcagcagctacagcacccgcttcagcgccctgaccatcctgggcagcattgctgaggtgttccacgtgcctgagggccgcatctacacagtgtaccagctgagccatgacattgatgtgggccgcttccagaccctgatggagtgcttcaccagcacctttgaagatgtgaagatcctggcctttgacctgctgatgaagctgagcaagacagctgtgcacttccaggacagcggcaagctgcagggcctcttccaggccgccctggagctgagcaccagcaccaagccctatgactgtgtgacagccagctacctgctgaacttcctgatctggcaggatgccctgcccagcagcctgagcgcctacctgacccagcaggtggcctgtgacaacggggacaggcctgctgctgtggtggagaggaacaccctgatggtgatcaagtgcctgatggagaacctggaggaggaggtgtcccaggccgagaacagcctgctgcaggccgctgctgccttccccatgtatggccgggtgcactgcatcactggagccctgcagaagctgagcctgaacagcctgcagctggtgtctgagtggaggcctgtggtggagaagctgctgctgatgagctaccgcctgagcacagtggtgtcccctgtgatccagagcagcagccctgagggcctcatccccatggacacagattctgagagcgccagccggctgcagatgatcctgaatgagatccagccccgggacaccaatgactacttcaaccaggccaagatcctgaaggagcatgacagctttgacatgaaggacctgaatgcctctgtggtgaacatcgacaccagcacagagatcaagggcaaggaggtgaagacctgtgatgtgacagcccagatggtgctggtgtgctgctggaggtccatgaaggaggtggccctgctgctgggcatgctgtgccagctgctgcccatgcagcctgtgcctgagagcagtgatggcctgctgactgtggagcaggtgaaggagattggagactacttcaagcagcacctgctgcagagccgccacagaggagcctttgagctggcctacacaggctttgtgaagctgacagaggtgctgaaccgctgccccaacgtgtccctgcagaagctgcctgagcagtggctgtggagcgtgctggaggagatcaagtgcagcgaccccagcagcaagctgtgtgccacccggcgctctgctggcatccccttctacatccaggccctgctggccagcgagcccaagaagggccgcatggacctgctgaagatcaccatgaaggagctgatcagcctggccggccccacagatgacatccagagcacagtgccccaggtgcacgccctgaacatcctgcgggccctcttccgggacacccggctgggggagaacatcatcccctacgtggctgatggagccaaggccgccatcctgggcttcaccagccctgtgtgggccgtgaggaacagcagcaccctgctcttcagcgccctgatcacccgcatcttcggcgtgaagagggccaaggatgagcacagcaagaccaacagatgtggccacagccctgtgtaccacagccgggagatggccgcccgggccctggtgccctttgtgatgattgaccacatccccaacaccatccgcaccctgctgagcaccctgcccagctgcacagaccagtgcttccggcagaaccacatccacggcaccctgctgcaggtgttccacctgctgcaggcctacagcgacagcaagcacggcaccaacagcgacttccagcacgagctgacagacatcaccgtgtgcaccaaggccaagctgtggctggccaagaggcagaacccctgcctggtgaccagggctgtgtacatcgacatcctcttcctgctgacctgctgcctgaacagaagtgccaaggacaaccagcctgtgctggagagcctgggcttctgggaggaggtgcggggcatcatcagcggcagcgagctgatcaccggcttcccctgggccttcaaggtgcccggcctgccccagtacctgcagagcctgacccggctggccatcgctgctgtgtgggccgccgccgccaagtctggagagcgggagaccaacgtgcccatctccttcagccagctgctggagagcgccttccctgaggtgcgcagcctgaccctggaggccctgctggagaagttcctggccgccgccagcggcctgggggagaagggcgtgccccccctgctgtgcaacatgggagagaagttcctgctgctggccatgaaggagaaccaccctgagtgcttctgcaagatcctgaagatcctgcactgcatggaccctggagagtggctgccccagacagagcactgtgtgcacctgacccccaaggagttcctgatctggaccatggacatcgccagcaatgaaagaagtgagatccagagcgtggccctgcggctggccagcaaggtgatcagccaccacatgcagacctgtgtggagaaccgggagctgattgctgctgagctgaagcagtgggtgcagctggtgatcctgagctgtgaggaccacctgcccacagagagccggctggccgtggtggaggtgctgaccagcaccacccccctcttcctgaccaacccccaccccatcctggagctgcaggacaccctggccctgtggaagtgtgtgctgaccctgctgcagagcgaggagcaggccgtgagagatgctgccacagagaccgtgaccacagccatgagccaggagaacacctgccagagcacagaatttgccttctgccaggtggatgccagcatcgccctggccctggccctggccgtgctgtgtgacctgctgcagcagtgggaccagctggcccctggcctgcccatcctgctgggctggctgctgggggagagtgatgacctggtggcctgtgtggagagcatgcaccaggtggaggaggactacctgtttgagaaggccgaggtgaacttctgggccgagaccctcatctttgtgaagtacctgtgcaagcacctgttctgcctgctgagcaagagcggctggaggcctcccagccctgagatgctgtgccacctgcagaggatggtgtctgagcagtgccacctgctgagccagttcttccgggagctgcccccagctgctgagtttgtgaagacagtggagttcacccggctgcgcatccaggaggagaggaccctggcctgcctgcggctgctggccttcctggagggcaaggagggggaggacaccctggtgctgtctgtgtgggacagctatgcagagagccggcagctgaccctgcccaggacagaggccgcctgctag

SEQ ID NO: 286421 - DNA, 5643 bp, Artificial Sequence
  derived and/or modified sequence
atgggcgtgaagaagaagaaggagatgcaggtggccgccctgaccatatgccaccaggacttggaaacactcaagagtttcgccgacgttgagggcaaaaaccttgcatcactcctccttcactgtgtccagctgacggacggcgtgtcccagattcattacattaagcaaattgtgccactgctcgaaaaggctgataagaatggaatgtgtgatcctacaattcagagctgtctggacattttagcgggtatctatctctctctgtcacttaagaatcccttgaaaaaggtcctagcttctagcctgaattccctgcccgactttttccttcctgaggctatgcaccgtttcacaagccggttgcaagaagagcttaatacaactgacctatactcttacaggaaggttacggacaatatctcatcatgcatggagaacttcaatctcggcagagccagcgtcaataacctcttgaagaacgtgctgcactttctgcagaagtcactcatagagatattagaggagaatagaaagtgtgctggcaaccatataattcaaactcaactaatgaatgatctcctggtaggcattagggtgagcatgatgctcgtccagaaagtgcaggacttccagggaaatctgtggaagacttccgactcccctatctggcaaaacatgtgcgggctgctctctattttcacgaaggtgctcagcgatgatgatttgctgcaaacggtgcagtcaacctccggtctagcgatcattctgtttattaagaccatgtttcatccatccgagaaaatccctcaccttattagttcagtgctactcaggagtgtggattgtacaagcgtgcctgagtggttcatgtccagctgcaggagtctctgctgtggggatatatcacagagtgccgtactttttctatgccaaggaacgctggccatgctggattggcagaacggatctatggggcgctctggagaggctttactactagacacagcacacgtattgttcaccctttccagccaaattaaggagcctactctggagatgtttctgagtcgaatcctcgcttcgtggactaattccgcgattcaggtgctcgagagtagctccccctctctgaccgatagtttgaacggcaacagcagtatcgtgggtcgtttgttggaatacgtatacacgcattgggaacaccccctagatgctttgcgccatcagaccaagatcatgtttaaaaacctcttgcaaatgcatcgccttacagttgagggtgccgactttgtccctgacccgttctttgtggaattaacggaatccctcctgcgtttagagtggcatattaaaggcaaatacacttgcttgggatgtctcgtagagtgcatcggcgtggaacacattcttgccatcgacaaaactatcccaagccaaatactcgaagtcatgggggatcagtcacttgtgccttacgcttcagacctccttgaaaccatgttcagaaaccacaagagtcatttgaagagtcagacagccgaaagctcttggattgatcaatggcacgaaacttgggtgtcaccgctcttgtttatcctatgcgagggtaacctggaccagaaaagctatgttattgattactacttgcctaagctcttatcctattctccagaaagcctgcagtatatggtaaagatcctgcagaccagcatcgacgcaaagaccggccaggaacaaagcttcccatccctgggctcctgcaacagcagaggggcactcggcgctctaatggcctgcctcagaattgctagagcacacggacacctgcagtcagcaaccgatacatgggagaacctagttagcgatgcccgtattaaacagggcttaattcatcagcactgccaagtgcggatcgatacactcggcctcctgtgcgaatctaatcgctccaccgagattgtgtccatggaggaaatgcagtggatccagttcttcattacatataacttaaactcccagagcccgggggtgcgtcagcagatctgcagcctgctaaagaagaaactcttctgtcggatacaagagtcatctcaggtgctgtacaagctggagcagagcaaaagcaaaagagagcccgagaatgagttgacaaagcagcatccatctgtgtctctacaacagtacaaaaattttatgtctagcatctgcaacagtttatttgaggccctgtttcctggcagctcctactccacccgctttagcgcgctcaccatcctggggtcaattgcggaagtgtttcatgtcccggagggacggatctatacggtttatcagctgtcccacgacattgacgtaggacggttccagaccttaatggagtgtttcaccagcaccttcgaggacgtgaagattctagcattcgatctgttgatgaagctttcgaaaacagctgtgcattttcaagactccggcaaactccagggtctgtttcaagcagcactggagctgtctacctcaacaaagccctacgattgcgtcacagcctcttacctcctcaacttcctcatctggcaggatgccctgccctcttccctgagtgcctatctcacacaacaggtcgcctgcgacaatggagatcgtccagcagccgtggtcgagagaaacaccttaatggttatcaagtgtttaatggagaacctggaagaggaggtgtctcaagcggaaaattccctgctccaagccgccgccgcatttccgatgtatggacgcgtgcactgcattacaggagctctgcagaaattgagcttgaatagtttgcagctagttagtgagtggaggcccgtggtcgagaagctgctgctcatgtcttatagattatctacagtggttagtcccgtaattcagagtagctcacctgaggggttaattcccatggatactgacagtgaaagcgcgtcccgtctgcagatgatactgaatgagattcagcctagagatactaatgattactttaatcaagccaagatcctcaaggaacacgacagctttgatatgaaggatttaaacgcctccgtcgtgaatatcgacacctctactgagattaaaggaaaagaagtaaagacttgtgacgtgactgcacagatggtccttgtgtgttgctggcgctctatgaaagaagtggccttacttctgggcatgctgtgccagctgctgccaatgcagcctgtgcccgagtcatctgatgggttactcacggtcgagcaggttaaggagataggagactactttaaacagcacctgctccagtctcgtcatagaggcgcgttcgaactggcttatacgggatttgtgaaacttactgaggtactgaatcggtgccctaatgtatctctgcagaagttgccagagcagtggctgtggtccgtgctcgaagaaattaagtgttccgacccttcctcaaagctatgtgccacccgaagatccgctgggatccccttttacatacaggctctgctcgctagcgaaccgaagaagggcaggatggacctcctcaaaattaccatgaaggaactcatctcgttggccgggcccaccgacgacatacagagtacagttccccaggtgcatgccttgaatatactgcgcgccctctttcgagatacccgccttggggagaacataataccttacgtggccgacggtgccaaagcggcgatcttaggattcacctcaccagtttgggccgtgagaaacagcagtaccttattgtttagcgctctaattaccaggatattcggagtgaaaagggccaaggacgaacactctaaaaccaacaggtgtggccactctcccgtttatcactcccgggagatggccgctagagcactggtaccatttgtgatgattgaccatattcccaatactattaggactctgctaagcactctgccttcatgcacagaccagtgttttcgtcagaaccatatacacggcacacttttacaggtctttcacctcctgcaggcgtacagcgactctaagcatggaacaaatagcgactttcagcacgaactgactgacatcacggtctgtactaaagcaaagctttggctggctaaaagacagaacccgtgtttggtgactcgcgccgtatatatcgatatcctgttcttgctgacatgctgtctcaatcggagcgccaaggacaaccagcctgtgttggagagtctgggattttgggaggaagtgcgcggtatcatatccgggagcgaactgattactggatttccctgggccttcaaggtccccggccttcctcagtatttgcagagccttactagacttgcaattgccgctgtatgggcagccgcagcaaagagcggcgagcgggagaccaatgtgccgatttcctttagccaactcctggaatctgcttttcccgaagtaagatcactgactctggaggcccttttggaaaagttccttgctgctgccagcgggctaggggagaagggagttcctcctctactttgtaacatgggtgagaaattcctcctgcttgctatgaaagagaatcaccccgagtgtttctgcaagattctcaaaatcctgcactgcatggacccaggcgagtggctgccccaaacagaacattgtgtgcacctaactccaaaggagtttttgatctggacaatggacattgcctcaaacgagcgctccgagattcaatccgttgctcttagactggcttccaaagtgatttctcaccatatgcagacatgtgttgagaaccgagagctcattgccgctgagcttaaacagtgggttcaattagtcatcctatcctgtgaggatcatctgccgactgaaagcagactcgcagtcgtggaagtgctgacatcaaccaccccactctttctcactaacccgcaccctatcctggagctgcaggatactctggccctttggaaatgtgtgcttaccttgctgcagagcgaagagcaagctgtgagagacgctgctacagagactgtgacaacggcaatgagccaggagaacacatgtcagtccactgagtttgccttctgtcaagtcgatgcctccatagctctggcgctcgcattggccgtcctgtgcgacttgttacaacagtgggaccagttagccccaggattgcccatcctactgggatggcttctgggagagtccgacgacttagttgcttgcgtggagtccatgcaccaggtcgaggaggactatttgtttgagaaggctgaggtcaatttctgggccgaaacattgatttttgttaagtatctatgtaaacacttgttctgtctgctgtcgaagtcaggctggcggcccccaagccctgagatgctctgccatctccagcgaatggtgtcagagcagtgtcatctgcttagccagtttttccgagaactaccaccagccgctgaattcgttaagaccgtcgagtttacacgtctacgaatccaggaagagagaaccttagcctgcttgaggctgcttgcattcctagagggaaaggaaggagaagatacgctcgtgctctccgtgtgggactcgtacgcagagtccagacagctcacgctgccacgcaccgaggccgcctgctag

SEQ ID NO: 286422 - DNA, 5642 bp, Artificial Sequence
  derived and/or modified sequence
atgggcgtcaaaaagaaaaaggagatgcaggttgctgctttgactatctgccatcaagacctcgaaaccctgaagagcttcgccgatgtcgaaggaaaaaacttggcatcactcctcttgcactgcgtccagctgacagacggagtttctcagatacattatattaagcagatcgttcctctgctagagaaggcggataagaatggaatgtgcgatcccaccatccagagctgcttggatattctggccggaatttatctttcgttaagtctcaagaatcctctgaaaaaagtccttgcctccagccttaactcactcccggactttttcctgccagaagcaatgcatagatttaccagccgcctgcaggaagagctaaacaccacagacctgtacagctatcgtaaggtcacagacaatatcagttcatgcatggaaaattttaatttaggcagagcatcagtgaataaccttctgaagaacgtgctccacttcttgcagaagtccctgattgagatcctggaagagaatcggaagtgtgcaggaaaccacattatacagacacagctcatgaacgacctgctagtcggtattagggtctccatgatgctggtgcagaaggttcaggatttccagggcaacctttggaaaaccagcgacagccccatttggcaaaacatgtgtggtcttctatccatctttacaaaggtcctctccgatgatgatttattgcaaaccgtacaatcaacctcagggctcgcaattatcctttttataaagaccatgttccacccctctgaaaaaatccctcatttgatctcttccgtgcttctgcgcagtgtggattgtacaagcgtacccgaatggttcatgtcatcttgccgcagcctgtgttgcggcgacatctcccaatctgcagttctgtttctctgccagggtactctcgccatgctggactggcagaacggatctatgggaagatccggagaggccttattgctggacactgctcatgtcctttttacactgagcagtcagatcaaagagcctacactggaaatgttcctctctcggattctggcctcttggacaaatagtgcaatccaggtgctggaatccagcagtccctccctaaccgattctctgaacggcaacagctctatagtcggcagactgctggaatacgtgtacacacactgggaacaccctctcgacgccctgcgccaccagactaagatcatgttcaaaaatctgctgcagatgcatcgtctcacagtagagggcgcagacttcgtcccagatcccttctttgtggaacttacagaaagtctcttgagactggaatggcacatcaaagggaagtacacatgtctcggttgtttggtggaatgtattggagtcgagcatatactcgcaatagacaaaacgatcccaagccagatcctcgaggtcatgggtgatcagtctctggtgccatacgcctctgatcttcttgagactatgtttcggaatcacaagtcacatctaaagagtcagaccgccgagtcaagttggatagatcagtggcacgagacttgggtgtccccactgctgttcatcctgtgtgagggcaatttagaccagaaatcttatgtgattgattattacttgcctaaactgctgagctatagccccgagagtctccagtacatggtcaagatcctgcagacttctattgacgccaagaccggacaggagcagtcattcccttccctgggctcttgcaacagcaggggtgcgctgggtgccctcatggcatgcctgagaattgcccgagcacacggccacttgcagtccgctactgatacctgggagaatctagtttcagacgcaaggataaagcaaggccttatccatcagcactgtcaggttaggatagacaccctgggacttctgtgtgagagcaaccgcagcaccgaaatagtgtctatggaggagatgcaatggatccagttcttcattacctacaacctaaatagccagtctccaggggtacgacagcagatctgcagtctccttaagaagaagctcttttgccggattcaggagtccagccaggttttgtataaacttgaacagagtaagagcaaaagggaacctgagaatgagctgacaaagcagcatccaagtgtctctctgcaacagtataaaaattttatgtcctctatttgcaactctctgttcgaggccctattcccaggatcatcttacagtaccagattcagcgcacttactatcttgggatcaatcgcagaagtgttccacgtacccgaaggacgaatatacactgtttaccaattatcacatgacattgatgtggggaggttccagaccttaatggagtgctttaccagcacctttgaagatgtgaagattctagccttcgacctgttgatgaaactttccaagaccgctgttcacttccaggattccggaaaacttcagggtctattccaggccgctctggagctgtctacatccactaagccttatgactgtgttactgcatcttatttgcttaacttccttatctggcaggatgcactgccatcttccctctctgcatacctaacccaacaagtggcctgcgataatggtgaccgtcccgctgccgttgtcgagcgcaacaccctaatggtgattaagtgtctcatggagaaccttgaggaggaagtttcccaggcagagaactctctactgcaggccgcagccgcattcccaatgtacggcagagtgcattgcatcacaggagcactgcagaaattgtcactaaacagcctccagctggtcagtgaatggcggcctgtagtagaaaagctattattaatgtcttaccgactgagtacggtggtctccccggtaatccaatcctcatctcccgagggcctgattcccatggacacggatagtgaaagcgcttcccgattgcagatgatcctgaacgagatccagccaagggacaccaacgactactttaaccaggccaagatcctgaaggaacacgacagttttgacatgaaggatctgaatgcttctgtggttaacattgatacatctacggaaataaaaggtaaggaagtgaaaacgtgcgacgtcactgcccagatggtactggtttgttgttggaggtccatgaaggaggtagcattgctgctcggaatgctatgtcagctgctacctatgcagcccgtccctgaaagcagtgatggcctgctgacagtagaacaggtgaaggagataggggattactttaaacagcatctgctccaaagtcgtcataggggggctttcgagctcgcctacacaggctttgttaaacttacagaggttctcaaccggtgtcctaacgtatccctgcagaaactcccggagcagtggctgtggagtgttctggaagagatcaaatgttctgacccatcgtctaaactgtgcgcaacgcgcaggagcgctgggattccattctacatccaagccctcctggcttcagagcccaaaaaaggccgtatggacctgctcaaaatcactatgaaggaactcatttcactcgccggaccaacagacgacatacaatccactgtgccgcaggtccatgccctcaatatacttcgcgcactattccgggatacacgcttgggtgaaaatataatcccctacgtggccgacggtgctaaggccgctattctgggattcacttcgccggtatgggcagttcgcaattcttccaccctgctgttcagcgccctcatcacccggatctttggagtgaaacgggctaaggacgagcactctaagacaaaccggtgtggtcacagccctgtgtatcactcccgggaaatggccgcaagggccctggtgccctttgtgatgattgaccacatccccaataccatcaggacgctgctgtcgaccttgcccagttgcacagatcagtgcttcagacagaatcacatacacggaaccttgctgcaggtctttcacctgttacaggcttattctgactccaaacatggcacaaacagcgatttccaacacgagctgaccgacatcactgtgtgcaccaaggccaagctgtggctggccaagcggcagaacccttgtttagttactcgagcggtctacattgatatcctgttccttcttacttgctgcctcaatcgcagcgcaaaggacaatcagcccgtactcgaatcacttgggttttgggaagaagtacgtggcatcattagcggaagcgagttgatcaccgggttcccttgggcctttaaagtgcctgggctgccccagtaccttcaaagcttaacaagactggccatcgctgctgtgtgggctgccgcagccaaatctggcgagagagaaacaaacgtacccatctcattttcacagctgctcgagtcagcctttcccgaggtaaggtcgttgaccctggaggctctgttggaaaaatttctggctgctgccagtggactcggagagaaaggcgtgccccctctgctgtgcaacatgggggagaaatttcttctgctggctatgaaagagaaccaccctgagtgcttctgcaagattcttaagatactccactgtatggatcctggggaatggttgccgcagaccgaacattgcgtccatctgacgccaaaagaatttctgatttggacgatggacattgcatcgaacgagaggtccgagatccagtccgttgcccttagactcgccagcaaagtgatctctcaccatatgcagacctgtgtggaaaacagggaactcatcgctgctgaactgaaacaatgggtgcaactagtcatcctgtcatgtgaggatcaccttccaacagagagccgcttggctgtagtggaggtcctgacctccaccacacctttgttcctgaccaatcctcatccaatactggagttgcaggacacgttggccctgtggaaatgcgttcttacactgttacagagcgaagagcaggcggttcgggacgcagccactgagaccgtgaccactgctatgtctcaggagaatacctgccagagtaccgaatttgctttctgccaggtagacgcgtccatagccctggccctggctctggctgtgctgtgcgaccttctgcagcagtgggaccaactggccccagggctcccaattctgttaggatggttgcttggcgaaagcgatgatttggtggcatgcgtagagtcaatgcatcaggtggaagaggactacctctttgaaaaagcagaggtcaacttttgggcagagacactgattttcgtcaagtacctctgtaagcacctgttttgcctcctgagcaagtccggctggcgtcccccttcccctgaaatgttgtgccatctccagcggatggtgtctgaacagtgccatcttctgagtcagttttttagggagctgccacctgctgccgagttcgttaagactgtggaatttactaggctgagaatccaagaggagagaacactagcctgtctgaggctgctcgcattcctggaaggaaaggaaggagaagacaccctggttctgagtgtgtgggactcctatgccgagagcaggcagttaaccttaccccgaaccgaagccgcttgcta

SEQ ID NO: 286423 - DNA, 5894 bp, Artificial Sequence
  derived and/or modified sequence
gacccggtagtcgaccgtggaccgcgctgcgagcctcggagacgccgtagaaggagacctgcttccgggactggaccaggcgcctgcgactcttctcagacgccgacgtgcacgagtgactactattaattctatttaaaatgggtgtaaagaagaagaaagaaatgcaagttgctgcgctgaccatttgccatcaggaccttgaaactttgaaatcttttgctgatgtggaagggaaaaatctagcttctttgctgttacattgtgtgcaactcacggatggagtgtcacaaatccattatattaaacagattgtgcctctgctggagaaagcagataaaaatggcatgtgtgatcccactattcaaagttgtttggatatcttagcaggcatttatctttctttgagtctaaagaatcccttgaagaaagtattggcaagctcactaaatagcctgcctgatttttttctacctgaggctatgcaccgttttacttctcgtcttcaggaagaattgaatactactgacttatactcttacaggaaagttactgacaatatttcttcctgtatggagaactttaacttgggtagagcaagtgttaataatctgcttaaaaatgtgcttcattttctgcagaagagtttaattgaaatcctggaagaaaatagaaaatgtgctggaaatcatattattcaaacacagttgatgaatgacttactggtaggcattagagtttcaatgatgttagtacagaaagtacaagatttccagggaaatctttggaagacttccgattctcccatatggcaaaatatgtgtggattgctgagtatttttaccaaggttttaagcgatgatgatctgttacagactgtacagagcacatctggattagctattattctttttattaagactatgtttcacccgtctgaaaagattcctcatttgattagcagtgtgctgcttcgttcagtggactgcaccagtgtccccgagtggtttatgagcagctgcaggagcctctgttgtggtgacatctctcagtcagctgtcttattcctctgtcaggggacacttgccatgttggactggcagaacggaagcatgggtcggagtggggaggccctgctcttggatactgcacatgttttgttcaccttgagttcacagattaaagagccaacgctggaaatgtttctgtctagaatcttagcatcctggactaattcagccatacaagtccttgaatcaagttccccgagcctaacggacagcctgaatgggaattcaagtatagttgggagacttttggaatatgtctatacccattgggaacatccattggatgctctgagacaccaaaccaaaatcatgttcaaaaaccttctccaaatgcaccggctcactgtggaaggtgcagatttcgtccctgatcctttctttgtggaattgactgagagtcttttacgattggaatggcatattaaaggaaagtacacgtgccttggttgtttggtagagtgcataggagttgaacatattttggctatagataaaactattccatctcaaatcttagaggtgatgggagaccagtcattggtaccttatgcaagtgacctcttggaaaccatgtttagaaatcataagagtcatttgaaatcccagactgctgagagttcttggattgaccagtggcatgagacttgggtttctcctctcctttttatattgtgtgaaggaaacttggatcaaaaatcttacgtgattgattattacttgccaaaattattaagttacagccctgaaagcttacagtacatggtaaagattcttcagacttctattgatgctaaaactggacaagagcaatctttcccatccttagggtcttgtaatagcaggggggctctgggagctttgatggcatgtctgcgaatagctagagctcatggacatcttcagtctgcaactgatacctgggagaacctcgtgtctgatgcaagaataaagcaaggcttaattcatcagcattgccaagtaaggatagatacattaggcttgctttgtgaaagtaatcggagcacagaaattgtttccatggaagaaatgcagtggattcagttctttattacatacaatcttaacagccagtctccaggagtgcggcaacagatctgttctcttcttaaaaagaagttgttttgtaggatacaggaaagttctcaggtactttataaattggagcagagtaaatccaaacgtgaaccagagaatgagttaaccaaacagcacccttctgtttctttacagcagtataagaatttcatgtcatccatttgtaacagtctttttgaagcattgtttcctggatcttcctactcgactagattttcagctttaaccattttaggttcaatagctgaagtttttcatgtcccagaaggcagaatttatacagtatatcagctgagtcatgatattgatgttggtcgtttccaaacactaatggaatgttttaccagcacttttgaagacgtgaaaattttagcatttgatcttctgatgaagttatcaaaaacagctgtacattttcaggattcggggaaactgcaaggcttatttcaggcagcattggagctcagcacaagcaccaaaccatacgactgtgtgacagcttcctacctgctgaacttcttaatctggcaggatgctctaccgtcatccttgtctgcctacttaactcagcaagttgcatgtgataatggagataggcctgctgctgtggtggaaaggaacacattaatggttatcaaatgcttgatggaaaatcttgaggaagaagtatctcaggctgaaaattctctgcttcaggcagcagcagcatttccaatgtatgggcgagtccactgtataacaggagctttgcagaagttatctctaaacagcctgcagttggtgagcgagtggagacctgtggtagagaagctccttttgatgtcctacaggctttccactgtggtgtctccagtcattcagagctcatcccctgaaggcctcatcccaatggacactgattcagagtcagcaagccgcttacagatgattctgaatgagattcagcctcgagatactaatgattattttaaccaagccaaaatattgaaagaacatgatagctttgatatgaaggacttgaatgctagtgtggtgaatattgatacttctacagaaatcaaaggtaaagaagtaaaaacatgtgatgtaactgcgcagatggtgctggtatgttgttggagaagtatgaaggaagttgctttacttttaggcatgttgtgccagcttctgcccatgcagcctgtgccagaatcttctgatggattattgacggtggagcaggtaaaagaaataggagattactttaaacaacaccttttgcagtccaggcacagaggagcatttgaattggcttatactggttttgtgaaactcactgaagtactaaacaggtgcccaaatgtgagtctgcaaaagctgccagaacagtggctatggagtgttttagaggaaattaaatgcagtgatccttcatctaaactctgtgctacaaggcgcagtgctggaattcctttctacatacaggcactgttggcatctgaaccaaagaaaggcagaatggatttgttgaaaataacaatgaaagagttaatctctttggctgggcctacagatgacatacagagtacagtcccccaggttcatgctttaaatatccttagagcattgttcagagatacgcgcctgggagaaaatattattccttatgttgctgatggagctaaggctgcaattctgggttttacatcaccggtctgggcagtgcgaaattcatccacacttctctttagtgccttgatcacaagaatttttggagttaaaagggcaaaggatgaacattccaaaacaaataggtgtggtcactcacctgtctaccactcccgtgaaatggcagctcgtgccttggtcccatttgttatgatagatcacattcctaataccattcgaactctgttgtccacactccccagctgcactgaccagtgtttccggcaaaaccacattcatgggacacttctccaggtttttcatttgttgcaagcctactcagactccaaacacggaacgaattcagacttccagcacgagctgactgacatcactgtttgtaccaaagccaaactctggctggccaagaggcaaaatccatgtttggtgaccagagctgtatatattgatattctcttcctattgacttgctgcctcaacagatctgcaaaggacaaccagccagttctggagagtcttggcttctgggaggaagtcagagggattatctcaggatcagagctgataacgggattcccttgggccttcaaggtgccaggcctgccccagtacctccagagcctcaccagactagccattgctgcagtgtgggccgcggcagccaagagtggagagcgggagacgaatgtccccatctctttctctcagctgttagaatctgccttccctgaagtgcgctcactaacactggaagccctcttggaaaagttcttagcagcagcctctggacttggagagaagggcgtgccacccttgctgtgcaacatgggagagaagttcttattgttggccatgaaggaaaatcacccagaatgcttctgcaagatactgaaaattctccactgcatggaccctggtgagtggcttccccagacggagcactgtgtccatctgaccccaaaggagttcttgatctggacgatggatattgcttccaatgaaagatctgaaattcagagtgtagctctgagacttgcttccaaagtcatttcccaccacatgcagacatgtgtggagaacagggaattgatagctgctgagctgaagcagtgggttcagctggtcatcttgtcatgtgaagaccatcttcctacagagtctaggctggccgtcgttgaagtcctcaccagtactacaccacttttcctcaccaacccccatcctattcttgagttgcaggatacacttgctctctggaagtgtgtccttacccttctgcagagtgaggagcaagctgttagagatgcagccacggaaaccgtgacaactgccatgtcacaagaaaatacctgccagtcaacagagtttgccttctgccaggtggatgcctccatcgctctggccctggccctggccgtcctgtgtgatctgctccagcagtgggaccagttggcccctggactgcccatcctgctgggatggctgttgggagagagtgatgacctcgtggcctgtgtggagagcatgcatcaggtggaagaagactacctgtttgaaaaagcagaagtcaacttttgggccgagaccctgatctttgtgaaatacctctgcaagcacctcttctgtctcctctcaaagtccggctggcgtcccccaagccctgagatgctctgtcaccttcaaaggatggtgtcagagcagtgccacctcctgtctcagttcttcagagagcttccaccagctgctgagtttgtgaagacagtggagttcacaagactacgcattcaagaggaaaggactttggcttgcttgaggctgctggcctttttggaaggaaaggaaggggaagacaccctagttctcagtgtttgggactcttatgcagaatcgaggcagttaactcttccaagaacagaagcggcatgttgaagaaaatctgggggattgggatgggggtatgtgtggatttttcctccactaaatctgcaggaaacatgttgaacataaattcaaaaattttatcccattcatgcctcccct

SEQ ID NO: 286424 - protein, 1097 aa, Artificial Sequence
  derived and/or modified sequence
MSSCRSLCCGDISQSAVLFLCQGTLAMLDWQNGSMGRSGEALLLDTAHVLFTLSSQIKEPTLEMFLSRILASWTNSAIQVLESSSPSLTDSLNGNSSIVGRLLEYVYTHWEHPLDALRHQTKIMFKNLLQMHRLTVEGADFVPDPFFVELTESLLRLEWHIKGKYTCLGCLVECIGVEHILAIDKTIPSQILEVMGDQSLVPYASDLLETMFRNHKSHLKSQTAESSWIDQWHETWVSPLLFILCEGNLDQKSYVIDYYLPKLLSYSPESLQYMVKILQTSIDAKTGQEQSFPSLGSCNSRGALGALMACLRIARAHGHLQSATDTWENLVSDARIKQGLIHQHCQVRIDTLGLLCESNRSTEIVSMEEMQWIQFFITYNLNSQSPGVRQQICSLLKKLFCRIQESSQVLYKLEQSKSKREPENELTKQHPSVSLQQYKNFMSSICNSLFEALFPGSSYSTRFSALTILGSIAEVFHVPEGRIYTVYQLSHDIDVGRFQTLMECFTSTFEDVKILAFDLLMKLSKTAVHFQDSGKLQGLFQAALELSTSTKPYDCVTASYLLNFLIWQDALPSSLSAYLTQQVACDNGDRPAAVVERNTLMVIKCLMENLEEEVSQAENSLLQAAAAFPMYGRVHCITGALQKLSLNSLQLVSEWRPVVEKLLLMSYRLSTVVSPVIQSSSPEGLIPMDTDSESASRLQMILNEIQPRDTNDYFNQAKILKEHDSFDMKDLNASVVNIDTSTEIKGKEVKTCDVTAQMVLVCCWRSMKEVALLLGMLCQLLPMQPVPESSDGLLTVEQVKEIGDYFKQHLLQSRHRGAFELAYTGFVKLTEVLNRCPNVSLQKLPEQWLWSVLEEIKCSDPSSKLCATRRSAGIPFYIQALLASEPKKGRMDLLKITMKELISLAGPTDDIQSTVPQVHALNILRALFRDTRLGENIIPYVADGAKAAILGFTSPVWAVRNSSTLLFSALITRIFGVKRAKDEHSKTNRMTGREFFSRFPELYPFLLKQLETVANTVDSDMGEPNRHPSMFLLLLVLERLYASPMDGTSSALSMGPFVPFIMRVLLCCPGWSAVARSQLTATSTSWVQAILLPQPPE

SEQ ID NO: 286425 - protein, 412 aa, Artificial Sequence
  derived and/or modified sequence
MDTQGAFDSQSTIKDCATVFALSTMTSSVQVYNLSQNIQEDDLQHLQLFTEYGRLAMEEIYQKPFQTLMFLIRDWSYPYEHSYGLEGGKQFLEKRLQVKQNQHEELQNVRKHIHNCFSNLGCFLLPHPGLKVATNPSFDGRLKDIDEDFKRELRNLVPLLLAPENLVEKEISGSKVTCRDLVEYFKAYIKIYQGEELPHPKSMLQATAEANNLAAVAGARDTYCKSMEQVCGGDKPYIAPSDLERKHLDLKEVAIKQFRSVKKMGGDEFCRRYQDQLEAEIEETYANFIKHNDGKNIFYAARTPATLFAVMFAMYIISGLTGFIGLNSIAVLCNLVMGLALIFLCTWAYVKYSGEFREIGTVIDQIAETLWEQVLKPLGDNLMEENIRQSVTNSIKAGLTDQVSHHARLKTD

SEQ ID NO: 286426 - DNA, 222 bp, Artificial Sequence
  derived and/or modified sequence
atgtacaacatgagaagactgagcctgagccccaccttcagcatgggcttccacctgctggtgaccgtgagcctgctgttcagccacgtggaccacgtgatcgccgagaccgagatggagggcgagggcaacgagaccggcgagtgcaccggcagctactactgcaagaagggcgtgatcctgcccatctgggagccccaggaccccagcttcggcgactag

SEQ ID NO: 286427 - DNA, 264 bp, Artificial Sequence
  derived and/or modified sequence
atgtacaacatgagaagactgagcctgagccccaccttcagcatgggcttccacctgctggtgaccgtgagcctgctgttcagccacgtggaccacgtgatcgccgagaccgagatggagggcgagggcaacgagaccggcgagtgcaccggcagctactactgcaagaagggcgtgatcctgcccatctgggagccccaggaccccagcttcggcgacaagatcgccagagccaccgtgtacttcgtggccatggtgtactag

SEQ ID NO: 286428 - DNA, 417 bp, Artificial Sequence
  derived and/or modified sequence
atgtacaacatgagaagactgagcctgagccccaccttcagcatgggcttccacctgctggtgaccgtgagcctgctgttcagccacgtggaccacgtgatcgccgagaccgagatggagggcgagggcaacgagaccggcgagtgcaccggcagctactactgcaagaagggcgtgatcctgcccatctgggagccccaggaccccagcttcggcgacaagatcgccagagccaccgtgtacttcgtggccatggtgtacatgttcctgggcgtgagcatcatcgccgacagattcatgagcagcatcgaggtgatcaccagccaggagaaggagatcaccatcaagaagcccaacggcgagaccaccaagaccaccgtgagaatctggaacgagaccgtgagcaacctgacctag

SEQ ID NO: 286429 - DNA, 222 bp, Artificial Sequence
  derived and/or modified sequence
atgtacaacatgagacgactctccttatctcccacttttagcatggggttccacctgcttgtcaccgtctcactgctcttcagccatgttgatcatgttattgctgagaccgagatggaaggagaagggaacgagactggagagtgtaccggctcctactattgtaagaagggagtaatcctgccaatttgggagcctcaggatccatccttcggcgattag

SEQ ID NO: 286430 - DNA, 264 bp, Artificial Sequence
  derived and/or modified sequence
atgtacaacatgcgtcgtctgtcactatcccccaccttcagtatggggtttcatctgctggtgacagtcagcctgctattttcacacgtggaccacgtaattgccgagacggaaatggaaggagagggaaacgaaacaggtgaatgcaccggaagctactactgcaaaaaaggggtaattttgcccatttgggaaccccaggacccatctttcggggataagattgcccgagccacagtgtacttcgtggctatggtctactag

SEQ ID NO: 286431 - DNA, 264 bp, Artificial Sequence
  derived and/or modified sequence
atgtacaacatgcgtagactatcgctcagcccgactttcagcatggggttccatcttttagtgacagtgtccctactgttttctcacgttgaccacgtcatcgccgaaacagagatggagggcgaaggcaatgagaccggggaatgcacgggatcttactactgtaaaaagggagtaatcctgccgatctgggaaccccaggacccgagctttggggacaaaatagccagggcaacagtgtattttgtcgccatggtctactag

SEQ ID NO: 286432 - DNA, 417 bp, Artificial Sequence
  derived and/or modified sequence
atgtacaacatgaggagactgtccttgtccccaacgttctccatgggcttccacttgcttgtcactgtgtcactgctcttttcacatgtggatcatgttattgctgaaaccgaaatggagggagaaggaaatgagacgggcgagtgcaccgggtcctattattgtaagaagggggttattctgccaatatgggagccacaagacccttcttttggcgataagatcgcccgcgccactgtgtactttgtggctatggtgtatatgttcctcggggtgagcattatcgccgaccggttcatgagtagtatcgaggttatcacttctcaggagaaggaaattaccattaagaagcctaatggggaaactaccaaaactactgttcgaatttggaacgaaacagtaagtaacctgacctag

SEQ ID NO: 286433 - DNA, 222 bp, Artificial Sequence
  derived and/or modified sequence
atgtacaacatgaggcggctgagcctgagccccaccttctccatgggcttccacctgctggtgacagtgtccctgctcttcagccacgtggaccacgtgattgctgagacagagatggagggggagggcaatgagaccggggagtgcaccggcagctactactgcaagaagggcgtcatcctgcccatctgggagccccaggaccccagctttggagactag

SEQ ID NO: 286434 - DNA, 264 bp, Artificial Sequence
  derived and/or modified sequence
atgtacaacatgaggcggctgagcctgagccccaccttctccatgggcttccacctgctggtgacagtgtccctgctcttcagccacgtggaccacgtgattgctgagacagagatggagggggagggcaatgagaccggggagtgcaccggcagctactactgcaagaagggcgtcatcctgcccatctgggagccccaggaccccagctttggagacaagatcgcccgggccaccgtgtactttgtggccatggtgtactag

SEQ ID NO: 286435 - DNA, 417 bp, Artificial Sequence
  derived and/or modified sequence
atgtacaacatgaggcggctgagcctgagccccaccttctccatgggcttccacctgctggtgacagtgtccctgctcttcagccacgtggaccacgtgattgctgagacagagatggagggggagggcaatgagaccggggagtgcaccggcagctactactgcaagaagggcgtcatcctgcccatctgggagccccaggaccccagctttggagacaagatcgcccgggccaccgtgtactttgtggccatggtgtacatgttcctgggcgtgtccatcatcgctgaccgcttcatgagcagcattgaagtcatcaccagccaggagaaggagatcaccatcaagaagcccaatggagagaccaccaagaccaccgtgcgcatctggaatgaaacagtgagcaacctgacctag

SEQ ID NO: 286436 - DNA, 222 bp, Artificial Sequence
  derived and/or modified sequence
atgtacaacatgcggcggctgagcctgagccccaccttcagcatgggattccacctccttgtgactgtatcattacttttttcccacgtggaccacgtcattgccgaaacagaaatggagggtgagggaaacgaaacgggagagtgcacagggtcctattactgtaaaaaaggtgtgatcctgcccatttgggaaccccaggacccgtcattcggtgactag

SEQ ID NO: 286437 - DNA, 264 bp, Artificial Sequence
  derived and/or modified sequence
atgtacaacatgcggcggctgagcctgagccccaccttcagcatgggatttcacctgctcgtgacggtgagcctgttatttagtcatgtggaccacgtgatcgctgaaaccgaaatggagggcgagggaaatgagacaggggagtgtaccggaagctactactgtaaaaagggtgtcattctccctatttgggagccacaagaccccagcttcggggacaaaattgcgagagcaaccgtttatttcgtagccatggtttactag

SEQ ID NO: 286438 - DNA, 264 bp, Artificial Sequence
  derived and/or modified sequence
atgtacaacatgcggcggctgagcctgagccccaccttcagcatgggcttccacctccttgtaaccgtgtctctgctcttctcccatgtcgaccatgtgatcgcagagactgaaatggaaggtgaaggcaatgaaaccggggagtgtaccggatcttactattgtaagaagggtgtgattcttcccatatgggagcctcaggacccttcctttggcgataagattgctcgcgctaccgtgtatttcgttgccatggtttactag

SEQ ID NO: 286439 - DNA, 417 bp, Artificial Sequence
  derived and/or modified sequence
atgtacaacatgcggcggctgagcctgagccccaccttcagcatggggtttcacttattggtgaccgtttccttattgttcagccatgttgatcacgtaattgccgaaacagaaatggagggcgaaggcaacgaaaccggcgaatgtactggatcatactactgtaagaaaggcgtcatcctacctatctgggaacctcaggaccccagctttggggataagatagcaagagcgactgtctacttcgtggcaatggtgtacatgtttttaggcgttagcattatcgcagaccgctttatgagcagcattgaggtcattacttcccaggagaaggaaatcacgatcaaaaagcctaacggagagacgacaaagacgaccgtgcggatctggaatgagactgtctccaacttgacctag

SEQ ID NO: 286440 - DNA, 222 bp, Artificial Sequence
  derived and/or modified sequence
atgtataatatgagacgactctccctctctcctaccttttccatgggcttccatctactcgtcactgtaagtctgctctttagccatgtagaccacgtcattgcagaaactgagatggagggagaaggtaatgagacaggggaatgcaccggaagctactattgcaagaaaggcgttatcctcccaatctgggaaccccaggatccaagcttcggggactag

SEQ ID NO: 286441 - DNA, 264 bp, Artificial Sequence
  derived and/or modified sequence
atgtacaacatgcggagactcagcctgtctcctaccttctcaatgggttttcatttgctagtgactgtatctctcttgttctctcatgtggaccatgtcatcgccgagacggagatggagggagagggaaatgaaactggtgagtgtacaggttcctactattgtaaaaaaggtgtcatcctgccgatttgggagcctcaggatcccagtttcggcgataaaatcgcaagggcaaccgtctactttgttgctatggtgtactag

SEQ ID NO: 286442 - DNA, 264 bp, Artificial Sequence
  derived and/or modified sequence
atgtacaatatgcggcgtctcagcctgtctccaacattctctatggggtttcacttacttgtcaccgtgagcctgctgttttctcacgtcgaccacgtgatcgccgagaccgaaatggagggtgagggaaatgagaccggggagtgtactgggagctactattgcaagaagggtgtaatcctaccgatctgggagccacaggatccctctttcggcgacaagatagccagggcaacagtatacttcgtggcgatggtatactag

SEQ ID NO: 286443 - DNA, 417 bp, Artificial Sequence
  derived and/or modified sequence
atgtacaacatgagacggttgagcctgagccccaccttttccatggggttccatttgctggtgacagtttcattgctcttttcacatgtggaccatgttatagcggagactgagatggagggagaaggcaacgaaacaggggagtgtaccggctcttattactgcaagaaaggagtcatactgcccatctgggagcctcaggatccaagttttggtgacaagatagcacgcgcaacagtgtattttgtggcaatggtttatatgtttttgggcgtatccatcattgctgatcggtttatgtcgagtattgaagttataacaagtcaagagaaagaaatcacaataaaaaaacccaacggcgagaccaccaaaaccaccgtgcggatatggaacgagactgtgtccaacctcacctag

SEQ ID NO: 286444 - DNA, 583 bp, Artificial Sequence
  derived and/or modified sequence
agcgacctcttcctgatcgggagctgtttaaaaggagggagtgcgccgtattttctactagcgtggaggaacggaggaagaatccattcacactccccaaaccagggatgtcatggtctagaacacctatgctgaagtacaaggctgagcaagaaagatcactccactgcaactgagcaaagtgctgaaggagttgaaaggaagaagagaacattggacgtggtttcacggaggaggaagcattttaatttattcagaaagagtgaaaaggattttgaaagcaaataaggctagccacttttgaaacatgtcaaagagccccagcttatttacgacaagtaggttgtgacagttggaagtgtcatgtacaacatgcggcgattaagtctttcacccaccttttcaatgggatttcatctgttagttactgtgagtctcttattttcccatgtggaccatgtaattgctgagacagaaatggaaggagaaggaaatgaaactggtgaatgtactggatcatattactgtaagaaaggggtgattttgcccatttgggaaccccaagacccttcttttggggaca

SEQ ID NO: 286445 - DNA, 561 bp, Artificial Sequence
  derived and/or modified sequence
ctttctggtaaatttagagaaggcatcatactgggatcttttttcacatccagcccatgcggactgagcagccaaagcttgacagaggtccctccttctcccaccttccccaagtagctgctcctgacccccccacacaccttggcaaacgacaccagtggccgatagcaactggtgttttaaaaatactaatttggagccccatttgagacctacaacgggagagtctgcatcagattcggcctcagattctacagcatctgactacattcccagtaggttgtgacagttggaagtgtcatgtacaacatgcggcgattaagtctttcacccaccttttcaatgggatttcatctgttagttactgtgagtctcttattttcccatgtggaccatgtaattgctgagacagaaatggaaggagaaggaaatgaaactggtgaatgtactggatcatattactgtaagaaaggggtgattttgcccatttgggaaccccaagacccttcttttggggacaaaattgctagagctactgtgtattttgtggccatggtctac

SEQ ID NO: 286446 - DNA, 563 bp, Artificial Sequence
  derived and/or modified sequence
atcagtcgtggtgactgccctggttgcactgtaagtatggggggacgtctccacgaaaaaaaactaactttctgccttgtgctctgcaggtccctccttctcccaccttccccaagtagctgctcctgacccccccacacaccttggcaaacgacaccagtggccgatagcaactggtgttttaaaaatactaatttggagccccatttgagacctacaacgggagagtctgcatcagattcggcctcagattctacagcatctgactacattcccagtaggttgtgacagttggaagtgtcatgtacaacatgcggcgattaagtctttcacccaccttttcaatgggatttcatctgttagttactgtgagtctcttattttcccatgtggaccatgtaattgctgagacagaaatggaaggagaaggaaatgaaactggtgaatgtactggatcatattactgtaagaaaggggtgattttgcccatttgggaaccccaagacccttcttttggggacaaaattgctagagctactgtgtattttgtggccatggtctac

SEQ ID NO: 286447 - protein, 2364 aa, Artificial Sequence
  derived and/or modified sequence
MTTTVATDYDNIEIQQQYSDVNNRWDVDDWDNENSSARLFERSRIKALADEREAVQKKTFTKWVNSHLARVSCRITDLYTDLRDGRMLIKLLEVLSGERLPKPTKGRMRIHCLENVDKALQFLKEQRVHLENMGSHDIVDGNHRLTLGLIWTIILRFQIQDISVETEDNKEKKSAKDALLLWCQMKTAGYPNVNIHNFTTSWRDGMAFNALIHKHRPDLIDFDKLKKSNAHYNLQNAFNLAEQHLGLTKLLDPEDISVDHPDEKSIITYVVTYYHYFSKMKALAVEGKRIGKVLDNAIETEKMIEKYESLASDLLEWIEQTIIILNNRKFANSLVGVQQQLQAFNTYRTVEKPPKFTEKGNLEVLLFTIQSKMRANNQKVYMPREGKLISDINKAWERLEKAEHERELALRNELIRQEKLEQLARRFDRKAAMRETWLSENQRLVSQDNFGFDLPAVEAATKKHEAIETDIAAYEERVQAVVAVARELEAENYHDIKRITARKDNVIRLWEYLLELLRARRQRLEMNLGLQKIFQEMLYIMDWMDEMKVLVLSQDYGKHLLGVEDLLQKHTLVEADIGIQAERVRGVNASAQKFATDGEGYKPCDPQVIRDRVAHMEFCYQELCQLAAERRARLEESRRLWKFFWEMAEEEGWIREKEKILSSDDYGKDLTSVMRLLSKHRAFEDEMSGRSGHFEQAIKEGEDMIAEEHFGSEKIRERIIYIREQWANLEQLSAIRKKRLEEASLLHQFQADADDIDAWMLDILKIVSSSDVGHDEYSTQSLVKKHKDVAEEIANYRPTLDTLHEQASALPQEHAESPDVRGRLSGIEERYKEVAELTRLRKQALQDTLALYKMFSEADACELWIDEKEQWLNNMQIPEKLEDLEVIQHRFESLEPEMNNQASRVAVVNQIARQLMHSGHPSEKEIKAQQDKLNTRWSQFRELVDRKKDALLSALSIQNYHLECNETKSWIREKTKVIESTQDLGNDLAGVMALQRKLTGMERDLVAIEAKLSDLQKEAEKLESEHPDQAQAILSRLAEISDVWEEMKTTLKNREASLGEASKLQQFLRDLDDFQSWLSRTQTAIASEDMPNTLTEAEKLLTQHENIKNEIDNYEEDYQKMRDMGEMVTQGQTDAQYMFLRQRLQALDTGWNELHKMWENRQNLLSQSHAYQQFLRDTKQAEAFLNNQEYVLAHTEMPTTLEGAEAAIKKQEDFMTTMDANEEKINAVVETGRRLVSDGNINSDRIQEKVDSIDDRHRKNRETASELLMRLKDNRDLQKFLQDCQELSLWINEKMLTAQDMSYDEARNLHSKWLKHQAFMAELASNKEWLDKIEKEGMQLISEKPETEAVVKEKLTGLHKMWEVLESTTQTKAQRLFDANKAELFTQSCADLDKWLHGLESQIQSDDYGKDLTSVNILLKKQQMLENQMEVRKKEIEELQSQAQALSQEGKSTDEVDSKRLTVQTKFMELLEPLNERKHNLLASKEIHQFNRDVEDEILWVGERMPLATSTDHGHNLQTVQLLIKKNQTLQKEIQGHQPRIDDIFERSQNIVTDSSSLSAEAIRQRLADLKQLWGLLIEETEKRHRRLEEAHRAQQYYFDAAEAEAWMSEQELYMMSEEKAKDEQSAVSMLKKHQILEQAVEDYAETVHQLSKTSRALVADSHPESERISMRQSKVDKLYAGLKDLAEERRGKLDERHRLFQLNREVDDLEQWIAEREVVAGSHELGQDYEHVTMLQERFREFARDTGNIGQERVDTVNHLADELINSGHSDAATIAEWKDGLNEAWADLLELIDTRTQILAASYELHKFYHDAKEIFGRIQDKHKKLPEELGRDQNTVETLQRMHTTFEHDIQALGTQVRQLQEDAARLQAAYAGDKADDIQKRENEVLEAWKSLLDACESRRVRLVDTGDKFRFFSMVRDLMLWMEDVIRQIEAQEKPRDVSSVELLMNNHQGIKAEIDARNDSFTTCIELGKSLLARKHYASEEIKEKLLQLTEKRKEMIDKWEDRWEWLRLILEVHQFSRDASVAEAWLLGQEPYLSSREIGQSVDEVEKLIKRHEAFEKSAATWDERFSALERLTTLELLEVRRQQEEEERKRRPPSPEPSTKVSEEAESQQQWDTSKGEQVSQNGLPAEQGSPRMAETVDTSEMVNGATEQRTSSKESSPIPSPTSDRKAKTALPAQSAATLPARTQETPSAQMEGFLNRKHEWEAHNKKASSRSWHNVYCVINNQEMGFYKDAKTAASGIPYHSEVPVSLKEAVCEVALDYKKKKHVFKLRLNDGNEYLFQAKDDEEMNTWIQAISSAISSDKHEVSASTQSTPASSRAQTLPTSVVTITSESSPGKREKDKEKDKEKRFSLFGKKK

SEQ ID NO: 286448 - protein, 690 aa, Artificial Sequence
  derived and/or modified sequence
MTTTVATDYDNIEIQQQYSDVNNRWDVDDWDNENSSARLFERSRIKALADEREAVQKKTFTKWVNSHLARVSCRITDLYTDLRDGRMLIKLLEVLSGERLPKPTKGRMRIHCLENVDKALQFLKEQRVHLENMGSHDIVDGNHRLTLGLIWTIILRFQIQDISVETEDNKEKKSAKDALLLWCQMKTAGYPNVNIHNFTTSWRDGMAFNALIHKHRPDLIDFDKLKKSNAHYNLQNAFNLAEQHLGLTKLLDPEDISVDHPDEKSIITYVVTYYHYFSKMKALAVEGKRIGKVLDNAIETEKMIEKYESLASDLLEWIEQTIIILNNRKFANSLVGVQQQLQAFNTYRTVEKPPKFTEKGNLEVLLFTIQSKMRANNQKVYMPREGKLISDINKAWERLEKAEHERELALRNELIRQEKLEQLARRFDRKAAMRETWLSENQRLVSQDNFGFDLPAVEAATKKHEAIETDIAAYEERVQAVVAVARELEAENYHDIKRITARKDNVIRLWEYLLELLRARRQRLEMNLGLQKIFQEMLYIMDWMDEMKVLVLSQDYGKHLLGVEDLLQKHTLVEADIGIQAERVRGVNASAQKFATDGEGYKPCDPQVIRDRVAHMEFCYQELCQLAAERRARLEESRRLWKFFWEMAEEEGWIREKEKILSSDDYGKDLTSVMRLLSKHRAFEDEMSGR

SEQ ID NO: 286449 - DNA, 7095 bp, Artificial Sequence
  derived and/or modified sequence
atgaccaccaccgtggccaccgactacgacaacatcgagatccagcagcagtacagcgacgtgaacaacagatgggacgtggacgactgggacaacgagaacagcagcgccagactgttcgagagaagcagaatcaaggccctggccgacgagagagaggccgtgcagaagaagaccttcaccaagtgggtgaacagccacctggccagagtgagctgcagaatcaccgacctgtacaccgacctgagagacggcagaatgctgatcaagctgctggaggtgctgagcggcgagagactgcccaagcccaccaagggcagaatgagaatccactgcctggagaacgtggacaaggccctgcagttcctgaaggagcagagagtgcacctggagaacatgggcagccacgacatcgtggacggcaaccacagactgaccctgggcctgatctggaccatcatcctgagattccagatccaggacatcagcgtggagaccgaggacaacaaggagaagaagagcgccaaggacgccctgctgctgtggtgccagatgaagaccgccggctaccccaacgtgaacatccacaacttcaccaccagctggagagacggcatggccttcaacgccctgatccacaagcacagacccgacctgatcgacttcgacaagctgaagaagagcaacgcccactacaacctgcagaacgccttcaacctggccgagcagcacctgggcctgaccaagctgctggaccccgaggacatcagcgtggaccaccccgacgagaagagcatcatcacctacgtggtgacctactaccactacttcagcaagatgaaggccctggccgtggagggcaagagaatcggcaaggtgctggacaacgccatcgagaccgagaagatgatcgagaagtacgagagcctggccagcgacctgctggagtggatcgagcagaccatcatcatcctgaacaacagaaagttcgccaacagcctggtgggcgtgcagcagcagctgcaggccttcaacacctacagaaccgtggagaagccccccaagttcaccgagaagggcaacctggaggtgctgctgttcaccatccagagcaagatgagagccaacaaccagaaggtgtacatgcccagagagggcaagctgatcagcgacatcaacaaggcctgggagagactggagaaggccgagcacgagagagagctggccctgagaaacgagctgatcagacaggagaagctggagcagctggccagaagattcgacagaaaggccgccatgagagagacctggctgagcgagaaccagagactggtgagccaggacaacttcggcttcgacctgcccgccgtggaggccgccaccaagaagcacgaggccatcgagaccgacatcgccgcctacgaggagagagtgcaggccgtggtggccgtggccagagagctggaggccgagaactaccacgacatcaagagaatcaccgccagaaaggacaacgtgatcagactgtgggagtacctgctggagctgctgagagccagaagacagagactggagatgaacctgggcctgcagaagatcttccaggagatgctgtacatcatggactggatggacgagatgaaggtgctggtgctgagccaggactacggcaagcacctgctgggcgtggaggacctgctgcagaagcacaccctggtggaggccgacatcggcatccaggccgagagagtgagaggcgtgaacgccagcgcccagaagttcgccaccgacggcgagggctacaagccctgcgacccccaggtgatcagagacagagtggcccacatggagttctgctaccaggagctgtgccagctggccgccgagagaagagccagactggaggagagcagaagactgtggaagttcttctgggagatggccgaggaggagggctggatcagagagaaggagaagatcctgagcagcgacgactacggcaaggacctgaccagcgtgatgagactgctgagcaagcacagagccttcgaggacgagatgagcggcagaagcggccacttcgagcaggccatcaaggagggcgaggacatgatcgccgaggagcacttcggcagcgagaagatcagagagagaatcatctacatcagagagcagtgggccaacctggagcagctgagcgccatcagaaagaagagactggaggaggccagcctgctgcaccagttccaggccgacgccgacgacatcgacgcctggatgctggacatcctgaagatcgtgagcagcagcgacgtgggccacgacgagtacagcacccagagcctggtgaagaagcacaaggacgtggccgaggagatcgccaactacagacccaccctggacaccctgcacgagcaggccagcgccctgccccaggagcacgccgagagccccgacgtgagaggcagactgagcggcatcgaggagagatacaaggaggtggccgagctgaccagactgagaaagcaggccctgcaggacaccctggccctgtacaagatgttcagcgaggccgacgcctgcgagctgtggatcgacgagaaggagcagtggctgaacaacatgcagatccccgagaagctggaggacctggaggtgatccagcacagattcgagagcctggagcccgagatgaacaaccaggccagcagagtggccgtggtgaaccagatcgccagacagctgatgcacagcggccaccccagcgagaaggagatcaaggcccagcaggacaagctgaacaccagatggagccagttcagagagctggtggacagaaagaaggacgccctgctgagcgccctgagcatccagaactaccacctggagtgcaacgagaccaagagctggatcagagagaagaccaaggtgatcgagagcacccaggacctgggcaacgacctggccggcgtgatggccctgcagagaaagctgaccggcatggagagagacctggtggccatcgaggccaagctgagcgacctgcagaaggaggccgagaagctggagagcgagcaccccgaccaggcccaggccatcctgagcagactggccgagatcagcgacgtgtgggaggagatgaagaccaccctgaagaacagagaggccagcctgggcgaggccagcaagctgcagcagttcctgagagacctggacgacttccagagctggctgagcagaacccagaccgccatcgccagcgaggacatgcccaacaccctgaccgaggccgagaagctgctgacccagcacgagaacatcaagaacgagatcgacaactacgaggaggactaccagaagatgagagacatgggcgagatggtgacccagggccagaccgacgcccagtacatgttcctgagacagagactgcaggccctggacaccggctggaacgagctgcacaagatgtgggagaacagacagaacctgctgagccagagccacgcctaccagcagttcctgagagacaccaagcaggccgaggccttcctgaacaaccaggagtacgtgctggcccacaccgagatgcccaccaccctggagggcgccgaggccgccatcaagaagcaggaggacttcatgaccaccatggacgccaacgaggagaagatcaacgccgtggtggagaccggcagaagactggtgagcgacggcaacatcaacagcgacagaatccaggagaaggtggacagcatcgacgacagacacagaaagaacagagagaccgccagcgagctgctgatgagactgaaggacaacagagacctgcagaagttcctgcaggactgccaggagctgagcctgtggatcaacgagaagatgctgaccgcccaggacatgagctacgacgaggccagaaacctgcacagcaagtggctgaagcaccaggccttcatggccgagctggccagcaacaaggagtggctggacaagatcgagaaggagggcatgcagctgatcagcgagaagcccgagaccgaggccgtggtgaaggagaagctgaccggcctgcacaagatgtgggaggtgctggagagcaccacccagaccaaggcccagagactgttcgacgccaacaaggccgagctgttcacccagagctgcgccgacctggacaagtggctgcacggcctggagagccagatccagagcgacgactacggcaaggacctgaccagcgtgaacatcctgctgaagaagcagcagatgctggagaaccagatggaggtgagaaagaaggagatcgaggagctgcagagccaggcccaggccctgagccaggagggcaagagcaccgacgaggtggacagcaagagactgaccgtgcagaccaagttcatggagctgctggagcccctgaacgagagaaagcacaacctgctggccagcaaggagatccaccagttcaacagagacgtggaggacgagatcctgtgggtgggcgagagaatgcccctggccaccagcaccgaccacggccacaacctgcagaccgtgcagctgctgatcaagaagaaccagaccctgcagaaggagatccagggccaccagcccagaatcgacgacatcttcgagagaagccagaacatcgtgaccgacagcagcagcctgagcgccgaggccatcagacagagactggccgacctgaagcagctgtggggcctgctgatcgaggagaccgagaagagacacagaagactggaggaggcccacagagcccagcagtactacttcgacgccgccgaggccgaggcctggatgagcgagcaggagctgtacatgatgagcgaggagaaggccaaggacgagcagagcgccgtgagcatgctgaagaagcaccagatcctggagcaggccgtggaggactacgccgagaccgtgcaccagctgagcaagaccagcagagccctggtggccgacagccaccccgagagcgagagaatcagcatgagacagagcaaggtggacaagctgtacgccggcctgaaggacctggccgaggagagaagaggcaagctggacgagagacacagactgttccagctgaacagagaggtggacgacctggagcagtggatcgccgagagagaggtggtggccggcagccacgagctgggccaggactacgagcacgtgaccatgctgcaggagagattcagagagttcgccagagacaccggcaacatcggccaggagagagtggacaccgtgaaccacctggccgacgagctgatcaacagcggccacagcgacgccgccaccatcgccgagtggaaggacggcctgaacgaggcctgggccgacctgctggagctgatcgacaccagaacccagatcctggccgccagctacgagctgcacaagttctaccacgacgccaaggagatcttcggcagaatccaggacaagcacaagaagctgcccgaggagctgggcagagaccagaacaccgtggagaccctgcagagaatgcacaccaccttcgagcacgacatccaggccctgggcacccaggtgagacagctgcaggaggacgccgccagactgcaggccgcctacgccggcgacaaggccgacgacatccagaagagagagaacgaggtgctggaggcctggaagagcctgctggacgcctgcgagagcagaagagtgagactggtggacaccggcgacaagttcagattcttcagcatggtgagagacctgatgctgtggatggaggacgtgatcagacagatcgaggcccaggagaagcccagagacgtgagcagcgtggagctgctgatgaacaaccaccagggcatcaaggccgagatcgacgccagaaacgacagcttcaccacctgcatcgagctgggcaagagcctgctggccagaaagcactacgccagcgaggagatcaaggagaagctgctgcagctgaccgagaagagaaaggagatgatcgacaagtgggaggacagatgggagtggctgagactgatcctggaggtgcaccagttcagcagagacgccagcgtggccgaggcctggctgctgggccaggagccctacctgagcagcagagagatcggccagagcgtggacgaggtggagaagctgatcaagagacacgaggccttcgagaagagcgccgccacctgggacgagagattcagcgccctggagagactgaccaccctggagctgctggaggtgagaagacagcaggaggaggaggagagaaagagaagaccccccagccccgagcccagcaccaaggtgagcgaggaggccgagagccagcagcagtgggacaccagcaagggcgagcaggtgagccagaacggcctgcccgccgagcagggcagccccagaatggccgagaccgtggacaccagcgagatggtgaacggcgccaccgagcagagaaccagcagcaaggagagcagccccatccccagccccaccagcgacagaaaggccaagaccgccctgcccgcccagagcgccgccaccctgcccgccagaacccaggagacccccagcgcccagatggagggcttcctgaacagaaagcacgagtgggaggcccacaacaagaaggccagcagcagaagctggcacaacgtgtactgcgtgatcaacaaccaggagatgggcttctacaaggacgccaagaccgccgccagcggcatcccctaccacagcgaggtgcccgtgagcctgaaggaggccgtgtgcgaggtggccctggactacaagaagaagaagcacgtgttcaagctgagactgaacgacggcaacgagtacctgttccaggccaaggacgacgaggagatgaacacctggatccaggccatcagcagcgccatcagcagcgacaagcacgaggtgagcgccagcacccagagcacccccgccagcagcagagcccagaccctgcccaccagcgtggtgaccatcaccagcgagagcagccccggcaagagagagaaggacaaggagaaggacaaggagaagagattcagcctgttcggcaagaagaagtag

SEQ ID NO: 286450 - DNA, 2073 bp, Artificial Sequence
  derived and/or modified sequence
atgaccaccaccgtggccaccgactacgacaacatcgagatccagcagcagtacagcgacgtgaacaacagatgggacgtggacgactgggacaacgagaacagcagcgccagactgttcgagagaagcagaatcaaggccctggccgacgagagagaggccgtgcagaagaagaccttcaccaagtgggtgaacagccacctggccagagtgagctgcagaatcaccgacctgtacaccgacctgagagacggcagaatgctgatcaagctgctggaggtgctgagcggcgagagactgcccaagcccaccaagggcagaatgagaatccactgcctggagaacgtggacaaggccctgcagttcctgaaggagcagagagtgcacctggagaacatgggcagccacgacatcgtggacggcaaccacagactgaccctgggcctgatctggaccatcatcctgagattccagatccaggacatcagcgtggagaccgaggacaacaaggagaagaagagcgccaaggacgccctgctgctgtggtgccagatgaagaccgccggctaccccaacgtgaacatccacaacttcaccaccagctggagagacggcatggccttcaacgccctgatccacaagcacagacccgacctgatcgacttcgacaagctgaagaagagcaacgcccactacaacctgcagaacgccttcaacctggccgagcagcacctgggcctgaccaagctgctggaccccgaggacatcagcgtggaccaccccgacgagaagagcatcatcacctacgtggtgacctactaccactacttcagcaagatgaaggccctggccgtggagggcaagagaatcggcaaggtgctggacaacgccatcgagaccgagaagatgatcgagaagtacgagagcctggccagcgacctgctggagtggatcgagcagaccatcatcatcctgaacaacagaaagttcgccaacagcctggtgggcgtgcagcagcagctgcaggccttcaacacctacagaaccgtggagaagccccccaagttcaccgagaagggcaacctggaggtgctgctgttcaccatccagagcaagatgagagccaacaaccagaaggtgtacatgcccagagagggcaagctgatcagcgacatcaacaaggcctgggagagactggagaaggccgagcacgagagagagctggccctgagaaacgagctgatcagacaggagaagctggagcagctggccagaagattcgacagaaaggccgccatgagagagacctggctgagcgagaaccagagactggtgagccaggacaacttcggcttcgacctgcccgccgtggaggccgccaccaagaagcacgaggccatcgagaccgacatcgccgcctacgaggagagagtgcaggccgtggtggccgtggccagagagctggaggccgagaactaccacgacatcaagagaatcaccgccagaaaggacaacgtgatcagactgtgggagtacctgctggagctgctgagagccagaagacagagactggagatgaacctgggcctgcagaagatcttccaggagatgctgtacatcatggactggatggacgagatgaaggtgctggtgctgagccaggactacggcaagcacctgctgggcgtggaggacctgctgcagaagcacaccctggtggaggccgacatcggcatccaggccgagagagtgagaggcgtgaacgccagcgcccagaagttcgccaccgacggcgagggctacaagccctgcgacccccaggtgatcagagacagagtggcccacatggagttctgctaccaggagctgtgccagctggccgccgagagaagagccagactggaggagagcagaagactgtggaagttcttctgggagatggccgaggaggagggctggatcagagagaaggagaagatcctgagcagcgacgactacggcaaggacctgaccagcgtgatgagactgctgagcaagcacagagccttcgaggacgagatgagcggcagatag

SEQ ID NO: 286451 - DNA, 7095 bp, Artificial Sequence
  derived and/or modified sequence
atgaccacgaccgtcgcaacagattacgataatatcgagatccagcagcagtactccgacgtgaataacagatgggacgtggatgactgggacaacgaaaattcatctgctcggctgttcgaacgtagcaggattaaagccctggctgacgagagagaggccgtgcagaagaagacctttaccaaatgggtaaacagtcaccttgccagagtgtcatgccgaatcacagacctgtataccgaccttcgcgatggacggatgctgattaaactcctcgaggtactgtcgggtgagagactgcccaagcccaccaagggcagaatgagaatccactgtctcgaaaacgtagataaagctctgcagtttctcaaggagcagcgagtccatttggagaacatgggcagccatgacatcgtagatggaaaccatcgactcaccctggggctaatatggactatcatcctgaggtttcagattcaggacattagtgttgagacggaggacaacaaggagaaaaagagcgctaaagatgctttgctgctgtggtgccagatgaaaactgctgggtatcccaatgtgaatatccataacttcacaaccagctggagggatggaatggcctttaatgcactcatccataaacacaggcctgaccttattgacttcgataagctaaagaagtcaaatgcccattacaatttacaaaacgcatttaatcttgcagaacagcaccttggtttgactaagctcctggatcccgaagacatttcagtcgatcaccctgacgagaagtcaattataacgtacgttgtgacatactatcactatttttcaaagatgaaggctctcgccgtcgaagggaagcgcattggaaaggtcctggacaacgctatcgaaacagaaaaaatgatagagaagtacgagagcctggcttcagacctcttagagtggatagaacaaactatcatcatactgaataaccgaaaatttgctaattcccttgtaggagtgcaacagcaactccaggcgttcaacacatatcggaccgttgaaaaaccacccaagtttactgaaaaggggaatctcgaagtgctgctgtttaccatccagtctaagatgcgagccaacaatcagaaagtatacatgcctcgcgagggcaagctcatttccgatatcaataaggcgtgggagcggcttgagaaggccgagcacgaacgggagctcgctctgaggaatgagcttatcaggcaggagaaattagaacagctggcccgccggttcgaccgtaaggcagctatgagggaaacatggctctcagaaaaccagcggctggttagccaagataatttcgggtttgatctgccagccgtcgaagccgccaccaagaagcacgaggctatcgagactgacatcgccgcctacgaggagagggtgcaggcagtggtcgctgtcgctagggaactagaggcagagaactaccacgacataaagcggatcacagccaggaaagacaatgtgattcggctgtgggagtacctactggagctgttgcgcgctcggagacagaggttggagatgaatcttggactgcaaaaaatcttccaggagatgttgtacataatggattggatggacgagatgaaggtcttggtactctctcaagattatggtaaacatctcctaggagtggaggacctactgcaaaaacacacccttgtagaggcggatattggcatccaggctgagcgtgtcagaggtgtgaacgcctccgcgcagaagtttgctacagatggggagggatacaaaccttgcgacccacaggttattagagacagagttgcccacatggaattctgctatcaggaactctgccagctcgcagccgaacggagggcacggctggaggagtccagacgcttatggaaatttttctgggagatggcagaagaagagggttggattagagagaaagagaagatactatcctccgatgactacggcaaggatctcacttcagtcatgaggttgcttagtaaacaccgggcttttgaagacgagatgtctggtagatctggtcatttcgagcaggcaattaaggaaggcgaagacatgatcgcagaagagcacttcggcagtgagaaaatccgcgaacggattatttacattcgagagcaatgggccaacttagaacagttaagcgccattcgcaagaaacggctggaggaggccagtcttctgcaccagtttcaagcggatgccgatgatattgacgcctggatgctggacatccttaagattgtaagctcgtccgatgtggggcatgatgagtactccactcaaagtttggtgaaaaaacacaaggatgtggccgaggaaattgcgaactatagaccaacactcgacaccttgcatgaacaggcatccgctctcccacaagagcacgctgagtctcctgacgttcggggccgtctcagcggcatagaggagcgctataaagaggtggcggaactgactcggcttcggaaacaggctctacaggacacacttgcgctctataaaatgtttagtgaggccgatgcgtgtgaactgtggattgacgagaaagagcagtggctgaataacatgcagatcccggagaagctggaagacttagaggtgattcagcaccggttcgagtccctcgagcccgagatgaacaatcaggcctctcgggtcgccgtggtgaaccagatcgcccggcagttgatgcatagcggtcatccctccgagaaagaaattaaagcccagcaggacaaactgaatacccgctggtcccagttccgggagctcgtggatcgaaagaaggatgcgttgttgtcagccctgtccattcaaaactaccacctggagtgtaatgagaccaagagctggattcgtgaaaaaacgaaagttatcgagtcaactcaggacctggggaacgacctcgctggtgtcatggccttgcagcggaagttaacaggcatggaacgcgatctagttgctatcgaggctaagttgagcgacctccagaaggaagctgaaaagctcgagtccgagcatcccgatcaggcccaggcgatcctctctcgtcttgctgaaatttctgacgtctgggaggagatgaagaccacactcaagaaccgagaagccagcctgggagaggccagcaagttgcagcagtttctgagggatctagatgacttccaatcctggttgtcgaggacccagacggccatagcgtcggaggacatgcccaatacactaaccgaggccgaaaagctgcttacgcagcatgaaaacattaaaaatgagatcgataactatgaggaggattatcagaaaatgcgggacatgggagagatggttactcagggacagacggatgcccagtatatgtttctgaggcagcggctgcaggcccttgatacaggttggaacgaactgcacaagatgtgggagaataggcagaatttgctgtctcagtcccacgcttaccagcagttcctgcgagatactaagcaagccgaagcttttctaaacaatcaggagtacgtcttggcccacactgaaatgcccacaaccctggagggcgcagaagccgctatcaagaagcaagaggactttatgaccactatggacgcaaacgaggagaagattaacgccgtcgtggaaaccggtagaaggcttgtgtctgacggtaacataaactcggaccgcatccaggagaaagttgacagcatagacgatcggcatagaaaaaatcgcgaaactgcctccgagcttctgatgcggttaaaagacaacagagatctgcagaaattccttcaagattgccaggaactttctctgtggattaatgagaagatgctcaccgcccaggacatgtcatacgatgaggctcgcaaccttcattccaaatggttgaagcaccaggcatttatggccgaactggcgagtaataaagaatggttagataagatcgagaaagagggcatgcagctcatctccgagaagccagagactgaagccgtggtgaaagagaaactgactgggctgcataagatgtgggaggtgctggagtctaccacacagaccaaggcccagagattgtttgacgccaacaaggccgagctgtttacgcagtcttgcgccgacttggataagtggctgcatggactggagagccagatccaatccgacgactacggcaaggatcttacatcggtaaatatcctgctgaagaagcaacaaatgctcgagaatcaaatggaggtgcgtaagaaggagatcgaggagctgcagtctcaggcacaggctctcagtcaggagggtaagtcaaccgatgaggtagacagcaaaagattgaccgtgcagactaagtttatggagctgctggaacctttgaatgaaaggaaacataatctactcgccagcaaggagatccaccagttcaatagggatgtggaggacgaaatcctgtgggtcggtgaacgcatgccactggcaacctccacagaccatgggcataatctgcagaccgttcaactcctgattaagaaaaatcagacactccagaaggaaattcaaggtcaccagccccgaattgacgacatatttgaacggagccagaacattgtaacggattcttcatctctctcagcggaagccatacggcagcgcctggccgacttaaagcagctatggggcttgcttattgaggaaaccgaaaaacgacatcggagactggaggaggcccatcgtgcacaacagtattatttcgacgcagccgaggctgaggcctggatgagtgagcaagagctatatatgatgtccgaagagaaagctaaagacgagcagagcgctgtcagtatgctgaaaaagcaccagatcctcgagcaggctgttgaggactacgcggagacggtgcatcaactgagcaagacaagtagagccctagtggccgactcccatccggaatcagaaagaatctccatgcgccagtcaaaggtagataaactgtatgcaggcctcaaagacctggctgaggaaagaaggggcaaattggacgagcggcatcggctgtttcagctgaatagagaagtagatgatctcgagcagtggattgccgaacgtgaggttgtggctgggtcacacgaactggggcaggattatgagcacgtaactatgctgcaggaacggtttcgcgagttcgcccgcgacacaggaaacatcgggcaggaaagagtcgatacggtcaaccacttggccgatgaattaatcaactctggccacagcgatgcagcaactatagccgaatggaaagacgggttgaacgaggcctgggcagatttacttgaactcattgataccaggactcagatcctcgccgccagttacgaattgcacaagttctaccacgacgctaaggagatcttcggccgaatacaggacaaacacaagaagcttccagaggaactcggtagagaccagaatactgtcgagactctgcagcgaatgcacacaacctttgagcacgatatacaggctctaggaacgcaggtgaggcagctgcaagaggatgctgcaagactgcaggccgcttacgccggagacaaagcagacgacattcagaaacgagagaatgaggtattagaagcttggaagagtttgcttgatgcatgtgagtctaggcgagtcaggcttgtcgataccggtgacaaattccgattcttttcaatggtgcgggatctgatgttatggatggaggacgtcatccggcaaatcgaagcacaggaaaagccacgcgatgtgtcaagtgtcgaactcctcatgaataatcaccaggggattaaagccgaaatcgatgcccgcaacgattctttcactacctgtatcgagctggggaagtccctcctagcaagaaaacactacgcatctgaagagatcaaggagaaacttctgcagttgacggaaaagaggaaggaaatgatcgacaagtgggaagaccgttgggaatggcttaggcttatcctcgaagtccaccagttcagcagggacgcctcggtagccgaggcctggcttttgggccaggagccctacttatcttctagagaaattggacagagcgtcgacgaagtagagaagttaatcaaacgacacgaagcattcgagaagtctgcagcaacctgggatgagagattctccgcccttgagcgccttaccacactggagcttctggaggtgaggcgccagcaggaggaagaagagagaaagcgccgccctccatcccccgagcccagcacaaaggtatctgaggaagccgagagtcaacagcagtgggacacaagtaagggagagcaggtttctcaaaatgggctgcccgccgagcaggggtcaccccggatggcggagactgtggacacttctgagatggtaaatggcgccactgagcagcggacgtcctcaaaggagagctccccaataccaagtcctacttcagatcgaaaggccaagactgccttaccagcccaaagcgctgctacactgcctgctagaactcaggagaccccatccgcacagatggaaggcttcttaaacaggaagcacgagtgggaagctcataataagaaagcgtcatcccggagttggcacaacgtgtattgcgtaataaacaaccaggaaatgggattctacaaggatgccaagaccgccgcaagtggtattccttaccattccgaagtgcccgtcagcttaaaggaggccgtgtgtgaggttgccttggactataagaaaaaaaaacacgtgttcaaactgcgtcttaatgatggcaacgaatacctgtttcaggcaaaggacgacgaagaaatgaacacctggatccaggctatcagttccgctatctcttcagataagcacgaggtgtctgcttccacccagtctacccccgccagttcccgtgcgcagacccttcccacgtcagtggttacaattacatcagagagctctcctggcaaaagggagaaggataaggagaaagacaaagagaaacgcttctcgctattcggcaagaagaagtag

SEQ ID NO: 286452 - DNA, 2073 bp, Artificial Sequence
  derived and/or modified sequence
atgacaaccaccgtggcaactgactacgataacattgagatacaacagcagtattcagatgttaacaatcgttgggatgtcgacgactgggataacgagaactccagcgccagactctttgagagaagccgcatcaaggccctcgccgatgaaagggaggcagttcagaaaaaaacgttcaccaaatgggtcaactcccacctggcacgggtgagctgcaggatcacggacctctataccgacctgcgggatggacgaatgttgataaagctgttggaggttctaagcggcgagcgcctcccaaagcccaccaagggcaggatgcgcattcactgcttggagaacgtcgacaaggccctgcagtttctgaaggagcaaagggtccatcttgaaaatatgggtagccacgacatcgtggatgggaaccatcgcttgactctggggttgatctggacgatcatcctcaggttccagattcaggatatctctgtggagacggaagacaacaaggagaagaagtccgccaaagatgctctgttactgtggtgccaaatgaaaaccgcgggttatcctaatgttaatatacataatttcactacatcatggcgggatggtatggcatttaacgccctcatacacaaacatcgtccagacctgatcgatttcgataagctaaagaaaagtaatgcccactataatctacagaacgcattcaacctggccgagcaacacctgggactgactaaactgctcgaccccgaagatatctcagttgatcacccagatgaaaagtctattatcacctacgtggtaacctactaccattacttctccaaaatgaaagcccttgctgtcgagggcaagcgaataggcaaggtacttgacaatgctattgaaacagaaaagatgatcgaaaagtacgaatctttggcaagtgacctcctggagtggatcgaacagaccatcataatactgaacaaccgcaagttcgcaaatagccttgttggcgttcagcagcagcttcaggccttcaatacgtatcgtacagtggagaaaccgcccaagtttactgagaaaggcaacttagaagtgttgctcttcaccatacaaagtaagatgcgggcgaacaatcaaaaggtgtacatgccaagagaggggaaactgatttcagatatcaataaggcttgggagaggctggaaaaagccgagcacgagagagagttggccctaaggaacgagcttatcaggcaggaaaaactagaacagctggcaagaagatttgatcggaaagccgccatgcgcgaaacatggctgagtgagaatcagagactggtctcccaagataactttggctttgatctgcccgccgtggaggcagccacaaaaaagcacgaagctatcgagacagacatcgccgcttacgaggaaagagttcaagcagtcgtggctgtggctcgggagctggaggctgaaaactaccacgacatcaaaaggataaccgcacgtaaggacaacgtgatacgcttatgggaatacctcctcgaactcctgcgagcccgcagacaacgactggagatgaatttaggactacagaaaatattccaggagatgttatacatcatggactggatggacgagatgaaggtcttggtgctgtcgcaggattacgggaagcacctcctcggggtcgaagacttgctgcaaaaacacaccctggtcgaggcagacattggtatccaagcagaacgagtgagaggcgtcaatgcatccgcccagaagtttgccacagacggggaagggtacaagccctgtgacccccaagtgattcgggaccgggtggctcatatggagttctgctatcaggaactatgccagctcgccgccgaacgacgggctaggctggaggagtctcggcggctgtggaagtttttctgggagatggctgaagaggaagggtggattcgcgaaaaggagaagatcttgagtagtgatgattacggcaaagatttgacttcagtgatgcgactgctttccaagcaccgtgctttcgaggatgaaatgagcggcagatag

SEQ ID NO: 286453 - DNA, 7095 bp, Artificial Sequence
  derived and/or modified sequence
atgaccaccaccgtggccacagattatgacaacatcgagatccagcagcagtacagtgatgtgaacaaccgctgggatgtggatgactgggacaatgaaaacagcagcgcccggctgtttgagaggagccgcatcaaggccctggctgatgagcgggaggccgtgcagaagaagaccttcaccaagtgggtgaacagccacctggcccgggtgtcctgccgcatcacagacctgtacacagacctgagagatggccgcatgctgatcaagctgctggaggtgctgagcggggagcggctgcccaagcccaccaagggccgcatgaggatccactgcctggagaatgtggacaaggccctgcagttcctgaaggagcagagggtgcacctggagaacatgggcagccatgacatcgtggatggcaaccaccggctgaccctgggcctcatctggaccatcatcctgcgcttccagatccaggacatctctgtggagacagaggacaacaaggagaagaagagcgccaaggatgccctgctgctgtggtgccagatgaagacagctggctaccccaacgtgaacatccacaacttcaccacctcctggagagatggcatggccttcaatgccctgatccacaagcacaggccagacctgattgactttgacaagctgaagaagagcaatgcccactacaacctgcagaatgccttcaacctggccgagcagcacctgggcctgaccaagctgctggaccctgaggacatctctgtggaccacccagatgagaagagcatcatcacctacgtggtgacctactaccactacttcagcaagatgaaggccctggccgtggagggcaagagaattggcaaggtgctggacaatgccatcgagacagagaagatgattgagaagtatgagagcctggccagtgacctgctggagtggattgagcagaccatcatcatcctgaacaacaggaagtttgccaacagcctggtgggcgtgcagcagcagctgcaggccttcaacacctacagaacagtggagaagccacccaagttcacagagaagggcaacctggaggtgctgctcttcaccatccagagcaagatgagggccaacaaccagaaggtgtacatgccccgggagggcaagctgatcagtgacatcaacaaggcctgggagcggctggagaaggccgagcacgagcgggagctggccctgagaaatgagctgatccggcaggagaagctggagcagctggccaggagatttgacaggaaggccgccatgagggagacctggctgtctgagaaccagaggctggtgtcccaggacaactttggatttgacctgcctgctgtggaggccgccaccaagaagcatgaggccattgaaacagacattgctgcctatgaggagcgggtgcaggccgtggtggccgtggcccgggagctggaggccgagaactaccatgacatcaagaggatcacagccaggaaggacaacgtcatccggctgtgggagtacctgctggagctgctgcgggcccggcggcagaggctggagatgaacctgggcctgcagaagatcttccaggagatgctgtacatcatggactggatggatgagatgaaggtgctggtgctgagccaggactatggcaagcacctgctgggcgtggaggacctgctgcagaagcacaccctggtggaggccgacatcggcatccaggccgagcgggtgcggggcgtgaatgccagcgcccagaagtttgccacagatggagagggctacaagccctgtgacccccaggtgatccgggacagagtggcccacatggagttctgctaccaggagctgtgccagctggccgctgagcggcgggcccggctggaggagagccggcggctgtggaagttcttctgggagatggccgaggaggagggctggatccgggagaaggagaagatcctgagcagtgatgattatggcaaggacctgacctctgtgatgaggctgctgagcaagcaccgggcctttgaagatgagatgagcggccgcagcggccactttgagcaggccatcaaggagggggaggacatgattgctgaggagcacttcggcagcgagaagatccgggagcgcatcatctacatccgggagcagtgggccaacctggagcagctgagcgccatcaggaagaagaggctggaggaggccagcctgctgcaccagttccaggctgatgctgatgacattgatgcctggatgctggacatcctgaagatcgtgagcagcagtgatgtgggccatgatgagtacagcacccagagcctggtgaagaagcacaaggatgtggccgaggagatcgccaactaccggcccaccctggacaccctgcacgagcaggccagcgccctgccccaggagcacgccgagagcccagatgtgcggggccgcctgtctggaattgaggagcgctacaaggaggtggccgagctgacccggctgaggaagcaggccctgcaggacaccctggccctgtacaagatgttcagcgaggctgatgcctgtgagctgtggattgatgagaaggagcagtggctgaacaacatgcagatccctgagaagctggaggacctggaggtgatccagcacagatttgagagcctggagcctgagatgaacaaccaggccagccgggtggccgtggtgaaccagatcgcccggcagctgatgcacagcggccaccccagcgagaaggagatcaaggcccagcaggacaagctgaacacccgctggagccagttccgggagctggtggacaggaagaaggatgccctgctgagcgccctgagcatccagaactaccacctggagtgcaatgagaccaagtcctggatccgggagaagaccaaggtgattgagagcacccaggacctgggcaatgacctggccggcgtgatggccctgcagaggaagctgaccggcatggagcgggacctggtggccatcgaggccaagctgagtgacctgcagaaggaggccgagaagctggagagcgagcacccagaccaggcccaggccatcctgagccggctggccgagatcagtgatgtgtgggaggagatgaagaccaccctgaagaaccgggaggccagcctgggggaggccagcaagctgcagcagttcctgcgggacctggatgacttccagagctggctgagcaggacccagacagccatcgccagcgaggacatgcccaacaccctgacagaagctgagaagctgctgacccagcacgagaacatcaagaatgaaattgacaactatgaggaggactaccagaagatgagggacatgggagagatggtgacccagggccagacagatgcccagtacatgttcctgcggcagaggctgcaggccctggacaccggctggaatgagctgcacaagatgtgggagaaccggcagaacctgctgagccagagccacgcctaccagcagttcctgcgggacaccaagcaggccgaggccttcctgaacaaccaggagtatgtgctggcccacacagagatgcccaccaccctggagggcgctgaggccgccatcaagaagcaggaggacttcatgaccaccatggatgccaatgaggagaagatcaatgctgtggtggagactggaagaaggctggtgtctgatggcaacatcaacagcgaccgcatccaggagaaggtggacagcattgatgacagacacaggaagaaccgggagacagccagcgagctgctgatgaggctgaaggacaacagagacctgcagaagttcctgcaggactgccaggagctgagcctgtggatcaatgagaagatgctgacagcccaggacatgtcctatgatgaggccaggaacctgcacagcaagtggctgaagcaccaggccttcatggccgagctggccagcaacaaggagtggctggacaagattgagaaggagggcatgcagctgatcagcgagaagccagagacagaagctgtggtgaaggagaagctgaccggcctgcacaagatgtgggaggtgctggagagcaccacccagaccaaggcccagaggctgtttgatgccaacaaggccgagctgttcacccagagctgtgccgacctggacaagtggctgcacggcctggagagccagatccagagtgatgattatggcaaggacctgacctctgtgaacatcctgctgaagaagcagcagatgctggagaaccagatggaggtgaggaagaaggagattgaggagctgcagagccaggcccaggccctgagccaggagggcaagagcacagatgaggtggacagcaagaggctgactgtgcagaccaagttcatggagctgctggagcccctgaatgaaaggaagcacaacctgctggccagcaaggagatccaccagttcaacagagatgtggaggatgagatcctgtgggtgggggagaggatgcccctggccaccagcacagaccacggccacaacctgcagacagtgcagctgctgatcaagaagaaccagaccctgcagaaggagatccagggccaccagcccagaattgatgacatctttgagaggagccagaacatcgtgacagacagcagcagcctgtctgctgaggccatccggcagaggctggccgacctgaagcagctgtggggcctgctgattgaggagacagagaagaggcaccggcggctggaggaggcccaccgggcccagcagtactactttgatgctgctgaggccgaggcctggatgtctgagcaggagctgtacatgatgtctgaggagaaggccaaggatgagcagagcgctgtgtccatgctgaagaagcaccagatcctggagcaggccgtggaggactatgcagagaccgtgcaccagctgagcaagaccagccgggccctggtggccgacagccaccctgagagcgagcgcatctccatgaggcagagcaaggtggacaagctgtatgccggcctgaaggacctggccgaggagcggcggggcaagctggatgagcggcacaggctcttccagctgaaccgggaggtggatgacctggagcagtggattgctgagcgggaggtggtggccggcagccatgagctgggccaggactatgagcacgtgaccatgctgcaggagcgcttccgggagtttgcccgggacaccggcaacatcggccaggagcgggtggacacagtgaaccacctggctgatgagctgatcaacagcggccacagtgatgctgccaccatcgccgagtggaaggatggcctgaatgaggcctgggccgacctgctggagctgattgacaccaggacccagatcctggccgccagctatgagctgcacaagttctaccatgatgccaaggagatcttcggccgcatccaggacaagcacaagaagctgcctgaggagctgggccgggaccagaacacagtggagaccctgcagaggatgcacaccacctttgaacatgacatccaggccctgggcacccaggtgcggcagctgcaggaggatgctgcccggctgcaggccgcctatgctggggacaaggcagatgacatccagaagcgggagaatgaggtgctggaggcctggaagagcctgctggatgcctgtgagagcagaagagtgcggctggtggacaccggggacaagttccgcttcttctccatggtgcgggacctgatgctgtggatggaggatgtgatccggcagatcgaggcccaggagaagcccagagatgtgtcctctgtggagctgctgatgaacaaccaccagggcatcaaggccgagattgatgccagaaatgacagcttcaccacctgcatcgagctgggcaagagcctgctggccaggaagcactacgccagcgaggagatcaaggagaagctgctgcagctgacagagaagaggaaggagatgattgacaagtgggaggaccgctgggagtggctgcggctcatcctggaggtgcaccagttcagcagagatgcctctgtggccgaggcctggctgctgggccaggagccctacctgagcagccgggagatcggccagagcgtggatgaggtggagaagctgatcaagagacatgaggcctttgagaagtctgctgccacctgggatgagcgcttcagcgccctggagcggctgaccaccctggagctgctggaggtgcggcggcagcaggaggaggaggagaggaagaggcggccccccagccctgagcccagcaccaaggtgtctgaggaggccgagagccagcagcagtgggacaccagcaaaggagagcaggtgtcccagaatggcctgcctgctgagcagggcagccccaggatggccgagaccgtggacaccagcgagatggtgaatggagccacagagcagaggaccagcagcaaggagagcagccccatccccagccccaccagtgacaggaaggccaagacagccctgcctgcccagagcgctgccaccctgcctgcccggacccaggagaccccatctgcccagatggagggcttcctgaacaggaagcatgagtgggaggcccacaacaagaaggccagcagccgctcctggcacaacgtgtactgtgtgatcaacaaccaggagatgggcttctacaaggatgccaagacagctgccagcggcatcccctaccacagcgaggtgcctgtgtccctgaaggaggccgtgtgtgaggtggccctggactacaagaagaagaagcacgtgttcaagctgcggctgaatgatggaaatgagtacctgttccaggccaaggatgatgaggagatgaacacctggatccaggccatcagcagcgccatcagcagtgacaagcatgaggtgtctgccagcacccagagcaccccagccagcagccgggcccagaccctgcccacctctgtggtgaccatcaccagcgagagcagccctgggaagcgggagaaggacaaggagaaggacaaggagaagcgcttcagcctgtttgggaagaagaagtag

SEQ ID NO: 286454 - DNA, 2073 bp, Artificial Sequence
  derived and/or modified sequence
atgaccaccaccgtggccacagattatgacaacatcgagatccagcagcagtacagtgatgtgaacaaccgctgggatgtggatgactgggacaatgaaaacagcagcgcccggctgtttgagaggagccgcatcaaggccctggctgatgagcgggaggccgtgcagaagaagaccttcaccaagtgggtgaacagccacctggcccgggtgtcctgccgcatcacagacctgtacacagacctgagagatggccgcatgctgatcaagctgctggaggtgctgagcggggagcggctgcccaagcccaccaagggccgcatgaggatccactgcctggagaatgtggacaaggccctgcagttcctgaaggagcagagggtgcacctggagaacatgggcagccatgacatcgtggatggcaaccaccggctgaccctgggcctcatctggaccatcatcctgcgcttccagatccaggacatctctgtggagacagaggacaacaaggagaagaagagcgccaaggatgccctgctgctgtggtgccagatgaagacagctggctaccccaacgtgaacatccacaacttcaccacctcctggagagatggcatggccttcaatgccctgatccacaagcacaggccagacctgattgactttgacaagctgaagaagagcaatgcccactacaacctgcagaatgccttcaacctggccgagcagcacctgggcctgaccaagctgctggaccctgaggacatctctgtggaccacccagatgagaagagcatcatcacctacgtggtgacctactaccactacttcagcaagatgaaggccctggccgtggagggcaagagaattggcaaggtgctggacaatgccatcgagacagagaagatgattgagaagtatgagagcctggccagtgacctgctggagtggattgagcagaccatcatcatcctgaacaacaggaagtttgccaacagcctggtgggcgtgcagcagcagctgcaggccttcaacacctacagaacagtggagaagccacccaagttcacagagaagggcaacctggaggtgctgctcttcaccatccagagcaagatgagggccaacaaccagaaggtgtacatgccccgggagggcaagctgatcagtgacatcaacaaggcctgggagcggctggagaaggccgagcacgagcgggagctggccctgagaaatgagctgatccggcaggagaagctggagcagctggccaggagatttgacaggaaggccgccatgagggagacctggctgtctgagaaccagaggctggtgtcccaggacaactttggatttgacctgcctgctgtggaggccgccaccaagaagcatgaggccattgaaacagacattgctgcctatgaggagcgggtgcaggccgtggtggccgtggcccgggagctggaggccgagaactaccatgacatcaagaggatcacagccaggaaggacaacgtcatccggctgtgggagtacctgctggagctgctgcgggcccggcggcagaggctggagatgaacctgggcctgcagaagatcttccaggagatgctgtacatcatggactggatggatgagatgaaggtgctggtgctgagccaggactatggcaagcacctgctgggcgtggaggacctgctgcagaagcacaccctggtggaggccgacatcggcatccaggccgagcgggtgcggggcgtgaatgccagcgcccagaagtttgccacagatggagagggctacaagccctgtgacccccaggtgatccgggacagagtggcccacatggagttctgctaccaggagctgtgccagctggccgctgagcggcgggcccggctggaggagagccggcggctgtggaagttcttctgggagatggccgaggaggagggctggatccgggagaaggagaagatcctgagcagtgatgattatggcaaggacctgacctctgtgatgaggctgctgagcaagcaccgggcctttgaagatgagatgagcggccgctag

SEQ ID NO: 286455 - DNA, 7095 bp, Artificial Sequence
  derived and/or modified sequence
atgaccaccaccgtggccaccgactacgacaacatcgagatccagcagcagtactctgatgttaacaaccgctgggacgtcgatgactgggataacgagaactctagtgcaagactttttgagcgcagccgaatcaaggctctggccgatgaacgggaagccgtgcagaagaaaacattcacgaagtgggtaaacagtcatctggcaagggtctcatgtaggatcacagatttatataccgatttgcgagatggaaggatgttaattaagctcctagaggtgctttccggcgaacgacttcctaaaccaactaaaggccgtatgcgaatccactgtctggaaaatgtggacaaggcactccagttcctgaaggagcaacgagtgcatcttgagaatatgggatctcacgatatcgtggatggcaaccaccgactcacactgggcctgatttggaccataatcttaagatttcagatacaggacataagcgtggagaccgaggacaacaaggaaaagaagagcgccaaggacgccttactgttatggtgccagatgaaaacggcggggtatcctaatgtgaatatccacaatttcacaacctcttggcgcgacggcatggccttcaacgccctgatccacaagcatagaccggatttaatagattttgataagcttaagaagtctaatgctcactataacttacagaacgcgtttaacctggccgaacagcacttgggactcacaaagctgctggaccctgaagacatcagcgtagatcatccagacgagaaatcaatcatcacatatgtcgtgacctactatcactattttagcaagatgaaggctctcgccgttgaggggaaaaggattggtaaggtgctggacaacgccatcgagaccgaaaagatgatcgagaaatacgagagcctggcctccgacctattggagtggatcgagcaaaccatcatcatcctcaacaatagaaagttcgccaactccctggtaggggttcagcaacagctacaggcgtttaatacatatcgcacagtcgagaagccacctaaatttactgagaagggcaaccttgaagtgctcttgttcactatccagtccaaaatgagagccaataatcaaaaagtctatatgccacgggagggaaaactgattagcgacatcaacaaggcttgggagaggttggagaaggcagagcacgagcgcgagctcgccctgcggaacgagttgatcagacaggaaaagcttgagcagctggctagacggtttgaccgcaaggctgctatgcgcgaaacatggctgtccgagaatcagagactagttagtcaggataattttggcttcgacttgcccgcggtggaggccgccacgaagaaacatgaggcaatagagacggacatcgcagcctatgaagaacgggtacaagctgtggtggccgtggccagagaacttgaggctgagaattatcatgacatcaaaagaattacagcgcgcaaagacaatgtcatcaggctgtgggagtacctgcttgagctgctccgggctagacgacagcgcctggaaatgaatctgggcctacagaaaattttccaggagatgctgtatatcatggactggatggatgagatgaaagttctcgtcctttctcaggactatgggaaacacctactgggcgtcgaggatctactccagaaacataccctggtggaggccgacatcggaattcaggcagagcgcgtcaggggcgtgaacgcttccgctcagaaatttgccaccgatggtgagggctataaaccctgtgacccccaggtcatcagagatcgcgtcgcccacatggaattctgctaccaggagctttgtcagcttgcagctgagcggcgcgccaggctggaagaatcccggaggttatggaagttcttctgggagatggccgaagaagaaggctggataagagagaaagaaaaaattctaagctccgacgattacggcaaagacctaacatctgtgatgcggctattgtcaaaacaccgcgcctttgaggacgagatgtcaggccgatctggacatttcgagcaagcaattaaggagggggaagacatgattgctgaggaacacttcggcagtgagaaaatccgggaaagaattatttacatccgggagcagtgggcgaatctggagcagctctctgccatccgtaagaagcgcctggaagaggcctctctgctgcaccagtttcaggcggacgctgatgacatcgacgcttggatgctggatatcttgaaaatagtgtcatcttcagacgtcggtcatgacgaatactccacccaatcgctggttaagaaacataaagatgttgcggaagagattgccaactacaggcctactctagataccctgcatgaacaggcaagcgctttgccccaggagcacgccgagtcccctgacgtcaggggtcggctgtcaggcattgaggagcgatataaggaagtggccgaacttacgcggctgcggaagcaagccttacaggataccttggcactgtacaaaatgttttccgaggcggacgcatgtgagctgtggatagatgagaaggagcaatggctgaataacatgcaaattccagaaaagctggaggacctggaggtgattcagcatcggtttgaaagcctcgaaccggaaatgaataaccaagcatcacgagtagccgtagtgaatcaaatcgcccggcagctgatgcattccggacacccttccgagaaggagatcaaggcgcagcaagataagctgaacacccggtggtcacagttccgcgaactggtggaccgtaaaaaggacgccctgctgagcgccttaagtattcagaattaccacctcgaatgcaatgagaccaagtcttggatccgcgaaaaaaccaaggtcattgagtccacccaggacttgggtaatgacctggctggggtgatggccttacagcggaaactgacaggaatggagcgagacctggtagcaatcgaggcaaaattgagtgaccttcagaaggaagccgagaagcttgagtcagagcatcctgatcaagctcaagccattctcagcaggctcgctgagatttctgatgtctgggaggaaatgaagaccaccctcaaaaatcgcgaggcctcactgggagaagcatccaagcttcaacagtttctgcgcgatctcgacgactttcaatcctggctgagtaggacacaaacagccatcgcctcagaggatatgcctaacactctgactgaggccgagaagctgcttacacagcatgagaatattaagaatgagattgataattatgaagaggattatcagaagatgcgagacatgggggagatggtgacgcagggccagactgacgcccagtacatgttcctgagacagagactccaagctttagacacaggctggaatgaactccacaagatgtgggaaaaccggcagaaccttctgagtcaatctcatgcatatcaacagttcttgagggatactaaacaggccgaagccttcctgaataaccaggagtacgtgctggctcacacggagatgccaacaactcttgaaggagcagaggccgcaattaagaagcaggaagatttcatgaccacgatggacgcaaacgaggagaaaataaatgctgttgtcgagacagggaggcggctggtctcagacggaaatatcaattctgataggatccaggaaaaggtagattccattgatgacaggcacaggaaaaatagggaaaccgctagtgagctgttgatgcggctgaaggataatcgcgacttacagaaattcctgcaggattgtcaggaactgagcctgtggatcaacgaaaagatgctcaccgcccaggatatgtcttacgatgaggctcggaatttacacagcaagtggctaaagcaccaggcattcatggccgaactcgctagtaataaggaatggcttgataagatcgaaaaggaaggaatgcagctgatctctgaaaagcccgagaccgaggccgtggtcaaggaaaagctgaccggcttacacaagatgtgggaagttcttgagtctacaacgcaaactaaagcccagagactgtttgacgctaataaggcagaattattcacgcagagttgcgctgatctagataagtggctgcatgggctggagagccaaattcagtccgatgactatgggaaagatctaacaagtgtgaacattctcttaaagaaacagcaaatgctggagaaccagatggaggtccgcaaaaaagagattgaagagctgcaaagccaggcacaggcactatcacaagaaggcaagtccacagacgaagtggactccaagcgtctgacagtgcaaactaagttcatggagttgctggagcctctcaatgaacggaagcataatctccttgccagcaaggagatccaccagtttaacagggacgtggaggacgagatcttgtgggtaggagaaagaatgcccttggccacaagcactgaccacggacacaacctgcagaccgtgcagctgttaataaagaaaaaccagacactgcagaaagagattcaagggcatcagcctaggatagatgacatctttgagagatctcagaatattgtgacagacagttcttcactgtccgctgaggcgatccgtcagcgcctcgcagacctgaagcagctgtggggactcttaattgaggagaccgaaaaaagacatcggagactggaggaagcacacagagctcagcaatattactttgatgctgctgaggcagaggcgtggatgagcgagcaggagctgtacatgatgtccgaggagaaggcaaaagatgaacagtctgctgttagcatgctgaagaaacatcaaattctggagcaagctgtcgaagactatgcggaaacggtacatcagctgagcaagacttctcgagcgcttgtggccgattctcaccccgagagcgagcgaatcagtatgaggcaaagcaaagtggataaactgtatgccggcctgaaggatctggctgaggagcggcggggcaaactcgatgagcggcaccgtctgtttcaacttaaccgcgaggttgatgatctggaacagtggattgccgagagagaagtggtcgcaggcagccacgaactggggcaagactatgaacatgtcacaatgctgcaagagcgctttagggagtttgcccgtgacaccggcaacatcggccaggaaagagttgacacggtgaaccacttggcagacgagttgattaattctggacactccgatgccgctaccatagccgagtggaaggacgggctaaatgaagcctgggctgacttacttgagcttatcgatacaaggactcagatcctagccgcatcctacgaattgcacaaattttaccacgatgctaaggaaatctttggccgcatacaggacaaacacaagaagctccccgaagaactcggaagagaccagaacacagtagagaccttgcagcggatgcatacaacctttgaacacgatatccaggcactcggaacccaggtgaggcaactgcaggaggacgctgctaggctgcaagccgcatacgcaggcgacaaagcagatgatattcagaagcgcgaaaatgaggtattagaggcttggaaatctctactagacgcatgcgaatccagaagggtgagacttgtcgacacaggggacaagtttcggttcttctctatggttagagatctcatgttgtggatggaagacgtcattcggcagatcgaggcccaagagaagcctcgagatgtgtcctccgtcgagctccttatgaacaatcatcagggaattaaggcggagattgatgctcgaaatgactccttcacaacctgtatagagctcggtaaatcacttctcgccagaaagcattatgctagtgaggaaattaaagagaaactgctgcagcttaccgagaaaagaaaagagatgattgataagtgggaggatagatgggagtggctgcgtctgattttggaagtgcatcagtttagcagggatgcttctgtggctgaagcctggctgctgggccaggaaccatacctgagctcacgcgagataggtcagagtgtggatgaagtggaaaaacttatcaagcggcatgaggctttcgaaaaatccgctgccacctgggacgagcggttcagcgccttggagaggctgactacgctcgaacttctcgaggtgcgcagacaacaggaagaagaggagaggaagcggcgtccgccaagccctgaaccctcaaccaaagtttcagaagaagccgagtctcagcagcagtgggacactagcaagggcgaacaagtgtcccaaaatggactgcctgcggaacagggctctccccgtatggcagagacagttgacactagcgaaatggtgaacggcgcgaccgagcagcgcacttcttctaaggagagctctccaattccaagcccgacctcggacaggaaggccaaaacagctttacctgcacaaagtgccgccacccttccagccagaacgcaggaaacgcctagcgcccagatggaaggttttttgaaccgtaagcacgaatgggaggctcacaacaagaaagcttcatccagaagctggcacaatgtgtactgcgtgattaacaatcaagagatgggcttctacaaagatgctaaaactgccgcttccggcatcccatatcactccgaggtgcccgtctcgttgaaagaggctgtgtgcgaggtggccctggactataagaaaaagaaacacgttttcaagctccggcttaacgacgggaatgaatacttgttccaggccaaggatgacgaggaaatgaatacgtggattcaggctatttctagtgccatctcaagtgacaagcatgaagtttcggcatccacgcaatctactcccgcttcctcaagagcacagacgttgccgacctcagtggtgaccattacctcagagagttcacccggcaagcgcgaaaaagataaagagaaggacaaggagaagcgcttctccctctttgggaagaagaagtag

SEQ ID NO: 286456 - DNA, 2073 bp, Artificial Sequence
  derived and/or modified sequence
atgaccaccaccgtggccaccgactacgacaacatcgagatccagcaacagtatagcgatgtgaacaacagatgggacgtggatgattgggataatgaaaattctagcgccagactgtttgagcgtagtcggattaaagcactcgcagatgagcgagaggcggttcaaaagaaaaccttcactaagtgggtgaactcacacttggctcgtgtgagttgtcgaattactgatctgtataccgatctcagagacggacgaatgttgattaagctcctcgaagttttaagcggcgaaagactgcccaagcccactaaaggtaggatgcggatccactgtctggaaaatgttgacaaagcattgcagttcctcaaagagcagcgggtccatctcgagaacatgggctctcatgacattgtcgatggcaatcaccggctcaccctgggactcatctggacaatcatcttacggtttcagatccaggacattagcgtcgagacagaagataacaaggaaaagaaaagtgccaaggacgccttactattatggtgtcagatgaaaaccgcgggctaccctaacgtgaatattcataattttaccacctcatggagagatggaatggcctttaacgcactcatccacaagcatcggccggacctcattgattttgacaagctgaagaagagtaatgcccactataaccttcagaatgcgtttaacctggccgagcagcacctgggcctgacgaaactactggatcctgaggacataagtgtagaccacccggacgaaaagtctatcattacctatgtggtgacctactatcattacttctctaagatgaaagctctggctgtggaaggtaagcgcataggtaaggtacttgataatgcaattgaaacagagaaaatgatcgaaaaatacgagtccctggcgagcgatctgttagaatggatcgaacaaaccatcatcatcctgaataatcgtaagtttgctaattctctagtcggggtgcagcaacagctccaagctttcaatacctacaggactgtcgagaaaccaccaaagtttacagaaaagggaaacctagaggtgctgttgtttacaattcagagcaaaatgcgtgccaacaatcagaaggtgtacatgccacgggaggggaaactgatttccgacatcaacaaggcttgggaaaggctggaaaaggctgagcatgagcgcgagctggcactgcgaaacgagctaatacggcaggaaaaactcgaacaactggctaggagatttgacaggaaggcagctatgcgcgaaacttggctatcggagaaccaacggcttgtgagtcaggataattttggcttcgatctgcccgcggtagaggctgcaaccaagaaacatgaagccatcgaaactgacatagctgcatacgaggaacgtgtgcaggctgtcgtggccgtggcaagagagctcgaagccgagaactaccacgacatcaaacggattaccgccaggaaagataatgtgattcggttgtgggaatacttgctcgagctattaagagctagacgtcagaggctcgaaatgaatctggggctccagaagatcttccaagaaatgctgtacattatggactggatggatgagatgaaggtgttggtgctgtcacaggattatggtaaacatctcctgggcgtggaagacttgttacagaaacacacactggtcgaggcagacatcggcattcaggcagagagggttcggggagtcaacgcatctgcgcagaagtttgcaaccgacggcgagggatataagccctgcgatccgcaggtgatccgggatcgggtcgcacacatggagttctgttatcaggaactttgccagctggcggccgagagacgcgcccgactcgaggaaagcaggagactgtggaagttcttctgggagatggctgaagaggagggatggatccgggagaaggaaaaaattctgtccagcgatgactacggcaaggatcttactagtgtgatgcggttgctttcgaaacatagagctttcgaggacgagatgtccggcagatag

SEQ ID NO: 286457 - DNA, 7094 bp, Artificial Sequence
  derived and/or modified sequence
atgaccacgactgtggcgaccgactacgacaatatagagattcagcagcagtattccgacgtgaacaaccgatgggacgtggatgattgggacaacgagaactcttctgcacgactgttcgagcgttctcgcattaaggcgcttgctgacgagcgggaggctgtgcagaaaaaaacctttaccaagtgggtcaactcccaccttgctagagtttcttgccgcatcactgatctatacaccgatttgagagatggacggatgcttattaagctgttagaggtactttccggggagcggctgccaaaacctaccaagggcagaatgcgtattcactgcctggagaatgtggacaaggcgctacagtttcttaaagagcaacgagtccaccttgagaatatgggctctcacgatatcgtcgatggcaatcacagactgacattgggcctgatttggactatcatacttcggtttcaaattcaagacatcagtgtcgaaaccgaagacaataaggaaaaaaaaagcgctaaagacgcattattactatggtgccaaatgaaaacagcgggttaccccaatgtgaatatccataactttaccacatcgtggagggacggcatggccttcaacgccctcatccacaagcacaggccagatctcatcgacttcgacaaattgaagaagagtaatgctcactataatctgcagaacgccttcaatttggccgagcagcacctgggcctcacaaagcttctcgatccggaggatattagtgtcgatcatcccgacgagaaaagtatcataacctatgttgtcacctattaccactacttctctaagatgaaggccctggcagttgagggaaagagaatcggaaaggttctggacaatgccattgaaactgaaaaaatgatcgaaaagtatgaaagtctggcaagcgacctcctggaatggatagagcagactattatcatcctcaataaccggaaattcgccaatagcctggtcggcgtccagcaacagcttcaagcctttaatacatacagaacagtcgagaagccacctaaattcaccgagaagggcaacctggaagtgctgctctttaccatccagtcaaaaatgcgggcaaacaatcagaaggtatatatgcctagggaaggcaagctgatctcagatataaataaagcttgggaacgactggagaaagctgaacacgagagagaactggcccttagaaatgaactgattcgccaggagaagcttgagcaactggcgaggcgcttcgaccggaaggccgcaatgcgggagacctggctgagcgagaaccaacggctggtgtcgcaagataactttgggtttgatctgccggcagtggaagcagccaccaagaagcacgaagctattgagaccgacatcgccgcttacgaggagagagtgcaggcagttgtggcagtagcaagggagctggaggccgaaaattaccatgacattaagcggattaccgctcgtaaagataacgtgattcgcctgtgggagtacctactggaacttctccgggctcgccgtcaacggctggagatgaacctgggcctgcaaaaaatttttcaggaaatgctgtacatcatggactggatggacgaaatgaaggtgctcgttctctcgcaggactatggcaagcatctgttgggtgtggaggatctattacagaaacacaccctcgtcgaggccgatataggtatacaggctgagcgcgtaaggggcgtgaatgcgtccgcccaaaagtttgccaccgatggcgagggttacaaaccgtgtgaccctcaagttattcgagaccgagtggcacatatggaattctgttatcaggagttgtgccaactagcggctgaaagacgggctcgcttagaagaatctcgaagactgtggaagtttttctgggaaatggccgaggaggaagggtggatacgagagaaggaaaaaatccttagctctgacgactacggaaaagatttgacttcagtgatgaggctactcagcaagcacagggcattcgaggacgaaatgtccgggaggagcggacattttgaacaggccataaaagaaggtgaggacatgattgccgaagagcattttgggagcgaaaagatcagagaacgtatcatttacataagggagcagtgggcaaacctggaacaattgagcgccattagaaagaaaaggctggaggaagcatcactgttgcatcagttccaggcagatgctgacgatatcgacgcctggatgctggatattttaaaaattgtgtctagctctgatgtcgggcatgatgagtacagtacccaaagcttagtgaagaagcacaaagatgtcgcagaagagatagccaactatagacccactttagacactctgcacgagcaggccagtgccctaccgcaggagcacgccgaatctcctgacgtcagagggcgattgtctggcatcgaggaaagatacaaggaagtcgcagaactgaccaggctccggaagcaggccctccaggacacgctggctctttacaaaatgttcagcgaagctgatgcatgcgagttgtggattgacgaaaaggaacagtggttaaacaacatgcagataccagagaagcttgaagatctggaggttattcagcaccgtttcgagtccctcgaaccggagatgaataaccaggcttcccgtgtggctgtggtcaaccagattgcacggcagctgatgcacagcggccatccgagtgagaaggagataaaggcccagcaagacaagcttaacacccggtggtcccagttccgagagcttgtagatagaaaaaaagatgcactgcttagcgcactgagtatccagaactaccatcttgaatgtaatgaaacaaagtcttggataagggagaaaaccaaggtcatcgagagtacccaggacttaggcaatgatctcgcaggggtcatggccctgcagcgcaaactgactggcatggaacgggacctggtagcaattgaagccaaattaagtgatctacagaaggaagccgaaaaacttgaaagtgagcacccagaccaggcacaggcaattctgagccgactggctgagataagtgatgtctgggaagagatgaaaaccacattaaagaacagagaagccagcttgggagaggcaagcaaacttcagcaattccttcgtgatctagatgatttccagagttggctctcaaggacgcaaactgcaatagcttcggaggatatgccgaacaccttgacagaagccgaaaaattactgactcaacatgagaatataaagaacgagattgataactacgaagaggattaccagaaaatgcgggatatgggtgagatggtgacccagggccaaactgacgcacagtatatgttcctcaggcagagactacaggcacttgacacaggatggaatgagctgcataagatgtgggagaacaggcagaatctcttatctcagtcccacgcgtatcaacagtttctcagagatacaaaacaggcagaagctttcctgaacaaccaagagtacgtcctggcccacaccgaaatgcctaccactctcgagggcgctgaggccgctatcaagaagcaggaggatttcatgacaacaatggatgccaacgaagaaaaaattaacgcagtggtggaaacaggacgccgattggtgtccgatgggaacatcaactcggaccggattcaagagaaagtcgacagtatcgacgaccggcacagaaagaacagagagactgcttccgagctgctaatgaggctgaaagacaacagggatctccagaaatttttgcaggactgtcaggaattgtctctctggatcaatgagaagatgctcaccgctcaggatatgtcgtatgacgaggcaaggaatctccacagcaaatggctgaaacatcaggcatttatggctgagttggctagtaacaaggaatggctcgataaaatagagaaggagggcatgcagctgatttcagaaaaaccagagactgaggccgtggttaaggagaagcttacaggcttgcacaaaatgtgggaggtgttggaatcaactacccagaccaaggcccagcgcctcttcgatgccaacaaggccgaactgtttacgcagtcctgcgccgacctcgataaatggttgcacggtctggagtcccagatccagtccgatgactacggtaaggacctgaccagcgtcaatatcctgctcaagaagcagcagatgttggagaatcagatggaagtaagaaagaaggagatagaggagctgcagtcacaggcccaagccctttcacaggaggggaagtcaaccgatgaagttgatagtaagcgccttacggtgcagactaaattcatggagctccttgagccgttgaatgagaggaagcataacctgctggcatcgaaagagattcatcaattcaatcgtgacgttgaagacgaaattctctgggtgggagaacgcatgcccttggcaaccagtacggatcacggccacaacctccagactgtgcagcttctgattaagaaaaaccagaccctgcagaaagaaattcagggacaccagcctcgtattgacgacattttcgagcgaagccaaaatatcgttaccgattcctctagtttatcagcagaggctattagacaaaggctagccgatctgaagcagctgtggggccttttaatcgaagagactgaaaagcggcataggcgcctggaagaggcccaccgagctcaacagtactacttcgatgccgcagaggccgaagcctggatgtcggaacaggagctctatatgatgtccgaagagaaggctaaggatgagcaatccgctgtgtccatgctgaaaaagcaccaaatcctcgagcaggcagtggaggactacgccgaaacagtccaccagctgtctaagactagcagggcactggtcgcagactctcaccccgagtctgagcgcattagtatgcggcagtctaaagtcgacaaactttacgccggactgaaggaccttgccgaggagcgcaggggaaagttggacgagagacacaggctctttcaattaaaccgagaggtggacgacttggagcaatggatcgccgagcgggaagttgttgcgggttctcacgagctgggtcaggattacgaacatgtgacaatgttgcaggaacgctttagggaattcgccagagacacagggaacattggccaggagagagttgacacagtgaaccacttagcagacgagctgatcaactccggccacagtgatgctgctacaattgctgaatggaaggatgggctgaatgaggcgtgggctgacctcttagaacttatcgacacacgaacgcagatactggcagcctcctacgagcttcacaaattttatcatgatgctaaggaaatctttggaagaattcaggataaacacaaaaaattgcctgaagagttaggcagagatcagaatacagtagaaactttgcagcggatgcacaccaccttcgagcacgatatccaagcactcgggacacaggtgcgccaactgcaggaggacgctgccagactgcaagccgcttacgcgggtgataaggctgacgacattcagaaacgggagaatgaggtcctggaggcctggaaatctctcctggacgcttgcgaatctcggcgagtgagattggttgacactggggacaagtttaggttcttttcgatggtgcgtgacttgatgctctggatggaagacgtgattagacagattgaagctcaggaaaagcccagagatgtgagcagtgtggagcttctgatgaataatcaccagggtataaaagctgaaatagatgcccgtaatgattccttcactacctgcatcgagctcgggaagtctcttctcgctcggaaacactatgcgagtgaagagatcaaggagaaactactccagctcaccgaaaaacgcaaggagatgatagataaatgggaggatagatgggaatggctgcgcttgatcctggaggtccatcagttcagcagggacgccagtgtcgcagaagcctggctgctggggcaggagccttatctctcctcaagggaaataggccagtccgtagatgaggtggaaaaattgatcaaacggcacgaagctttcgaaaagtcagcagcaacttgggacgagagatttagtgccctcgagcgactgaccactctcgaactactagaggttagacggcagcaggaggaagaggaacgaaaacggaggcccccttctccggagcccagcaccaaggtcagtgaggaggcggagtcccagcagcaatgggacacctccaaaggtgagcaggtctcccagaacggtctccctgcagagcaggggtccccaaggatggctgaaactgtggacaccagcgaaatggtgaatggcgctacggagcagcgtactagtagcaaggagagctccccaattccttcacccacctcagatcgtaaggccaaaactgctctccctgcacaaagtgccgctaccctgccagcaagaacacaggagacccctagtgctcagatggaagggttcctgaacaggaagcacgagtgggaagcacacaacaagaaggcctcatctagaagttggcacaatgtgtattgcgtgatcaacaaccaagagatgggtttttataaagacgcgaaaacggcggcttccgggatcccctaccatagcgaggtcccagtgtccttaaaggaggctgtatgtgaggttgccctggactacaaaaaaaagaagcatgtgttcaaactcaggcttaatgacgggaatgagtatctgtttcaggccaaagatgacgaagagatgaacacgtggatacaggccataagttcagccatcagcagcgataaacacgaagtgtctgcatccactcagagcactccagcgagctcccgggctcagacactgcctacaagcgtggttactattacctctgagtcttctccgggtaaaagggagaaggataaagagaaggacaaagagaagcgcttttcactcttcggaaagaagaaata

SEQ ID NO: 286458 - DNA, 2073 bp, Artificial Sequence
  derived and/or modified sequence
atgaccactaccgtggccaccgattacgataatattgagattcaacaacagtactcagatgttaataatcggtgggatgtggacgactgggataacgagaacagctctgccagactattcgaacggtctagaataaaggccctggccgacgagcgtgaagccgtgcaaaagaaaaccttcactaagtgggtcaatagtcatctcgctcgagtttcctgcaggatcactgacttgtacacggatctccgagatggtcggatgctcattaagttgctagaagtgctgagcggcgagaggctacctaagcccacaaagggcagaatgcgcatccattgtctggagaatgtagataaggcactgcagttcctgaaggagcaaagagtgcatttggagaacatgggttcccacgatatcgttgatggcaatcatcggctgacgctgggactaatctggacaatcattctccggtttcagatccaggacatctccgtagaaactgaggataacaaagagaagaaatccgcgaaagatgccctgctactgtggtgccagatgaagaccgccggataccccaacgtgaatatacacaacttcaccacgtcctggcgagatggtatggccttcaatgcactgatccataagcacagacccgatctgattgactttgataaactgaaaaaaagtaatgctcattataacctgcagaatgctttcaatttagctgaacaacatctcggcctcacaaaactattggaccccgaggatatttctgttgaccatccagacgaaaaaagtatcatcacctacgtggtaacctactaccactatttctctaagatgaaggcattagccgtggagggtaaacgcatcgggaaagtgctagataacgcaattgagaccgagaagatgattgaaaagtacgaatccctggcttccgatcttttagagtggatagagcagaccatcattatcttaaataaccggaagttcgcgaactccttagttggagttcagcaacagctgcaggccttcaacacttaccggactgtggagaagccaccaaagtttaccgaaaagggcaacctcgaggtcctcttattcacaatccaaagcaagatgagggctaataaccaaaaggtttacatgcctcgcgagggcaagcttatatctgacatcaataaagcttgggaaaggctcgaaaaagcggagcacgagcgtgaactcgctctgaggaatgaattaatacggcaggaaaaacttgagcagctcgcacgtagattcgaccgcaaagctgcaatgagggaaacatggctgagtgaaaatcagcgtctcgtatcacaggacaatttcggttttgacctgccagcagtggaggccgcaaccaaaaaacacgaggccatcgaaactgatatagccgcatacgaggaacgcgttcaagccgtggtagccgttgcaagggaattggaagccgagaattaccacgacatcaagaggattactgctagaaaggacaacgttatccgactgtgggaatacttgcttgagttgctcagggcaagaagacagcgactcgagatgaacctgggcctgcagaagattttccaggagatgctttatatcatggactggatggacgagatgaaggtacttgtgttgtcgcaggactacgggaagcacttgctgggggtcgaggatctgctgcagaaacacacactggtggaagctgacatcgggattcaagccgagagagtccgcggtgtgaacgcatccgcgcagaaattcgctacggatggagaaggctataagccttgtgatccccaagtcatccgggaccgggtggctcatatggagttctgctaccaagagctttgccaactcgcggctgaacggagagcccgtcttgaagagtcaagaagactgtggaagttcttctgggagatggccgaggaagaagggtggattcgggaaaaggaaaagattctttcttccgatgattacggtaaggacctgacttctgtgatgaggctgttgtcaaaacacagagcatttgaagatgagatgagcggtcgctag

SEQ ID NO: 286459 - DNA, 8482 bp, Artificial Sequence
  derived and/or modified sequence
ggaatcagtgccgctgttgccgtgcaggctgcggattcctccagtccctccctcggccgcctctcctcccggagcgagcgcgcagccctgcgcagcagcgcccactggtcccgtcctgtgagccccggccccagccgcggacagacccgcggagtcgcctcccggcccacccgcccggccgccgaggagcgggaggaggacgggaccccggcgcccccaccccatccccgggagaactctaagaaggagctgatgtggaggagcagctgagacagttcaagatgacgaccacagtagccacagactatgacaacattgagatccagcagcagtacagtgatgtcaacaaccgctgggatgtcgacgactgggacaatgagaacagctctgcgcggctttttgagcggtcccgcatcaaggctctggcagatgagcgtgaagccgtgcagaagaagaccttcaccaagtgggtcaattcccaccttgcccgtgtgtcctgccggatcacagacctgtacactgaccttcgagatggacggatgctcatcaagctgctggaggtcctctctggagagaggctgcctaaacccaccaagggacgaatgcgcatccactgcttagagaatgtggacaaggcccttcagttcctgaaggagcagagagtccatcttgagaacatggggtcccatgacatcgtggatggaaaccaccggctgacccttggcctcatctggaccatcatcctgcgcttccagatccaggatatcagtgtggaaactgaagacaacaaagagaagaaatctgccaaggatgcattgctgttgtggtgccagatgaagacagctgggtaccccaatgtcaacattcacaatttcaccactagctggagggacggcatggccttcaatgcactgatacacaaacaccggcctgacctgatagattttgacaaactaaagaaatctaacgcacactacaacctgcagaatgcatttaatctggcagaacagcacctcggcctcactaaactgttggaccccgaagacatcagcgtggaccatcctgatgagaagtccataatcacttatgtggtgacttattaccactacttctctaagatgaaggccttagctgttgaaggaaaacgaattggaaaggtgcttgacaatgctattgaaacagaaaaaatgattgaaaagtatgaatcacttgcctctgaccttctggaatggattgaacaaaccatcatcattctgaacaatcgcaaatttgccaattcactggtcggggttcaacagcagcttcaggcattcaacacttaccgcactgtggagaaaccacccaaatttactgagaaggggaacttggaagtgctgctcttcaccattcagagcaagatgagggccaacaaccagaaggtctacatgccccgggaggggaagctcatctctgacatcaacaaggcctgggaaagactggaaaaagcggaacacgaaagagaactggctttgcggaatgagctcataagacaggagaaactggaacagctcgcccgcagatttgatcgcaaggcagctatgagggagacttggctgagcgaaaaccagcgtctggtgtctcaggacaactttgggtttgaccttcctgcagttgaggccgccacaaaaaagcacgaggccattgagacagacattgccgcatacgaggagcgtgtgcaggctgtggtagccgtggccagggagctcgaggccgagaattaccacgacatcaagcgcatcacagcgaggaaggacaatgtcatccggctctgggaatacctactggaactgctcagggcccggagacagcggctcgagatgaacctggggctgcagaagatattccaggaaatgctctacattatggactggatggatgaaatgaaggtgctagtattgtctcaagactatggcaaacacttacttggtgtggaagacctgttacagaagcacaccctggttgaagcagacattggcatccaggcagagcgggtgagaggtgtcaatgcctccgcccagaagttcgcaacagacggggaaggttacaagccctgtgacccccaggtgatccgagaccgcgtggcccacatggagttctgttatcaagagctttgccagctggcggctgagcgcagggcccgtctggaagagtcccgccgcctctggaagttcttctgggagatggcagaagaggaaggctggatacgggagaaggagaagatcctgtcctcggacgattacgggaaagacctgaccagcgtcatgcgcctgctcagcaagcaccgggcgttcgaggacgagatgagcggccgcagtggccactttgagcaggccatcaaggaaggcgaagacatgatcgcggaggagcacttcgggtcggagaagatccgtgagaggatcatttacatccgggagcagtgggccaacctagagcagctctcggccattcggaagaagcgcctggaggaggcctccctgctgcaccagttccaggcagatgctgatgacattgatgcctggatgctggacatcctcaagattgtctccagcagcgacgtgggccacgatgagtattccacacagtctctggtcaagaaacacaaggacgtggcggaagagatcgccaattacaggcccacccttgacacgctgcacgaacaagccagcgccctcccccaggagcatgccgagtctccagacgtgaggggcaggctgtcgggcatcgaggagcggtataaggaggtggcagagctgacgcggctgcggaagcaggcactccaggacactctggccctgtacaagatgttcagcgaggctgatgcctgtgagctctggatcgacgagaaggagcagtggctcaacaacatgcagatcccagagaagctggaggatctggaggtcatccagcacagatttgagagcctagaaccagaaatgaacaaccaggcttcccgggttgcagtggtgaaccagattgcacgccagctgatgcacagcggccacccaagtgagaaggaaatcaaagcccagcaggacaaactcaacacaaggtggagccagttcagagaactggttgacaggaagaaggatgccctcctgtctgccctgagcatccagaactaccacctcgagtgcaatgaaaccaaatcctggattcgggaaaagaccaaggtcatcgagtccacccaggacctgggcaatgacctggctggcgtcatggccctgcagcgcaagctgaccggcatggagcgggacttggtggccattgaggcaaagctgagtgacctgcagaaggaggcggagaagctggagtccgagcaccccgaccaggcccaggccatcctgtctcggctggccgagatcagcgacgtgtgggaggagatgaagaccaccctgaaaaaccgagaggcctccctgggagaggccagcaagctgcagcagttcctacgggacttggacgacttccagtcctggctctctaggacccagacagcgatcgcctcggaggacatgccaaacaccctgaccgaggctgagaagctgctcacgcagcacgagaacatcaagaacgagatcgacaactacgaggaggactaccagaagatgagggacatgggcgagatggtcacccaggggcagaccgatgcccagtacatgtttctgcggcagcggctgcaggccctggacactggatggaacgagctccacaagatgtgggagaacagacaaaatctcctatcccagtcacatgcctaccagcagttcctcagagacacgaagcaagccgaagcctttcttaacaaccaggagtatgttctggctcacactgaaatgcctaccaccttggaaggagctgaagcagcaattaaaaagcaagaggacttcatgaccaccatggacgccaatgaggagaagatcaatgctgtggtggagactggccggaggctggtgagcgatgggaacatcaactcagatcgcatccaggagaaggtggactctattgatgacagacataggaagaatcgtgagacagccagtgaacttttgatgaggttgaaggacaacagggatctacagaaattcctgcaagattgtcaagagctgtctctctggatcaatgagaagatgctcacagcccaggacatgtcttacgatgaagccagaaatctgcacagtaaatggttgaagcatcaagcatttatggcagaacttgcatccaacaaagaatggcttgacaaaatcgagaaggaaggaatgcagctcatttcagaaaagcctgagacggaagctgtggtgaaggagaaactcactggtttacataaaatgtgggaagtccttgaatccactacccagacaaaggcccagcggctctttgatgcaaacaaggccgaacttttcacccagagctgtgcagatctagacaaatggctgcacggcctggagagtcagattcagtctgatgactatggcaaagacctgaccagtgtcaatatcctgctgaaaaagcaacagatgctggagaatcagatggaagtgcggaagaaggagatcgaagagctccaaagccaagcccaggccctgagtcaggaagggaagagcaccgacgaggtagacagcaagcgcctcaccgtgcagaccaagttcatggagttgctggagcccttgaacgagaggaagcataacctgctggcctccaaagagatccatcagttcaacagggatgtggaggacgagatcttgtgggttggagagaggatgcctttggcaacttccacggatcatggccacaacctccagactgtgcagctgttaataaagaaaaatcagaccctccagaaagaaatccaggggcaccagcctcgcattgacgacatctttgagaggagccaaaacatcgtcactgacagcagcagcctcagcgctgaggccatcagacagaggcttgccgacctgaagcagctgtggggtctcctcattgaggagacagagaaacgccacaggcggctggaggaggcgcacagggcccagcagtactactttgacgctgctgaggccgaagcctggatgagcgagcaggagctgtacatgatgtcagaggagaaggccaaggatgagcagagtgctgtctccatgttgaagaagcaccagatcttagaacaagctgtggaggactatgcagagaccgtgcatcagctctccaagaccagccgggccctggtggccgacagccatcctgaaagtgagcgcattagcatgcggcagtccaaagtggataaactgtacgctggtctgaaagaccttgctgaagagagaagaggcaagctggatgagagacacaggttattccagctcaaccgggaggtggacgacctggagcagtggatcgctgagagggaggtggtcgcagggtcccatgaactgggacaggactatgagcatgtcacgatgttacaagaacgattccgggagtttgcccgagacaccgggaacattgggcaggagcgcgtggacacggtcaatcacctggcagatgagctcatcaactctggacattcagatgccgccaccatcgctgaatggaaggatggcctcaatgaagcctgggccgacctcctggagctcattgacacaagaacacagattcttgccgcttcctatgaactgcacaagttttaccacgatgccaaggagatctttgggcgtatacaggacaaacacaagaaactccctgaggagcttgggagagatcagaacacagtggagaccttacagagaatgcacactacatttgagcatgacatccaggctctgggcacacaggtgaggcagctgcaggaggatgcagcccgcctccaggcggcctatgcgggtgacaaggccgacgatatccagaagcgcgagaacgaggtcctggaagcctggaagtccctcctggacgcctgtgagagccgcagggtgcggctggtggacacaggggacaagttccgcttcttcagcatggtgcgcgacctcatgctctggatggaggatgtcatccggcagatcgaggcccaggagaagccaagggatgtatcatctgttgaactcttaatgaataatcatcaaggcatcaaagctgaaattgatgcacgtaatgacagtttcacaacctgcattgaacttgggaaatccctgttggcgagaaaacactatgcatctgaggagatcaaggaaaaattactgcagttgacggaaaagaggaaagaaatgatcgacaagtgggaagaccgatgggaatggttaagactgattctggaggtccatcagttctcaagagacgccagtgtggccgaggcctggctgcttggacaggagccgtacctatccagccgagagataggccagagcgtggacgaggtggagaagctcatcaagcgccacgaggcatttgaaaagtctgcagcaacctgggatgagaggttctctgccctggaaaggctgactacattggagttactggaagtgcgcagacagcaagaggaagaggagaggaagaggcggccgccttctcccgagccgagcacgaaggtttcagaggaagccgagtcccagcagcagtgggatacttcaaaaggagaacaagtttcccaaaacggtttgccagctgaacagggatctccacggatggcagaaacggtggacacaagcgaaatggtcaacggcgctacagaacaaaggacgagctctaaagagtccagccccatcccctccccgacctctgatcgtaaagccaagactgccctcccagcccagagtgccgccaccttaccagccagaacccaggagacaccttcggcccagatggaaggcttcctcaatcggaaacacgagtgggaggcccacaataagaaagcctcaagcaggtcctggcacaatgtttattgtgtcataaataaccaagaaatgggtttctacaaagatgcaaagactgctgcttctggaattccctaccacagcgaggtccctgtgagtttgaaagaagctgtctgcgaagtggcccttgattacaaaaagaagaaacacgtattcaagctaagactaaatgatggcaatgagtacctcttccaagccaaagacgatgaggaaatgaacacatggatccaggctatctcttccgccatctcctctgataaacacgaggtgtctgccagcacccagagcacgccagcatccagccgcgcgcagaccctccccaccagcgtcgtcaccatcaccagcgagtccagtcccggcaagcgggaaaaggacaaagagaaagacaaagagaagcggttcagcctttttggcaaaaagaaatgaactcctttccttcacctcctgcccttctcttaccttttcagtgaaattccagcatgcaagctcagaaccaacacattactctctgtgcctaatgttcctcaatgtggttgatttttttttttttttaatttatagagcatttcggggggggtgggggaaacacacctaaacactttatctccaagttacaaaagtttgaggtgcagagggaaggccagattttttttttaatgaaattatatagattagatctcagtatttaaactgttcctcaattttgtgaggctgtgttggaaataacccgcctctagtgctgttggtatgcaaggcagcggtgcttaatcaatatttcctgtgctcaccagaggcaaaatgtaccaatatcctgacaccattctctctccatttacttctggtggttaccctgactcttgactcttagaagtgcccgagatggggctaacctttattaaacagatcgcatattatgatcttgctgcagccacagtgcagctccacattaactctacagaccaaaccatttgtatctggcatcacttactaacacacgacatgcggcttttctgcatcaactgctatgacggttaagaatgtcagtatacaagaaggaatagaaaactgatactgttttaaataatctgtaatttcaattttttttttttgctgaaatacattatattgtacgtttgagataattctagtacaaagtataataaaactagatgtataataaaccctttaaatcattggtaagtgtacaagtggtggaactgaagcatttactggacaaagtaatgttactctaatggttacttgctcgtgcgttgccacactgtgttataatttgcttcatttccttgctatttgatacatagtgtgcatttctctgtcactgtaactattgtaatgacaaattttcatcttactgcacaatcaaaatgacattgataggaatgaactccagaggctgggcctgaacagggaggtggtcgctcaggcctggtgctcagtcgtacgacctgtacctctcaacttttgccctatctgttaaatatatgctatgtcattaaatgcttttaaatcta

SEQ ID NO: 286460 - DNA, 2164 bp, Artificial Sequence
  derived and/or modified sequence
cttcaacaggtttgtctcagcgcagggaccctccgggcctgctttggaactctaagaaggagctgatgtggaggagcagctgagacagttcaagatgacgaccacagtagccacagactatgacaacattgagatccagcagcagtacagtgatgtcaacaaccgctgggatgtcgacgactgggacaatgagaacagctctgcgcggctttttgagcggtcccgcatcaaggctctggcagatgagcgtgaagccgtgcagaagaagaccttcaccaagtgggtcaattcccaccttgcccgtgtgtcctgccggatcacagacctgtacactgaccttcgagatggacggatgctcatcaagctgctggaggtcctctctggagagaggctgcctaaacccaccaagggacgaatgcgcatccactgcttagagaatgtggacaaggcccttcagttcctgaaggagcagagagtccatcttgagaacatggggtcccatgacatcgtggatggaaaccaccggctgacccttggcctcatctggaccatcatcctgcgcttccagatccaggatatcagtgtggaaactgaagacaacaaagagaagaaatctgccaaggatgcattgctgttgtggtgccagatgaagacagctgggtaccccaatgtcaacattcacaatttcaccactagctggagggacggcatggccttcaatgcactgatacacaaacaccggcctgacctgatagattttgacaaactaaagaaatctaacgcacactacaacctgcagaatgcatttaatctggcagaacagcacctcggcctcactaaactgttggaccccgaagacatcagcgtggaccatcctgatgagaagtccataatcacttatgtggtgacttattaccactacttctctaagatgaaggccttagctgttgaaggaaaacgaattggaaaggtgcttgacaatgctattgaaacagaaaaaatgattgaaaagtatgaatcacttgcctctgaccttctggaatggattgaacaaaccatcatcattctgaacaatcgcaaatttgccaattcactggtcggggttcaacagcagcttcaggcattcaacacttaccgcactgtggagaaaccacccaaatttactgagaaggggaacttggaagtgctgctcttcaccattcagagcaagatgagggccaacaaccagaaggtctacatgccccgggaggggaagctcatctctgacatcaacaaggcctgggaaagactggaaaaagcggaacacgaaagagaactggctttgcggaatgagctcataagacaggagaaactggaacagctcgcccgcagatttgatcgcaaggcagctatgagggagacttggctgagcgaaaaccagcgtctggtgtctcaggacaactttgggtttgaccttcctgcagttgaggccgccacaaaaaagcacgaggccattgagacagacattgccgcatacgaggagcgtgtgcaggctgtggtagccgtggccagggagctcgaggccgagaattaccacgacatcaagcgcatcacagcgaggaaggacaatgtcatccggctctgggaatacctactggaactgctcagggcccggagacagcggctcgagatgaacctggggctgcagaagatattccaggaaatgctctacattatggactggatggatgaaatgaaggtgctagtattgtctcaagactatggcaaacacttacttggtgtggaagacctgttacagaagcacaccctggttgaagcagacattggcatccaggcagagcgggtgagaggtgtcaatgcctccgcccagaagttcgcaacagacggggaaggttacaagccctgtgacccccaggtgatccgagaccgcgtggcccacatggagttctgttatcaagagctttgccagctggcggctgagcgcagggcccgtctggaagagtcccgccgcctctggaagttcttctgggagatggcagaagaggaaggctggatacgggagaaggagaagatcctgtcctcggacgattacgggaaagacctgaccagcgtcatgcgcctgctcagcaagcaccgggcgttcgaggacgagatgagcggccgc

SEQ ID NO: 286461 - protein, 396 aa, Artificial Sequence
  derived and/or modified sequence
MPPKRNEKYKLPIPFPEGKVLDDMEGNQWVLGKKIGSGGFGLIYLAFPTNKPEKDARHVVKVEYQENGPLFSELKFYQRVAKKDCIKKWIERKQLDYLGIPLFYGSGLTEFKGRSYRFMVMERLGIDLQKISGQNGTFKKSTVLQLGIRMLDVLEYIHENEYVHGDIKAANLLLGYKNPDQVYLADYGLSYRYCPNGNHKQYQENPRKGHNGTIEFTSLDAHKGVALSRRSDVEILGYCMLRWLCGKLPWEQNLKDPVAVQTAKTNLLDELPQSVLKWAPSGSSCCEIAQFLVCAHSLAYDEKPNYQALKKILNPHGIPLGPLDFSTKGQSINVHTPNSQKVDSQKAATKQVNKAHNRLIEKKVHSERSAESCATWKVQKEEKLIGLMNNEAAQFR

SEQ ID NO: 286462 - DNA, 1203 bp, Artificial Sequence
  derived and/or modified sequence
atgccccccaagagaaacgagaagtacaagctgcccatccccttccccgagggcaaggtgctggacgacatggagggcaaccagtgggtgctgggcaagaagatcggcagcggcggcttcggcctgatctacctggccttccccaccaacaagcccgagaaggacgccagacacgtggtgaaggtggagtaccaggagaacggccccctgttcagcgagctgaagttctaccagagagtggccaagaaggactgcatcaagaagtggatcgagagaaagcagctggactacctgggcatccccctgttctacggcagcggcctgaccgagttcaagggcagaagctacagattcatggtgatggagagactgggcatcgacctgcagaagatcagcggccagaacggcaccttcaagaagagcaccgtgctgcagctgggcatcagaatgctggacgtgctggagtacatccacgagaacgagtacgtgcacggcgacatcaaggccgccaacctgctgctgggctacaagaaccccgaccaggtgtacctggccgactacggcctgagctacagatactgccccaacggcaaccacaagcagtaccaggagaaccccagaaagggccacaacggcaccatcgagttcaccagcctggacgcccacaagggcgtggccctgagcagaagaagcgacgtggagatcctgggctactgcatgctgagatggctgtgcggcaagctgccctgggagcagaacctgaaggaccccgtggccgtgcagaccgccaagaccaacctgctggacgagctgccccagagcgtgctgaagtgggcccccagcggcagcagctgctgcgagatcgcccagttcctggtgtgcgcccacagcctggcctacgacgagaagcccaactaccaggccctgaagaagatcctgaacccccacggcatccccctgggccccctggacttcagcaccaagggccagagcatcaacgtgcacacccccaacagccagaaggtggacagccagaaggccgccaccaagcaggtgaacaaggcccacaacagactgatcgagaagaaggtgcacagcgagagaagcgccgagagctgcgccacctggaaggtgcagaaggaggagaagctgatcggcctgatgaacaacgaggccgcccagatcagacagctgggctactag

SEQ ID NO: 286463 - DNA, 1191 bp, Artificial Sequence
  derived and/or modified sequence
atgccccccaagagaaacgagaagtacaagctgcccatccccttccccgagggcaaggtgctggacgacatggagggcaaccagtgggtgctgggcaagaagatcggcagcggcggcttcggcctgatctacctggccttccccaccaacaagcccgagaaggacgccagacacgtggtgaaggtggagtaccaggagaacggccccctgttcagcgagctgaagttctaccagagagtggccaagaaggactgcatcaagaagtggatcgagagaaagcagctggactacctgggcatccccctgttctacggcagcggcctgaccgagttcaagggcagaagctacagattcatggtgatggagagactgggcatcgacctgcagaagatcagcggccagaacggcaccttcaagaagagcaccgtgctgcagctgggcatcagaatgctggacgtgctggagtacatccacgagaacgagtacgtgcacggcgacatcaaggccgccaacctgctgctgggctacaagaaccccgaccaggtgtacctggccgactacggcctgagctacagatactgccccaacggcaaccacaagcagtaccaggagaaccccagaaagggccacaacggcaccatcgagttcaccagcctggacgcccacaagggcgtggccctgagcagaagaagcgacgtggagatcctgggctactgcatgctgagatggctgtgcggcaagctgccctgggagcagaacctgaaggaccccgtggccgtgcagaccgccaagaccaacctgctggacgagctgccccagagcgtgctgaagtgggcccccagcggcagcagctgctgcgagatcgcccagttcctggtgtgcgcccacagcctggcctacgacgagaagcccaactaccaggccctgaagaagatcctgaacccccacggcatccccctgggccccctggacttcagcaccaagggccagagcatcaacgtgcacacccccaacagccagaaggtggacagccagaaggccgccaccaagcaggtgaacaaggcccacaacagactgatcgagaagaaggtgcacagcgagagaagcgccgagagctgcgccacctggaaggtgcagaaggaggagaagctgatcggcctgatgaacaacgaggccgcccagttcagatag

SEQ ID NO: 286464 - DNA, 876 bp, Artificial Sequence
  derived and/or modified sequence
atgccccccaagagaaacgagaagtacaagctgcccatccccttccccgagggcaaggtgctggacgacatggagggcaaccagtgggtgctgggcaagaagatcggcagcggcggcttcggcctgatctacctggccttccccaccaacaagcccgagaaggacgccagacacgtggtgaaggtggagtaccaggagaacggccccctgttcagcgagctgaagttctaccagagagtggccaagaaggactgcatcgtgttcgtggtgaagaagtggatcgagagaaagcagctggactacctgggcatccccctgttctacggcagcggcctgaccgagttcaagggcagaagctacagattcatggtgatggagagactgggcatcgacctgcagaagatcagcggccagaacggcaccttcaagaagagcaccgtgctgcagctgggcatcagaatgctggacgtgctggagtacatccacgagaacgagtacgtgcacggcgacatcaaggccgccaacctgctgctgggctacaagaaccccgaccaggtgtacctggccgactacggcctgagctacagatactgccccaacggcaaccacaagcagtaccaggagaaccccagaaagggccacaacggcaccatcgagttcaccagcctggacgcccacaagggcgtggccctgagcagaagaagcgacgtggagatcctgggctactgcatgctgagatggctgtgcggcaagctgccctgggagcagaacctgaaggaccccgtggccgtgcagaccgccaagaccaagtacaagttcagcagcatcagcagctgcaccgcccccggcctgaagggctacatcaagggcagctag

SEQ ID NO: 286465 - DNA, 1203 bp, Artificial Sequence
  derived and/or modified sequence
atgccccctaaacgaaatgagaagtacaaactccccatccctttcccggaaggaaaggtattggatgacatggaaggtaaccagtgggttttgggtaaaaagatcgggagcggaggctttgggctgatctacctggctttccctacaaacaagccagaaaaagacgcccggcatgtggtgaaagtggaataccaggagaatgggccactgttcagcgagcttaagttctatcagcgggtggcgaagaaggactgtatcaagaagtggatcgagaggaaacagctggactatttgggaatcccactcttctacgggagtggccttaccgagtttaaaggccggtcataccgattcatggttatggagcgtcttggtatcgatctccagaagatatctggccagaacggcactttcaagaagagcaccgtgttacagttgggcatacgtatgctggacgtgctggagtacatccatgagaacgaatatgtgcatggggatatcaaggccgcgaaccttctcttaggctacaaaaaccctgaccaggtgtatcttgcagattacggcctttcttatcgctactgtcctaatggcaaccacaaacaatatcaggaaaatcctaggaaggggcataacggtactatcgagtttacttctctggacgctcataaaggtgttgctctgagtaggagatctgatgtcgagattctgggttactgtatgttaagatggctttgcggcaagctgccctgggagcagaatcttaaggaccccgttgcggtgcagacagccaagactaatcttctggacgagttacctcagagcgtgctaaagtgggccccaagcggaagtagttgctgtgaaatcgcccagttccttgtgtgtgcacattccctcgcctatgacgagaaacccaactaccaggctctgaaaaaaatcctgaacccccacggaatcccgctcgggccccttgacttttccacaaaaggccagtctatcaacgtgcacacccccaattcgcaaaaggttgactcacaaaaggcagcaaccaagcaggtaaataaggcccataataggttaatcgaaaagaaggtgcatagtgagcggagcgctgagagctgcgccacctggaaagtgcagaaggaggaaaaactgatcggtctcatgaataacgaagctgctcagatccggcaactgggctattag

SEQ ID NO: 286466 - DNA, 1191 bp, Artificial Sequence
  derived and/or modified sequence
atgcctccaaagcgaaatgaaaaatacaagttgcctattccctttccagagggaaaagtcctggatgatatggagggcaaccaatgggtgctagggaaaaaaatcgggagcggtggcttcggcctcatatacctcgccttcccgacgaacaagccagagaaggacgcccggcacgtggtcaaggtggagtaccaagagaatggcccccttttctcggaattaaagttttatcagcgggtcgccaaaaaagattgcattaagaagtggatcgagcgcaagcagttggactacttggggataccactgttttacggctcagggcttacagaatttaaaggaagaagttacaggttcatggtaatggaacgccttgggatagacctgcagaaaatctccggacagaatgggacctttaagaagtcgacagttctgcagctgggaatcaggatgcttgatgtcttggagtacatacatgaaaacgagtacgtccacggggatatcaaggccgctaacctcctactgggatataagaacccagaccaggtctacctcgccgactacggtctaagctatagatactgccccaatggaaaccacaagcagtatcaggagaatccgagaaagggccataatgggaccatagaatttacctctctcgatgctcataagggtgtggccctttccaggcgctccgatgtagagattctcggctactgtatgttgagatggctctgtggtaagctgccttgggagcagaacctcaaagaccctgtagctgttcagaccgcaaagacaaatttgctcgacgaactgccacagtcagtcttaaagtgggcgcctagcgggtcctcatgctgtgaaatcgcacagtttctggtttgcgcacacagtctggcttacgacgagaaaccaaattatcaggcgttgaagaagattctgaatcctcacggaattccactgggcccgttggatttcagtaccaaaggccagtccatcaatgtgcatactccgaatagtcagaaagtagattcgcaaaaggcagccacgaagcaagtcaacaaggcccataacagactcatcgaaaagaaggttcattccgagaggtccgctgagtcatgcgccacttggaaagtgcaaaaggaggagaaacttatcggccttatgaataacgaggctgcccagtttcggtag

SEQ ID NO: 286467 - DNA, 876 bp, Artificial Sequence
  derived and/or modified sequence
atgccccctaagcgcaacgagaaatacaagctgccaattccattccctgaaggtaaggtcttagatgatatggagggtaaccagtgggttttgggaaaaaagatcggctccggcgggtttggtcttatatacttagccttccccaccaacaagcccgaaaaggacgcccgccacgtggtcaaggtggaataccaggagaacggccccctcttctctgaactgaagttttaccagagagtcgcaaagaaggactgtattgttttcgtggtgaaaaagtggatagagcgcaagcaactggactatctcgggatccccctgttttatggttccggactcacagagtttaagggcaggtcgtaccgattcatggtgatggagaggttaggaattgacctccagaagatttctggccaaaacggaaccttcaagaaaagcacagtactccaactcgggattagaatgctcgacgttttagaatacattcatgagaacgagtacgtgcacggagacatcaaggccgcaaacttactgctcggttataagaatccagaccaggtgtacctggccgactatggcttgtcttataggtactgccccaacggcaatcataagcagtatcaggaaaatccacggaagggacacaacggcaccatagagttcacttctttagatgcccataaaggtgtggcacttagcagaaggtcagacgtcgagatcctcggatactgcatgctgcgttggctttgtggaaagctaccgtgggaacagaatttgaaggatcctgtggctgtccagaccgcaaaaaccaagtacaagttctctagcatctcttcgtgcaccgctccaggactcaagggatatatcaagggtagctag

SEQ ID NO: 286468 - DNA, 1203 bp, Artificial Sequence
  derived and/or modified sequence
atgccacccaagagaaatgagaagtacaagctgcccatccccttccctgagggcaaggtgctggatgacatggagggcaaccagtgggtgctgggcaagaagattggcagcggcggcttcggcctcatctacctggccttccccaccaacaagccagagaaggatgcccggcacgtggtgaaggtggagtaccaggagaatggccccctcttcagcgagctgaagttctaccagagggtggccaagaaggactgcatcaagaagtggattgaaaggaagcagctggactacctgggcatccccctcttctacggcagcggcctgacagagttcaagggccgcagctaccgcttcatggtgatggagcggctgggcatcgacctgcagaagatcagcggccagaatggcaccttcaagaagagcacagtgctgcagctgggcatccgcatgctggatgtgctggagtacatccatgaaaatgaatatgtgcacggggacatcaaggccgccaacctgctgctgggctacaagaacccagaccaggtgtacctggccgactatggcctgagctaccgctactgccccaacggcaaccacaagcagtaccaggagaaccccaggaagggccacaacggcaccatcgagttcaccagcctggatgcccacaagggcgtggccctgagcagaagaagtgatgtggagatcctgggctactgcatgctgcgctggctgtgtgggaagctgccctgggagcagaacctgaaggaccctgtggccgtgcagacagccaagaccaacctgctggatgagctgccccagagcgtgctgaagtgggcccccagcggcagcagctgctgtgagatcgcccagttcctggtgtgtgcccacagcctggcctatgatgagaagcccaactaccaggccctgaagaagatcctgaacccccacggcatccccctgggccccctggacttcagcaccaagggccagagcatcaacgtgcacacccccaacagccagaaggtggacagccagaaggccgccaccaagcaggtgaacaaggcccacaacagactcatcgagaagaaggtgcacagcgagaggtctgctgagagctgtgccacctggaaggtgcagaaggaggagaagctgattggcctgatgaacaatgaggccgcccagatccggcagctgggctactag

SEQ ID NO: 286469 - DNA, 1191 bp, Artificial Sequence
  derived and/or modified sequence
atgccacccaagagaaatgagaagtacaagctgcccatccccttccctgagggcaaggtgctggatgacatggagggcaaccagtgggtgctgggcaagaagattggcagcggcggcttcggcctcatctacctggccttccccaccaacaagccagagaaggatgcccggcacgtggtgaaggtggagtaccaggagaatggccccctcttcagcgagctgaagttctaccagagggtggccaagaaggactgcatcaagaagtggattgaaaggaagcagctggactacctgggcatccccctcttctacggcagcggcctgacagagttcaagggccgcagctaccgcttcatggtgatggagcggctgggcatcgacctgcagaagatcagcggccagaatggcaccttcaagaagagcacagtgctgcagctgggcatccgcatgctggatgtgctggagtacatccatgaaaatgaatatgtgcacggggacatcaaggccgccaacctgctgctgggctacaagaacccagaccaggtgtacctggccgactatggcctgagctaccgctactgccccaacggcaaccacaagcagtaccaggagaaccccaggaagggccacaacggcaccatcgagttcaccagcctggatgcccacaagggcgtggccctgagcagaagaagtgatgtggagatcctgggctactgcatgctgcgctggctgtgtgggaagctgccctgggagcagaacctgaaggaccctgtggccgtgcagacagccaagaccaacctgctggatgagctgccccagagcgtgctgaagtgggcccccagcggcagcagctgctgtgagatcgcccagttcctggtgtgtgcccacagcctggcctatgatgagaagcccaactaccaggccctgaagaagatcctgaacccccacggcatccccctgggccccctggacttcagcaccaagggccagagcatcaacgtgcacacccccaacagccagaaggtggacagccagaaggccgccaccaagcaggtgaacaaggcccacaacagactcatcgagaagaaggtgcacagcgagaggtctgctgagagctgtgccacctggaaggtgcagaaggaggagaagctgattggcctgatgaacaatgaggccgcccagttcagatag

SEQ ID NO: 286470 - DNA, 876 bp, Artificial Sequence
  derived and/or modified sequence
atgccacccaagagaaatgagaagtacaagctgcccatccccttccctgagggcaaggtgctggatgacatggagggcaaccagtgggtgctgggcaagaagattggcagcggcggcttcggcctcatctacctggccttccccaccaacaagccagagaaggatgcccggcacgtggtgaaggtggagtaccaggagaatggccccctcttcagcgagctgaagttctaccagagggtggccaagaaggactgcatcgtgtttgtggtgaagaagtggattgaaaggaagcagctggactacctgggcatccccctcttctacggcagcggcctgacagagttcaagggccgcagctaccgcttcatggtgatggagcggctgggcatcgacctgcagaagatcagcggccagaatggcaccttcaagaagagcacagtgctgcagctgggcatccgcatgctggatgtgctggagtacatccatgaaaatgaatatgtgcacggggacatcaaggccgccaacctgctgctgggctacaagaacccagaccaggtgtacctggccgactatggcctgagctaccgctactgccccaacggcaaccacaagcagtaccaggagaaccccaggaagggccacaacggcaccatcgagttcaccagcctggatgcccacaagggcgtggccctgagcagaagaagtgatgtggagatcctgggctactgcatgctgcgctggctgtgtgggaagctgccctgggagcagaacctgaaggaccctgtggccgtgcagacagccaagaccaagtacaagttcagcagcatcagcagctgcacagcccctggcctgaagggctacatcaagggcagctag

SEQ ID NO: 286471 - DNA, 1203 bp, Artificial Sequence
  derived and/or modified sequence
atgccccccaagcggaacgagaagtacaagctgcccatccccttcccagagggcaaggtgctcgacgatatggagggcaaccagtgggtgttagggaaaaagattgggtctggggggtttgggctcatttacctggcttttcctacaaataagccagaaaaggatgctcgccacgtcgtgaaggtggagtaccaagaaaacggaccattgttctcagagctgaagttttaccaacgagtagccaagaaggattgtatcaagaaatggattgagcggaaacagctcgactatttaggaataccactgttttacggctcaggcctaacagaatttaaagggcgttcctaccgttttatggttatggagaggcttgggatcgacctgcaaaagatctcaggccagaatggaaccttcaaaaaaagcacagtgctgcagttgggcatccgaatgctcgacgtgctcgagtacatacacgagaacgaatacgtgcacggagacatcaaggccgccaatctattgctggggtacaaaaaccctgatcaggtctacttggctgactatgggctctcttatcgttactgccccaacggtaaccacaagcaataccaggaaaatcctcgaaaagggcacaatggaacgattgagttcactagtctggacgctcataagggggtcgcgttatcacgccgctccgacgtcgaaatcctgggctactgtatgctgcgctggctgtgcggaaaactgccttgggaacagaatttgaaggacccagtggccgtacagaccgccaagacaaacctcctggatgaattgccacagagcgtgttaaagtgggcccccagcggatcatcctgctgcgagatcgcgcaattcctggtttgtgcacattctttggcctacgatgagaaacccaattatcaggccctgaagaagatcctcaatccgcacggcatccctctaggcccactcgacttcagcacgaaagggcagagcatcaacgtccatactcccaatagccagaaggtcgatagccagaaagctgcgacaaaacaagtaaacaaggcccacaacaggctgatcgagaaaaaagtgcattctgaaagatctgcagaatcttgcgcaacttggaaagtgcagaaagaagaaaagctaatagggcttatgaacaacgaggccgcacagattcggcagcttggatattag

SEQ ID NO: 286472 - DNA, 1191 bp, Artificial Sequence
  derived and/or modified sequence
atgccccccaagcggaacgagaagtacaagctgcccatccccttccctgagggcaaagtgctcgacgatatggagggcaaccagtgggttttaggaaaaaagattgggagtggcggcttcggtctcatctatttagctttccccactaataagcccgagaaggatgctaggcacgtggtaaaggtcgaataccaggaaaacgggccgctgttctcagaactgaagttctaccagcgcgtagctaaaaaggactgcatcaaaaagtggattgagcgcaagcaacttgattacctcgggatcccactgttttacgggtccggactcaccgaattcaaaggcagatcttacaggtttatggtgatggagcggttgggtatcgacttgcagaagatttcgggacaaaacggcacgtttaagaaatctaccgtcttgcagctgggaataaggatgctggacgtgctcgaatacatacacgagaatgagtacgtccatggagatatcaaagccgcaaatttactcctgggatacaagaaccctgatcaggtgtatctcgcggattatgggctctcttataggtactgccctaatggaaatcacaagcaataccaggagaacccaagaaaaggacacaatggcactatcgaattcacttctctcgacgcacacaaaggggtggctctgtccaggagaagtgacgtcgaaattttagggtactgtatgctgaggtggctctgtgggaagcttccatgggagcagaatcttaaagacccagtggcagtccagacagcgaagaccaatctcctggatgaactccctcagagtgttctgaagtgggccccctcaggcagctcatgttgtgaaatcgctcagtttctggtctgcgcacattccttggcctacgacgaaaagccaaattaccaggcactaaagaaaattttaaacccccatggaattcccctaggcccgctggactttagtacaaagggtcaaagtataaacgtgcacacacccaatagccagaaggttgacagtcaaaaggctgctactaagcaggtcaacaaggcccataatcgcctgatcgagaagaaggttcactctgaacgcagcgcagaaagctgtgctacctggaaggtacagaaggaggagaagctgattggtctgatgaataacgaagccgcacagttcaggtag

SEQ ID NO: 286473 - DNA, 876 bp, Artificial Sequence
  derived and/or modified sequence
atgccccccaagcggaacgagaagtacaagctgcccatccccttcccagaggggaaggtgcttgacgacatggaaggcaaccagtgggtcttgggcaagaaaatcgggagtggcggatttggcctgatctacttagcattccccaccaacaagccggagaaggatgcgcggcatgtcgttaaagtcgagtatcaggagaatgggcccttatttagtgaattaaagttctaccagcgggtggccaaaaaagattgcatcgtgtttgttgtcaagaaatggattgagcggaaacaattggactatttgggcatcccacttttctacgggagtggcctgacagagttcaagggccgcagttatagatttatggttatggaacggctgggaattgatctgcaaaagataagcggtcaaaacggaacctttaagaagtcaacggtgttacagctgggcatcagaatgttagacgtcctcgagtacatacacgagaacgagtatgtccacggagatattaaggctgcaaatctgctgctcggctacaaaaatcccgaccaggtgtacttagctgattatggcctgtcctatcggtattgtcctaacggaaaccataagcagtaccaggagaaccctaggaaaggtcacaacggaaccatcgagttcacctctctggacgcacataagggcgtggccttaagtagaaggtctgatgtggagatcctgggctactgcatgctacgctggctctgtggaaagctgccttgggagcaaaatctcaaggatccggtggccgtgcagacagcaaaaacaaagtataagttcagtagcatatctagttgcactgcacccggtcttaagggttacatcaagggaagctag

SEQ ID NO: 286474 - DNA, 1203 bp, Artificial Sequence
  derived and/or modified sequence
atgcctcctaaaagaaacgagaaatacaaactgcctattccttttcccgaggggaaggtgctggacgacatggaaggcaatcagtgggtcctcggaaaaaagattgggtctggtgggttcggcctgatttacctcgccttcccaaccaacaagccagagaaggatgctcggcatgtagtcaaagtggagtaccaggaaaacggaccactcttcagcgagctcaaattttaccagcgcgtggccaagaaggattgtatcaagaagtggatcgagaggaaacagctggactacctggggatacccctgttttacgggagcgggttgactgagttcaaaggccgttcctacaggtttatggtcatggaacggttggggattgatctgcaaaagatcagtggacagaatggcacctttaagaaatctactgtgctgcaactggggatacgcatgttggacgtgctagagtatattcacgaaaacgaatatgtgcacggcgacatcaaagcggcaaatctattgctcggctataagaatcccgaccaggtgtatctggccgattatggcctgtcttatcgatattgccccaacggtaaccacaaacagtatcaagagaatcctaggaaaggacacaacggaacgatcgagtttacctctctggatgcacacaagggcgtggcgctgtcccgcagaagcgacgtcgaaattttgggctactgcatgctaaggtggctttgcggaaaactgccatgggagcagaatctgaaggaccccgtggctgtccagactgccaagaccaatctgcttgatgagcttcctcagtccgtcctgaagtgggccccatcagggtcgagttgttgcgaaatagcacaattcctcgtctgcgcccactcgctcgcttatgatgagaagccgaattatcaggctctgaaaaaaatcttaaatccacatggaatcccactgggtcccctggacttcagcacaaagggtcagagcataaacgtgcacaccccaaactcccagaaagttgattcgcaaaaggccgctactaagcaagtgaacaaggctcacaacaggttaatagaaaagaaagttcactcagagaggagtgctgagtcctgcgctacctggaaagtgcagaaggaagagaagcttattggactcatgaacaacgaggcagcacaaatccgacaactcggctattag

SEQ ID NO: 286475 - DNA, 1191 bp, Artificial Sequence
  derived and/or modified sequence
atgccccctaaacgtaatgagaagtataagcttcctataccttttcctgagggtaaggtgttggatgatatggaggggaatcaatgggttcttggtaaaaagattggctctggagggttcggtttgatctacttggctttccctaccaataagcccgagaaagatgcacgacatgtggtgaaagtcgaatatcaagaaaatggcccactgtttagcgagctgaaattttaccagcgtgtggctaaaaaagactgtatcaagaaatggatcgagaggaaacagctggactatctgggaatccccctcttctatggatccggcctcactgaattcaaagggagatcatataggtttatggtgatggagcggctgggcattgacttgcaaaaaataagtggtcagaacggtacatttaaaaaatcgactgtgttgcagctggggatcagaatgctggacgtccttgagtacatccatgaaaatgaatacgtccacggcgacatcaaggccgctaatctgctgctgggatacaaaaacccagaccaggtctaccttgccgattatggcctctcatatcggtactgccccaatggtaatcacaagcaataccaagaaaacccgagaaagggacacaatggtaccatagagtttacaagtcttgacgcgcataagggcgtggctttgagccgaaggagtgatgttgaaatcctggggtactgtatgttacggtggttgtgcggcaagctgccttgggaacagaaccttaaggatcccgtggctgtgcagacggccaagaccaacctattggatgaactcccacagtcagtcctgaaatgggctccgagcgggagttcctgttgtgagattgcccagtttcttgtctgcgcccactccctcgcctacgacgaaaaacccaactatcaggcacttaagaagatcctgaatcctcatggcatcccgctcggacccctggatttttccacaaaaggccagagcatcaacgtgcacaccccaaacagtcaaaaggtggacagccagaaggctgcaaccaagcaggttaacaaggcccacaacagattgattgagaagaaggtgcactccgaacgttccgccgagtcctgcgccacgtggaaagtccagaaggaagaaaagctgattggcctgatgaacaacgaggcggctcaattccggtag

SEQ ID NO: 286476 - DNA, 876 bp, Artificial Sequence
  derived and/or modified sequence
atgcctcccaaacgaaacgaaaaatataagctgccaatccccttccctgagggtaaagtgcttgacgatatggagggtaaccagtgggtgctaggcaagaagatcggatcaggaggatttggactaatctatcttgccttcccgacaaataagcctgaaaaggatgctcgccatgtggtcaaagttgagtatcaggagaatggcccactgttctctgagttgaagttctaccagcgggtggccaagaaggattgtattgtctttgtggtgaagaaatggatcgagcgtaagcagctggattacctgggcatccccctgttttatggtagcggacttaccgagtttaaagggagaagctatagatttatggtgatggagcgactcggcatagatcttcaaaagatctcagggcagaacggaacatttaaaaagtccacagtcctccagctgggtatccggatgcttgacgtcctggagtacatacacgaaaatgaatacgtgcatggagatataaaagctgcaaatctcctgcttggatacaaaaacccagaccaagtatatctagcggattatggcctttcctaccggtattgccctaacgggaatcacaaacagtaccaagagaacccaagaaagggacacaacggcaccatcgaatttacgtcactggatgcccacaagggggtagccctgagcaggcgctctgatgtagagattctgggatattgcatgctgcggtggttatgtggaaaactgccatgggaacagaatctgaaggatcccgtggccgtgcagactgccaaaaccaaatacaaatttagctcaatctcttcatgtacagctccgggactgaaaggttatataaagggaagttag

SEQ ID NO: 286477 - DNA, 1386 bp, Artificial Sequence
  derived and/or modified sequence
gggccgctgcactgcgaggccgacgcagctggagagaagttaggcaggtcctagggagggcaggctcgagtgctgggcccgcctccccgcgggactgtaggcccgggggctccgcctcgtcgcagcggcaggtaggaggcggtgcgcgcggcccggcgacgggggatcctgaggcccgaagtgatgccaccaaaaagaaatgaaaaatacaaacttcctattccatttccagaaggcaaggttctggatgatatggaaggcaatcagtgggtactgggcaagaagattggctctggaggatttggattgatatatttagctttccccacaaataaaccagagaaagatgcaagacatgtagtaaaagtggaatatcaagaaaatggcccgttattttcagaacttaaattttatcagagagttgcaaaaaaagactgtatcaaaaagtggatagaacgcaaacaacttgattatttaggaattcctctgttttatggatctggtctgactgaattcaagggaagaagttacagatttatggtaatggaaagactaggaatagatttacagaagatctcaggccagaatggtacctttaaaaagtcaactgtcctgcaattaggtatccgaatgttggatgtactggaatatatacatgaaaatgaatatgttcatggtgatataaaagcagcaaatctacttttgggttacaaaaatccagaccaggtttatcttgcagattatggactttcctacagatattgtcccaatgggaaccacaaacagtatcaggaaaatcctagaaaaggccataatgggacaatagagtttaccagcttggatgcccacaagggagtagccttgtccagacgaagtgacgttgagatcctcggctactgcatgctgcggtggttgtgtgggaaacttccctgggaacagaacctgaaggaccctgtggctgtgcagactgctaaaacaaatctgttggacgagctcccccagtcagtgcttaaatgggctccttctggaagcagttgctgtgaaatagcccaatttttggtatgtgctcatagtttagcatatgatgaaaagccaaactatcaagccctcaagaaaattttgaaccctcatggaatacctttaggaccactggacttttccacaaaaggacagagtataaatgtccatactccaaacagtcaaaaagttgattcacaaaaggctgcaacaaagcaagtcaacaaggcacacaataggttaatcgaaaaaaaagtccacagtgagagaagcgctgagtcctgtgcaacatggaaagtgcagaaagaggagaaactgattggattgatgaacaatgaagcagctcagatcaggcagctgggatattaa

SEQ ID NO: 286478 - DNA, 2036 bp, Artificial Sequence
  derived and/or modified sequence
attccccatgtagccgcgccctctccttcccctgggcgtctccggggcgtggacaggccgctgaaaggaaccggctgcggcctgtgtgaggctccgcgggccgctgcactgcgaggccgacgcagctggagagaagttaggcaggtcctagggagggcaggctcgagtgctgggcccgcctccccgcgggactgtaggcccgggggctccgcctcgtcgcagcggcagaagtgatgccaccaaaaagaaatgaaaaatacaaacttcctattccatttccagaaggcaaggttctggatgatatggaaggcaatcagtgggtactgggcaagaagattggctctggaggatttggattgatatatttagctttccccacaaataaaccagagaaagatgcaagacatgtagtaaaagtggaatatcaagaaaatggcccgttattttcagaacttaaattttatcagagagttgcaaaaaaagactgtatcaaaaagtggatagaacgcaaacaacttgattatttaggaattcctctgttttatggatctggtctgactgaattcaagggaagaagttacagatttatggtaatggaaagactaggaatagatttacagaagatctcaggccagaatggtacctttaaaaagtcaactgtcctgcaattaggtatccgaatgttggatgtactggaatatatacatgaaaatgaatatgttcatggtgatataaaagcagcaaatctacttttgggttacaaaaatccagaccaggtttatcttgcagattatggactttcctacagatattgtcccaatgggaaccacaaacagtatcaggaaaatcctagaaaaggccataatgggacaatagagtttaccagcttggatgcccacaagggagtagccttgtccagacgaagtgacgttgagatcctcggctactgcatgctgcggtggttgtgtgggaaacttccctgggaacagaacctgaaggaccctgtggctgtgcagactgctaaaacaaatctgttggacgagctcccccagtcagtgcttaaatgggctccttctggaagcagttgctgtgaaatagcccaatttttggtatgtgctcatagtttagcatatgatgaaaagccaaactatcaagccctcaagaaaattttgaaccctcatggaatacctttaggaccactggacttttccacaaaaggacagagtataaatgtccatactccaaacagtcaaaaagttgattcacaaaaggctgcaacaaagcaagtcaacaaggcacacaataggttaatcgaaaaaaaagtccacagtgagagaagcgctgagtcctgtgcaacatggaaagtgcagaaagaggagaaactgattggattgatgaacaatgaagcagctcagtttaggtagaagcttaggctattgatttgaacccactattttttctaatgaaagcacaaggagaagacagaaatatcaagagtctcaagaacctttgaatgaagtaaacagtttcccacaaaaaatcagctatacacaattcccaaactcattttatgagcctcatcaagattttaccagtccagatatattcaagaagtcaagatctccatcttggtataaatacacttccacagtcagcacggggatcacagacttagaaagttcaactggactttggcctacaatttcccagtttactcttagtgaagagacaaacgcagatgtttattattatcgcatcatcatacctgtccttttgatgttagtatttcttgctttattttttctctgaagatgataccaaaattccttttgataattttttaagtttccagctcttcaccgaaatgttgtattcttatttcagtgtttccttccagacatttttaaggtaattggctttaaaaagagaacatattttaacaaagtttgtggacactctaaaaaataaaattgctttgtactagaaatagtgtcatagaatagtgtcatagtacagtttggaaaacacttctgaag

SEQ ID NO: 286479 - DNA, 1375 bp, Artificial Sequence
  derived and/or modified sequence
ttcgtaccaaactggtctggcggcggttcttcgtccagacgctggcgggccagggtggagaagtgatgccaccaaaaagaaatgaaaaatacaaacttcctattccatttccagaaggcaaggttctggatgatatggaaggcaatcagtgggtactgggcaagaagattggctctggaggatttggattgatatatttagctttccccacaaataaaccagagaaagatgcaagacatgtagtaaaagtggaatatcaagaaaatggcccgttattttcagaacttaaattttatcagagagttgcaaaaaaagactgtattgtctttgtagtcaaaaagtggatagaacgcaaacaacttgattatttaggaattcctctgttttatggatctggtctgactgaattcaagggaagaagttacagatttatggtaatggaaagactaggaatagatttacagaagatctcaggccagaatggtacctttaaaaagtcaactgtcctgcaattaggtatccgaatgttggatgtactggaatatatacatgaaaatgaatatgttcatggtgatataaaagcagcaaatctacttttgggttacaaaaatccagaccaggtttatcttgcagattatggactttcctacagatattgtcccaatgggaaccacaaacagtatcaggaaaatcctagaaaaggccataatgggacaatagagtttaccagcttggatgcccacaagggagtagccttgtccagacgaagtgacgttgagatcctcggctactgcatgctgcggtggttgtgtgggaaacttccctgggaacagaacctgaaggaccctgtggctgtgcagactgctaaaacaaagtacaaattttcaagtatttcatcatgtactgcaccaggtctgaagggatacattaaagggagctaacaacacagagaagattggcattcacccaacatgacaaccaaagcaaatttctttagtttgaaaaatatgttttaaaaaaaccaaacaactaacacataaaatccattaaggtaacattgtaaaaagacatgtatttgaattacagtgcaaaatataaagtgaaatatctgttcttttacatggtatttccaaagcttagattctaggtggtagtgttttcaaggaagaatattttcaaattagcattgtacaagtatgttgaagtagtctgagcttggtacgattgatattaactgtgtaaaacagcactatgaaatgggacaaatagggcttatatttttcaagtgagagcaacatacctcttatttctgtcttggaggaagtatgttttctttcttaagaaacaaaatttttacatgagctatttatatgag

SEQ ID NO: 286480 - DNA, 717 bp, Artificial Sequence
  derived and/or modified sequence
atgcctggccgcacaggcctggccggggagatgcctgtgggctggggccctggccgggccggggccagcgagcccaatgaaagcacctgtgcccctgaggccctggatggccacctgggcgtggcccggcgggagggccccatcctgggcaccctgctgggccggggcaagggccactgccaggccctgagccagctgggccactgccccagccctgcctggaacaactacagcggcatgatggacattggagtggcccccagccgggtgggccccagcggccactgcggcgtgctgcggagccacagcaggcctggagagctggccgtggtgatgaaccacaaggtgcccaggcacaggcctgtgtcctctgtgggcacagagctgctgtgggtgcgctgtgcccccaagatggtgcagctgcccatctgctgcctgctgctgaccccagcccctggcatcggcccccgggcccacggccacctgcacaccaacctggagacccggggcctgccccggggcacccgggagagccagcaggccgagggggagggggaggccatccaggagggccgcggggcctgcaagagggcccagaggaaggagggggagggcccccggggcccctgtgtggtgcgggccggcggcgtgggctggggcacccggcaggtggccggggagccccccctggtggactgcagcacagctggcacctag

SEQ ID NO: 286481 - DNA, 357 bp, Artificial Sequence
  derived and/or modified sequence
atgcccagtaagacagccgagaacgcaaccttctactatatttccagtctgctgtccagtcggagtcctgtgttcaaccagagcccgaaggtgaaagccggacacatgctggaggccagtcagatctctgccaagaacagtgcagacttctttcaccctactccgtcgtgtagtgagttggattttaccctccacccagagctggctgactcactgggcgcaaaacacaactacaaagccacctgcctaatgcgattcctccccctccagaggcatactcgcagctggttctccctcatcctgtggtgcattcagagagacgactatttgattggcctgttctcctgcttctcttag

SEQ ID NO: 286482 - protein, 300 aa, Artificial Sequence
  derived and/or modified sequence
MEQANPLRPDGESKGGVLAHLERLETQVSRSRKQSEELQSVQAQEGALGTKIHKLRRLRDELRAVVRHRRASVKACIANVEPNQTVEINEQEALEEKLENVKAILQAYHFTGLSGKLTSRGVCVCISTAFEGNLLDSYFVDLVIQKPLRIHHHSVPVFIPLEEIAAKYLQTNIQHFLFSLCEYLNAYSGRKYQADRLQSDFAALLTGPLQRNPLCNLLSFTYKLDPGGQSFPFCARLLYKDLTATLPTDVTVTCQGVEVLSTSWEEQRASHETLFCTKPLHQVFASFTRKGEKLDMSLVS

SEQ ID NO: 286483 - DNA, 903 bp, Artificial Sequence
  derived and/or modified sequence
atggagcaagctaaccctcttagacctgatggtgagagtaagggtggggttctggcgcacctggagcggctggaaacccaggtcagcagaagtaggaagcaatccgaagaacttcagagcgtccaggctcaggaaggtgcattggggacaaaaatccataagcttcgtaggctgcgcgacgagctccgggccgtggttcggcaccggcgagcctctgtgaaagcctgtatagctaacgtggagcccaaccagactgtagaaatcaacgagcaggaggccctggaagagaaactggaaaacgtgaaagctattttacaagcatatcactttacaggcctgagcggcaagctgacaagtcgaggagtgtgtgtttgcattagcacagccttcgaggggaacctgcttgacagttactttgttgacctggtgattcaaaagcccctgcgtatccaccaccattcagtccctgtttttatcccactcgaggagatcgccgccaagtaccttcagacaaacattcaacattttctgttctccttatgcgagtacctgaacgcctacagcggccggaagtaccaggccgatcgcttacagtctgattttgctgccctgctgactggaccactgcagcgcaatccactgtgcaacctactcagtttcacttataagttagatcccggcggacaatcctttcccttttgtgcccgtttgttgtataaagatctcactgcaacgttgcctacagatgtgactgtgacctgtcagggagtggaggtcctgtctacctcatgggaggagcagcgcgcgtcccatgaaaccctgttttgtactaagcccctccaccaggtgttcgccagcttcacaagaaagggcgaaaaactagacatgtcactggtgtcctag

SEQ ID NO: 286484 - DNA, 903 bp, Artificial Sequence
  derived and/or modified sequence
atggaacaggctaatcccctgaggcccgatggggagagtaagggcggggtgcttgctcatttagagcgtcttgagacccaagtctcgcggtcccgcaaacagtcagaggagttacagagtgttcaggcccaggaaggagccctgggcaccaagattcataagctcaggagactccgtgacgaattgcgggccgttgttaggcatcgaagggcatctgttaaagcctgcattgcaaatgtcgaaccaaatcagactgtggagatcaacgaacaggaggcgcttgaggagaagctggaaaatgtaaaggctattctgcaggcgtatcatttcactgggctgtcaggcaagttgaccagtcgtggcgtgtgcgtttgtatcagcaccgcgtttgaaggaaacctgctcgactcctatttcgtggatctggtcatccaaaagccgttaaggatccaccaccactctgtgcctgttttcattcccctcgaggaaattgctgcaaagtatctgcaaacgaatatccagcatttcttgttcagtctttgcgaatacctcaatgcttactctggtcgaaaataccaggccgatcgtctgcaatctgacttcgcagccctgctgaccggtcctcttcagaggaacccactgtgtaatctcctgtccttcacctacaaactcgaccccggtgggcagagtttccctttttgcgcccgattactgtacaaggatcttacggcgaccctgcctaccgacgtcaccgttacctgccaaggtgtggaggtgctttccacgagctgggaagagcaacgcgccagccatgaaactctgttctgcaccaagcctctgcaccaggtattcgcatcgttcactcggaagggcgagaagcttgacatgtcccttgtcagctag

SEQ ID NO: 286485 - DNA, 903 bp, Artificial Sequence
  derived and/or modified sequence
atggagcaggccaaccccctgcggccagatggagagagcaagggcggcgtgctggcccacctggagcggctggagacccaggtgagccgcagcaggaagcagagcgaggagctgcagagcgtgcaggcccaggagggcgccctgggcaccaagatccacaagctgcggcggctgagagatgagctgcgggctgtggtgcgccacagaagagcctctgtgaaggcctgcatcgccaacgtggagcccaaccagacagtggagatcaatgagcaggaggccctggaggagaagctggagaatgtgaaggccatcctgcaggcctaccacttcaccggcctgagcggcaagctgaccagcagaggagtgtgtgtgtgcatcagcacagcctttgagggcaacctgctggacagctactttgtggacctggtgatccagaagcccctgcgcatccaccaccacagcgtgcctgtgttcatccccctggaggagattgctgccaagtacctgcagaccaacatccagcacttcctgttcagcctgtgtgagtacctgaatgcctacagcggcaggaagtaccaggccgaccggctgcagagcgactttgctgccctgctgaccggccccctgcagaggaaccccctgtgcaacctgctgtccttcacctacaagctggaccccggcggccagagcttccccttctgtgcccggctgctgtacaaggacctgacagccaccctgcccacagatgtgacagtgacctgccagggcgtggaggtgctgagcacctcctgggaggagcagagggccagccatgagaccctcttctgcaccaagcccctgcaccaggtgtttgccagcttcaccaggaagggggagaagctggacatgagcctggtgtcctag

SEQ ID NO: 286486 - DNA, 903 bp, Artificial Sequence
  derived and/or modified sequence
atggagcaggccaaccccctgcggcccgacggcgagagcaagggcggtgtgttggcccatttggagcgcctggagactcaggtgtcacggtctcggaagcagagtgaagagctacagtctgtccaagcgcaggagggagctctgggtacgaagatccacaagctccgcaggctgcgcgacgagcttcgtgccgtcgtgcgacatcggagagcaagcgtgaaggcctgcatcgcaaacgtagagcccaatcaaactgtggagattaacgagcaagaggccctcgaagaaaaattggagaatgttaaagccatccttcaggcttaccactttacaggcctttcaggcaagctgacgagcaggggcgtctgcgtttgcatatccactgcgtttgaaggcaacctcctggacagctactttgtcgacctggtaattcagaagccactacgaattcaccaccactcagttcccgtttttattccactcgaagagatcgctgccaagtatcttcagaccaacattcagcatttcttgttcagcctttgcgagtacctgaatgcgtactcaggacgtaagtaccaggctgatagactgcagagcgacttcgccgctctgctgacaggccctttgcagcgaaatcccctatgtaacctgttatcttttacctacaaactcgatccgggagggcagtcttttcccttctgcgctagactgctctataaggacctgactgcaacccttccaacagatgtgaccgtgacctgccagggcgtggaagtcctcagtacctcttgggaggaacagagagccagccatgaaaccctattctgcaccaaacctttgcaccaggtgtttgcctccttcactaggaaaggggaaaagcttgatatgtctttggtcagttag

SEQ ID NO: 286487 - DNA, 903 bp, Artificial Sequence
  derived and/or modified sequence
atggagcaggccaaccccctgcggcccgacggcgagagcaagggcggcgttctcgcccatctggagcgcctggagacgcaggtctctcgtagtcgaaagcagagcgaagagctccagagcgtgcaagcccaggagggggccttggggacgaagatccataagctgcggagactgcgggacgaacttcgagcagttgttcgccacaggcgcgcctctgttaaggcatgtatagccaatgtggagcccaatcagacagttgagataaatgagcaagaggccctggaagagaagctggagaacgtaaaagccatacttcaagcctatcatttcactggcctgtctggcaagcttacctctagaggggtgtgcgtgtgcatctcgacagcttttgaagggaaccttcttgactcttatttcgtcgatttggtcatacaaaaaccacttcgtattcaccaccatagcgtgcctgtatttatcccccttgaggagatagctgcaaagtacctgcagaccaatattcagcatttccttttttcattgtgcgagtatctcaatgcttactccgggagaaaatatcaagcagatagactgcaaagcgattttgccgcactgctcaccggcccactccagagaaacccactgtgtaacctgctgagctttacctacaagctggacccgggaggccagtcctttccgttctgcgctcgcctgctgtacaaggatttaaccgccacattacccaccgacgtgactgtgacgtgccagggggtggaggtgctcagcacgtcctgggaggaacagcgagcatctcatgagacccttttttgcacaaaacccttacaccaagtcttcgcctcttttacccgtaagggtgagaagctggatatgtctcttgtgtcttag

SEQ ID NO: 286488 - DNA, 903 bp, Artificial Sequence
  derived and/or modified sequence
atggagcaagcaaatcccctgagacccgacggggagagcaaggggggagtgctggcccacctggagcggctggagacccaggtgagccgatcgcgaaagcagtcggaggaactgcagtctgtgcaggctcaagaaggagccctgggtaccaaaattcataaactgcgtagattgcgtgacgagctccgcgctgtagtgaggcacaggagagcctctgtgaaagcatgtattgcaaatgtagagccaaaccagactgtggagatcaacgagcaggaagccctggaggagaaactggaaaacgtgaaggctatactgcaggcttatcactttacaggtctttcaggcaagcttaccagtaggggggtgtgcgtgtgcatttctactgctttcgagggaaaccttcttgatagttactttgttgatctcgttatccagaagcctctgaggatccaccatcatagcgttccagtttttattccgctggaagaaatcgcagccaagtacctgcagaccaatattcagcacttcctcttctcattgtgcgaatatctgaatgcgtactctggacgcaagtaccaagccgatcgcctccagagcgacttcgctgctttactgacaggccctctacagaggaacccactgtgtaatcttttgagtttcacctataaactcgaccccggaggacaatcatttccattctgtgctcgacttttatataaggatctgacagcaaccctgcccacagacgttactgttacatgtcagggagttgaagtgctcagcacaagctgggaggagcagcgggcatctcacgaaactttgttttgcaccaagcctctccatcaggttttcgccagtttcactaggaaaggcgaaaagcttgacatgagcctggtatcctag

SEQ ID NO: 286489 - DNA, 903 bp, Artificial Sequence
  derived and/or modified sequence
atggaacaggcaaatcccctacggcctgatggagagagtaaaggcggagttttggcgcacttggagcggctcgagacccaggtctctcgatcccgaaaacagtccgaagaattacagagtgttcaggcacaagagggagctctggggactaaaatccacaagctcagacggctccgtgatgagctacgcgcagttgtgcgccaccggagagctagcgttaaggcttgcatcgctaatgtggaaccgaatcaaactgttgaaatcaacgaacaggaagctcttgaggagaaactggaaaatgtgaaagcgatcctacaagcttaccatttcaccggactcagcggaaaattaacttctcgcggtgtttgcgtgtgcatctcaaccgccttcgaaggcaacctgctggacagttacttcgtggaccttgtgatccagaaaccgttgcggatacatcatcactcggtgcctgtctttattcctcttgaggagatcgcagcaaagtacttgcagacaaatatacagcacttcctgttctccttatgtgaatacctgaatgcgtatagtggcaggaagtaccaggccgataggcttcaatccgatttcgccgcactgcttactggcccacttcaacgaaaccctctgtgcaatttactttcattcacctacaagctggatccgggaggccagtcttttccgttttgcgcgaggctgttgtataaagacctgacggccacgcttccgaccgatgtgaccgtgacctgtcaaggggtcgaggttctaagtacttcttgggaggagcagcgggcatctcacgaaacactgttttgtactaaaccactgcaccaggtgttcgccagtttcacacgtaaaggcgagaagctagacatgagcctggtgagttag

SEQ ID NO: 286490 - DNA, 1625 bp, Artificial Sequence
  derived and/or modified sequence
gaagacgtggatggcgggaattctcgcttctggcctgggtgagctagaagggagaagcaaggacattggagtccctatcaccggttgcctagacaacttcatgggaaggcccttgggaatctgagatggagcaggcgaaccctttacgtccagatggcgagtccaaaggaggtgttttagctcacttggaaaggctagagacccaagtgagcagatcccgtaaacagtctgaagagctgcagagcgtgcaggcccaggaaggtgctcttggaaccaagattcataaactaaggcgtctgcgagatgagctgagggctgtggtgcggcaccggcgagccagcgtgaaagcatgtattgccaatgtagaacccaaccaaacagtggagatcaatgagcaagaagcattggaagagaaattggaaaatgtgaaagccattctgcaggcatatcattttacaggcctcagtggtaaactgaccagccgaggagtttgtgtctgcatcagtactgcttttgaggggaacctattggattcctattttgtggaccttgtcatacagaaaccactccggatacatcaccattcagtcccagtcttcattcccctggaagagatagctgcaaaatatttacagaccaacatccagcacttcctgttcagtctctgcgagtacctgaatgcttactctgggaggaagtaccaggcagaccggcttcagagtgactttgcagccctcctgactgggcccttgcagagaaacccactgtgtaacttgctgtcatttacttacaaactggatccagggggtcagtccttcccgttctgtgctagattgctgtataaggacctcacagcaactcttcccactgacgtcaccgtgacatgtcaaggagtggaagtattatccacttcatgggaggagcaacgagcatctcatgaaactctgttctgtacgaagcccttgcatcaagtgtttgcctcatttacaagaaaaggagaaaagttggatatgagtctggtctcctaatagattgttttcactgcactgggagcacatcagagaaataaatcccccctcccctgccaggtgaaaggaaatattgcactttctgttctcatgactaaggggacaggagttccagaagaacctttcaagatgatcaggaacaccaggacgagggccgtctcacctcactcggaccacatggagacctcccttcaaaatgggagccatgtcctgccccaccaagccctgtctgaagtggagcttccccgcctgtgctccctccacagtcccggaaagcccagcggcaaaggcagctttgtcccagctctgccaccctcctgctcacagtggtcagggcccctcaggggcaaggacggcagggattggaacgagggctctggaaggactgttcagccctatgcctaagacccctatgctggggacactacaggcacacacaggaatagcagggccaccctcagagctcacacatccacgaacaaatgaaggctgaggaggtttctaaacctaaagtccatgagtgtgcacttcaatccaggaaggtcgggacttccttcagtttcaaaaaataaattctcccttccggtttggactgtt

SEQ ID NO: 286491 - DNA, 4386 bp, Artificial Sequence
  derived and/or modified sequence
atgcgccccagctcttggaggtaagcggctgtgtgcgggtggtcgcggtgagtgtgcaaggccgcggtggccgcgtgacaagcctgcgctaccagtgcgcccgccggccaggagaacggagcttgtgatagatcctttcgtaacaccaagtattgtaccaggacctgcggctccgccccagaggccgccatcttcctgaccacccgaaaggccggacctactccccggtgcatcttgggatcagggcggggccctgagcgccgccatgcttttgtacggcaggatcgcaaagcacgccgggaccggttggtttggttttgaagacgtggatggcgggaattctcgcttctggcctggcaaggacattggagtccctatcaccggttgcctagacaacttcatgggaaggcccttgggaatctgagatggagcaggcgaaccctttacgtccagatggcgagtccaaaggaggtgttttagctcacttggaaaggctagagacccaagtgagcagatcccgtaaacagtctgaagagctgcagagcgtgcaggcccaggaaggtgctcttggaaccaagattcataaactaaggcgtctgcgagatgagctgagggctgtggtgcggcaccggcgagccagcgtgaaagcatgtattgccaatgtagaacccaaccaaacagtggagatcaatgagcaagaagcattggaagagaaattggaaaatgtgaaagccattctgcaggcatatcattttacaggcctcagtggtaaactgaccagccgaggagtttgtgtctgcatcagtactgcttttgaggggaacctattggattcctattttgtggaccttgtcatacagaaaccactccggatacatcaccattcagtcccagtcttcattcccctggaagagatagctgcaaaatatttacagaccaacatccagcacttcctgttcagtctctgcgagtacctgaatgcttactctgggaggaagtaccaggcagaccggcttcagagtgactttgcagccctcctgactgggcccttgcagagaaacccactgtgtaacttgctgtcatttacttacaaactggatccagggggtcagtccttcccgttctgtgctagattgctgtataaggacctcacagcaactcttcccactgacgtcaccgtgacatgtcaaggagtggaagtattatccacttcatgggaggagcaacgagcatctcatgaaactctgttctgtacgaagcccttgcatcaagtgtttgcctcatttacaagaaaaggagaaaagttggatatgagtctggtctcctaatagattgttttcactgcactgggagcacatcagagaaataaatcccccctcccctgccaggtgaaaggaaatattgcactttctgttctcatgactaaggggacaggagttccagaagaacctttcaagatgatcaggaacaccaggacgagggccgtctcacctcactcggaccacatggagacctcccttcaaaatgggagccatgtcctgccccaccaagccctgtctgaagtggagcttccccgcctgtgctccctccacagtcccggaaagcccagcggcaaaggcagctttgtcccagctctgccaccctcctgctcacagtggtcagggcccctcaggggcaaggacggcagggattggaacgagggctctggaaggactgttcagccctatgcctaagacccctatgctggggacactacaggcacacacaggaatagcagggccaccctcagagctcacacatccacgaacaaatgaaggctgaggaggtttctaaacctaaagtccatgagtgtgcacttcaatccaggaaggtcgggacttccttcagtttcaaaaaataaattctcccttccggtttggactgttgcaggctcgaggccattcaggagttgtccaccacctggtggggcagtgtgacagaggggccattggggaaggtggctagcttatcccgccccttcaagaagaaggtcagcagctcccccttccccttcacaaagatggggcctcgcctcacaaagcggaagccgtactctcggaggatgacttgggtttcttctaccacctggagagggagggggagcaagaacgtggcgttacggggggagcctagactgagggcgggtgggggctttgggtggttggagccgagcactgatccatgggtcccaagcagtacgggacactccccaaacctcccagggccaagcccttccacccgtggcgagcagcgggtgggaaggagaaccctggagtgactggctgggggcctcctctcatccagagacttctctcctaggatggccatggtcacctgggtggcagcactgttacctggaaactgccactgcctgctcttctgtccctttgcccctttcgtggagcttttctgccagacgccactgagacagatcacaaggtattagaaggttcatacccaaaggtaggccatatgcatctagaacttcagcccagattttgtggatgggtggaagtgtttcttcctgtgctgaggctagctattgcagagattcttttccacttgccccacgtctctgcctctggacttactgttcagggccagggtgggaggcaggggcacgtgggaaagcactgttccggttttgttctcatgccgagtctgagcacgtgccagctgtgccactggacatacctgaatgttgcccatgacccccgtggactccatcctgctggctacattgactgtattgccccagatgtcgtagtgtggtttccgggctccgatgaccccagccagaaccccgcctttgttcatgcctagggtagaggcataaagttcagcacagccacaggccacaccttgttatgggcctcagaagccatctcctctccagacctgtaccacaaagctcctaatgtaacacatcattgtcctcattcaacttggctgtatgctattggagggtggaaatcacatctcctgtttatccgtgtgcttgttaggtgtcagccgccaccccccccccatatgcagatttactcggcatggtagtggccagcttctaacacagctggtatttcaagtctcctgggacctcactcaggaatgataccccctcagtagaagcagcaggtgatcttaactcctttcaaagagcaggcctgtctgggaagccatgtcctcagcaggcacagcaacccctctggaaatggatcacaaactcacttctcagccaggcaggccaagcttctattgtaacagtaggcacagtatagtcggatcatcacatcagctgggtttttggtttagtcatctagagtcgtctggactaaaggtctttcaggtctccttgccctgtgagtgcgtgaacctccccacccgaattgcctcagttgtcctgagcctcatgtctctcctggtggtgggccaggcccctgcatgggaagggagcctgctgcggggcaggccagctgggggtgctcacctatgcgcagcatgaagttattgaaggactggttgttgatgttggtgagcgtatccttcatggccagcgcgaagtcggccaggtcagccaggtgctgccagcgctctctctcggacttgtcttcctgtgccaggggaccgtggagaaagtgtcaggggccgctcactgcagcagcctgctctgctgccttccctggcagtgttctgggggtggattccctacacctagatgttcaaggccttacttttcctcccacaaaggagtcgcagccacgctagctctgacttgccactgtgacaaagttcacgtagcaggtctaggcaaagactgggcaattgagcagaggagacggacctgtgagtctgaccacgaggcggaccccttcaccttggctgggcctggtcctggtccttaggttttgtcaggttgtccttgtttggatccctcaactaggtgataagcactggagggggatgacccgccttggacgtgtttctttaacctcatccatataatagggccgtgggatggttgtagaggtaaagcaggatgatggtgttttaagaccagagcttgggaccagggctcctacacctaattttctctcctggtagctgaacaaaggtctaaattagcttaacaaaagaacaggctgccgtcagccagagttctgaaggccatgctttcagtttcccttgttgacaattgctctccagttcctatgaaagcacagagccttagggggcctggccacagaacacaaccatcttaggcctgagctgtgaacagcagggggttgtgtgtctgttctgtttctctgcttgccgaactttctcaataaaccctatttcttatttata

SEQ ID NO: 286492 - DNA, 903 bp, Artificial Sequence
  derived and/or modified sequence
atggagcaggccaaccccctgagacccgacggcgagagcaagggcggcgtgctggcccacctggagagactggagacccaggtgagcagaagcagaaagcagagcgaggagctgcagagcgtgcaggcccaggagggcgccctgggcaccaagatccacaagctgagaagactgagagacgagctgagagccgtggtgagacacagaagagccagcgtgaaggcctgcatcgccaacgtggagcccaaccagaccgtggagatcaacgagcaggaggccctggaggagaagctggagaacgtgaaggccatcctgcaggcctaccacttcaccggcctgagcggcaagctgaccagcagaggcgtgtgcgtgtgcatcagcaccgccttcgagggcaacctgctggacagctacttcgtggacctggtgatccagaagcccctgagaatccaccaccacagcgtgcccgtgttcatccccctggaggagatcgccgccaagtacctgcagaccaacatccagcacttcctgttcagcctgtgcgagtacctgaacgcctacagcggcagaaagtaccaggccgacagactgcagagcgacttcgccgccctgctgaccggccccctgcagagaaaccccctgtgcaacctgctgagcttcacctacaagctggaccccggcggccagagcttccccttctgcgccagactgctgtacaaggacctgaccgccaccctgcccaccgacgtgaccgtgacctgccagggcgtggaggtgctgagcaccagctgggaggagcagagagccagccacgagaccctgttctgcaccaagcccctgcaccaggtgttcgccagcttcaccagaaagggcgagaagctggacatgagcctggtgagctag

SEQ ID NO: 286493 - DNA, 401 bp, Artificial Sequence
  derived and/or modified sequence
aacctacaaccacgtgccttcccaggaaatcaccagtcaccgtgaaaaaggaggaggaaaagaagccccacgtgaagaagcctctgaatgccttcatgttgtatatgaaggagatgagggccaaggtggtggctgagtgcaccctgaaggaaagtgcagccattaaccagatccttggaagaaaggtaagacctgccctctccctccaggccagggaggcagcgtccctgcattgatggctccgtgtggtctctgaccctctctcccccagtggcacaacctgtctcgagaagaacaggccaagtactacgagctggcccggaaggagcggcagcttcactcgcagctctacccaacctggtcagcccgggacaactatgtggggtgcacactctgggcag

SEQ ID NO: 286494 - DNA, 612 bp, Artificial Sequence
  derived and/or modified sequence
atgaacgagaagagctgcagcttccacagcaaggaggagctgagagacggccagggcgagagactgagcgccggctacagccccagctacgacaaggacaagagcgtgctggccttcagaggcatccccatcagcgagctgaagaaccacggcatcctgcaggccctgaccaccgaggcctacgagtgggagcccagagtggtgagcaccgaggtggtgagagcccaggaggagtgggaggccgtggacaccatccagcccgagaccggcagccaggccagcagcgagcagcccggccagctgatcagcttcagcgaggccctgcagcacttccagaccgtggacctgagccccttcaagaagagaatccagcccaccatcagaagaaccggcctggccgccctgagacactacctgttcggcccccccaagctgcaccagagactgagagaggagagagacctggtgctgaccatcgcccagtgcggcctggacagccaggaccccgtgcacggcagagtgctgcagaccatctacaagaagctgaccggcagcaagttcgactgcgccctgcacggcaaccactgggaggacctgggcttccagggctag

SEQ ID NO: 286495 - DNA, 363 bp, Artificial Sequence
  derived and/or modified sequence
atgaacgagaagagctgcagcttccacagcaaggaggagctgagagacggccagggcgagagactgagcgccggctacagccccagctacgacaaggacaagagcgtgctggccttcagaggcatccccatcagcgagctgaagaaccacggcatcctgcaggccctgaccaccgaggcctacgagtgggagcccagagtggtgagcaccgaggtggtgagagcccaggaggagtgggaggccgtggacaccatccagcccgagaccggcagccaggccagcagcgagcagcccggccagctgatcagcttcagcgaggccctgcagcacttccagaccgtggacctgagccccttcaagtag

SEQ ID NO: 286496 - DNA, 765 bp, Artificial Sequence
  derived and/or modified sequence
atgaacgagaagagctgcagcttccacagcaaggaggagctgagagacggccagggcgagagactgagcgccggctacagccccagctacgacaaggacaagagcgtgctggccttcagaggcatccccatcagcgagctgaagaaccacggcatcctgcaggccctgaccaccgaggcctacgagtgggagcccagagtggtgagcaccgaggtggtgagagcccaggaggagtgggaggccgtggacaccatccagcccgagaccggcagccaggccagcagcgagcagcccggccagctgatcagcttcagcgaggccctgcagcacttccagaccgtggacctgagccccttcaagaagagaatccagcccaccatcagaagaaccggcctggccgccctgagacactacctgttcggcccccccaagctgcaccagagactgagagaggagagagacctggtgctgaccatcgcccagtgcggcctggacagccaggaccccgtgcacggcagagtgctgcagaccatctacaagaagctgaccggcagcaagttcgactgcgccctgcacggcaaccactgggaggacctgggcttccagggcgccaaccccgccaccgacctgagaggcgccggcttcctggccctgctgcacctgctgtacctggtgatggacagcaagaccctgcccatggcccaggagatcttcagactgagcagacaccacatccagatcgagagaaaccagggcaagggctag

SEQ ID NO: 286497 - DNA, 612 bp, Artificial Sequence
  derived and/or modified sequence
atgaatgagaagtcttgcagctttcactccaaggaggagctcagagatggtcagggcgagcggctgtctgcaggttacagcccctcctacgataaggataagagcgttcttgccttcagaggaatccccatatcagagctgaagaaccacggtattcttcaagccctaactactgaggcctacgagtgggagccaagagttgtttccactgaagttgtgagggcccaagaggagtgggaagcagtggacaccatacaacctgaaactggttcccaagccagttccgagcagcctggccagctcataagcttctcggaagcacttcagcattttcagacagtagacctcagtccatttaagaagcgcatccaacccaccatccggcgaacaggtttggcggccctccgccactacctcttcggcccccccaagctgcaccagcgactgagagaggaaagagatctggtcttgactatcgcacagtgcgggcttgactctcaggatccagtccacggccgcgtcctacaaacaatttacaagaaactgacgggatcaaaatttgattgtgctctccacggtaatcactgggaagatctggggtttcagggatag

SEQ ID NO: 286498 - DNA, 363 bp, Artificial Sequence
  derived and/or modified sequence
atgaacgagaaaagctgtagcttccattcaaaagaagaactgagggatggacagggcgagcggctaagtgcaggctactcacctagttacgacaaggacaagtccgtgttggcgtttcgaggcatccccattagtgagctgaagaaccacggtattctgcaggctctgactactgaggcctacgagtgggagccacgcgtggtcagcaccgaagtggtccgcgctcaggaagagtgggaggcagtggatacgatccagcctgagacaggaagccaagccagtagcgagcagcccggacaacttatcagcttttctgaggccttgcaacacttccagacggtagatctgagcccctttaagtag

SEQ ID NO: 286499 - DNA, 765 bp, Artificial Sequence
  derived and/or modified sequence
atgaacgagaaatcatgttcattccactcaaaggaagagttgcgtgacggacagggggagcgtctctctgccggatacagccctagctatgacaaagacaagtccgtgcttgcttttagaggcatccccatctctgagctgaagaatcatggcattctgcaagccctcactaccgaggcttacgagtgggagccaagggttgtatcaaccgaagtggtcagagcccaggaggaatgggaggccgtcgatactatccaacccgagacagggtctcaggcttcttctgagcagcctggacaactcatctcgttctcagaagcgctgcagcattttcaaactgtggatttatcaccgttcaagaagcgaatccagcctaccataagacgtaccggactggctgccctgagacactacctgttcggcccaccaaaactccatcagagactgcgtgaggagcgtgacctggtactcaccatagcgcagtgtggcttggacagccaagacccggtgcacggacgcgtgctgcagactatctacaagaagctgactggctcaaaattcgattgtgctttacacggaaatcactgggaggacctcggcttccagggtgcgaatccagctaccgatctcagaggagccggctttctggcccttttgcaccttctgtacctggtcatggattcaaagaccctccccatggcacaagaaatcttccggctgtcaaggcatcacatccaaatcgagaggaatcagggcaaggggtag

SEQ ID NO: 286500 - DNA, 994 bp, Artificial Sequence
  derived and/or modified sequence
aaatgtagttctcggggccaggggagccggcacggaagcggctgtgcgcatgagcagatgaggcctagccgaggcggcgggacccccaagtttggaaagctcttttaacgatagtaactgtccctactgaaggccccaggagtgctccagccagagctgaggcttcgaagacctcagaggacttctctcagcactcacagaaacctcctacaccctcggatggcacaaagggactgttttcttactcttagtctgagtgactgccaaggaaggcaaaggtagagcaactggatctctggctctccacatagcttctgatctcagaccttactaaaatgctttctgggcccaaggacaaagctcacatgaacaaatgattttgagtcatgaatgaaaaatcttgctctttccatagtaaagaagaattaagagatggacagggtgaaagattgtctgctggatattctccatcatatgacaaggacaagagtgttctggctttcagaggaatccctatctcagagttgaagaaccatggcattctccaggctctgaccacagaagcttatgaatgggagccacgtgttgtgagtacagaggtggtcagagcccaagaagaatgggaagctgtggacaccatccagccagagacagggagccaagctagctcagagcagcctgggcagctaatctccttcagtgaggccctgcagcacttccagactgtggacctttcccccttcaagaaaagaatccagccaactattcgaaggactgggctcgccgccctccgacactacctcttcgggcctccaaagctccaccagcgccttcgggaagaaagggacttggtcctgaccattgctcagtgtggcctggatagccaagacccagtgcatggccgagtcctccagaccatctataagaagctgaccggctccaagtttgactgtgcccttcatggaaaccactgggaggacctgggctttcaggg

SEQ ID NO: 286501 - DNA, 1209 bp, Artificial Sequence
  derived and/or modified sequence
aataatcaaagcatcctgacaccagcagccagtttttatggcatcctggagggctgacctcatagagaggctaccctccttccttagtcacccaaagttgtgaactatgattgtcagttgtgtgtgggccatctgcccacttaggatgcaatttttgatgtgacagacattccggatgtccaattcccctgtgatgaggtatgagccttgtccagcccttttcctgagggaagcaatgtcagatgaaagacttagaattgcccaaactggctagccagctgccacatgcacagtattgctgataactgagaaaggttagaacatcgtgttgcattttgaatttctaccattgttggaaccaggtctagtattataagcccctgacccagcctgtgtgtgaggcctaaacaaagcctgagcacttcagctaagaccacccaccaaggtgacacctttagcctcacgcctttgataagctggcccaggtcccagtaactccattgtcagaaacagaccccatcccttctagtggtgctgctgccttttggacacagaatccagctcacagtcccctgtgtggtccccttttggccatcctgtggcttgggtagtaagagagctgaggcttcgaagacctcagaggacttctctcagcactcacagaaacctcctacaccctcggatggcacaaagggactgttttcttactcttagtctgagtgactgccaaggaaggcaaaggtagagcaactggatctctggctctccacatagcttctgatctcagaccttactaaaatgctttctgggcccaaggacaaagctcacatgaacaaatgattttgagtcatgaatgaaaaatcttgctctttccatagtaaagaagaattaagagatggacagggtgaaagattgtctgctggatattctccatcatatgacaaggacaagagtgttctggctttcagaggaatccctatctcagagttgaagaaccatggcattctccaggctctgaccacagaagcttatgaatgggagccacgtgttgtgagtacagaggtggtcagagcccaagaagaatgggaagctgtggacaccatccagccagagacagggagccaagctagctcagagcagcctgggcagctaatctccttcagtgaggccctgcagcacttccagactgtggacctttcccccttcaag

SEQ ID NO: 286502 - DNA, 1165 bp, Artificial Sequence
  derived and/or modified sequence
gcggctgtgcgcatgagcagatgaggcctagccgaggcggcgggacccccaagtttggaaagctcttttaacggctatgcgaaagttctgtccaaaggctgctcacagcccctgtctgactggttgtcatgatgaattgagctctctgttacctgcgcatcacaaccgagctgaggcttcgaagacctcagaggacttctctcagcactcacagaaacctcctacaccctcggatggcacaaagggactgttttcttactcttagtctgagtgactgccaaggaaggcaaaggtagagcaactggatctctggctctccacatagcttctgatctcagaccttactaaaatgctttctgggcccaaggacaaagctcacatgaacaaatgattttgagtcatgaatgaaaaatcttgctctttccatagtaaagaagaattaagagatggacagggtgaaagattgtctgctggatattctccatcatatgacaaggacaagagtgttctggctttcagaggaatccctatctcagagttgaagaaccatggcattctccaggctctgaccacagaagcttatgaatgggagccacgtgttgtgagtacagaggtggtcagagcccaagaagaatgggaagctgtggacaccatccagccagagacagggagccaagctagctcagagcagcctgggcagctaatctccttcagtgaggccctgcagcacttccagactgtggacctttcccccttcaagaaaagaatccagccaactattcgaaggactgggctcgccgccctccgacactacctcttcgggcctccaaagctccaccagcgccttcgggaagaaagggacttggtcctgaccattgctcagtgtggcctggatagccaagacccagtgcatggccgagtcctccagaccatctataagaagctgaccggctccaagtttgactgtgcccttcatggaaaccactgggaggacctgggctttcagggagcgaatccagccacagacctgagaggcgcaggcttccttgccctcctgcatctgctctacctggtgatggactcaaagaccttgccgatggcgcaggagattttccgcctgtctcgtcaccacatccagattgaaagaaatcaagggaagggatga

SEQ ID NO: 286503 - DNA, 612 bp, Artificial Sequence
  derived and/or modified sequence
atgaatgagaagagctgcagcttccacagcaaggaggagctgagagatggccagggcgagcggctgtctgctggctacagccccagctatgacaaggacaagtctgtgctggccttccggggcatccccatcagcgagctgaagaaccacggcatcctgcaggccctgaccacagaggcctatgagtgggagccccgggtggtgtccacagaggtggtgcgggcccaggaggagtgggaggccgtggacaccatccagcctgagaccggcagccaggccagcagcgagcagcccggccagctgatctccttcagcgaggccctgcagcacttccagacagtggacctgagccccttcaagaagaggatccagcccaccatccggaggacaggcctggccgccctgcggcactacctgtttggcccccccaagctgcaccagaggctgcgggaggagcgggacctggtgctgaccatcgcccagtgtggcctggacagccaggaccctgtgcacggccgggtgctgcagaccatctacaagaagctgaccggcagcaagtttgactgtgccctgcacggcaaccactgggaggacctgggcttccagggctag

SEQ ID NO: 286504 - DNA, 363 bp, Artificial Sequence
  derived and/or modified sequence
atgaatgagaagagctgcagcttccacagcaaggaggagctgagagatggccagggcgagcggctgtctgctggctacagccccagctatgacaaggacaagtctgtgctggccttccggggcatccccatcagcgagctgaagaaccacggcatcctgcaggccctgaccacagaggcctatgagtgggagccccgggtggtgtccacagaggtggtgcgggcccaggaggagtgggaggccgtggacaccatccagcctgagaccggcagccaggccagcagcgagcagcccggccagctgatctccttcagcgaggccctgcagcacttccagacagtggacctgagccccttcaagtag

SEQ ID NO: 286505 - DNA, 765 bp, Artificial Sequence
  derived and/or modified sequence
atgaatgagaagagctgcagcttccacagcaaggaggagctgagagatggccagggcgagcggctgtctgctggctacagccccagctatgacaaggacaagtctgtgctggccttccggggcatccccatcagcgagctgaagaaccacggcatcctgcaggccctgaccacagaggcctatgagtgggagccccgggtggtgtccacagaggtggtgcgggcccaggaggagtgggaggccgtggacaccatccagcctgagaccggcagccaggccagcagcgagcagcccggccagctgatctccttcagcgaggccctgcagcacttccagacagtggacctgagccccttcaagaagaggatccagcccaccatccggaggacaggcctggccgccctgcggcactacctgtttggcccccccaagctgcaccagaggctgcgggaggagcgggacctggtgctgaccatcgcccagtgtggcctggacagccaggaccctgtgcacggccgggtgctgcagaccatctacaagaagctgaccggcagcaagtttgactgtgccctgcacggcaaccactgggaggacctgggcttccagggcgccaacccagccacagacctgcggggagctggcttcctggccctgctgcacctgctgtacctggtgatggacagcaagaccctgcccatggcccaggagatcttccggctgagccgccaccacatccagattgaaagaaaccagggcaaaggatag

SEQ ID NO: 286506 - DNA, 612 bp, Artificial Sequence
  derived and/or modified sequence
atgaacgagaagagctgcagcttccacagcaaggaggagctgcgggacggacagggcgaacgcctttctgctgggtattccccctcctacgacaaggacaagagtgtgctcgcctttagaggcattcccatctctgaactgaagaatcatggtatcttgcaggccctgacaacagaggcgtacgagtgggagcccagagtggtcagcactgaggtggtccgcgcacaggaagagtgggaagccgtggacaccatacagcccgagaccggttcccaggcatcctccgaacaaccagggcagttaatttccttctcggaagccctccagcacttccaaacagtcgacctctcacctttcaagaagcgaattcagccgaccattcggcggacaggtctcgctgctctgagacattatctgttcggccctcctaagcttcatcagaggctgagggaggagagagacctggtgctcacaatcgctcagtgcgggctagacagccaggatccagtacatggccgggtactccagacaatctacaagaagctgactggcagtaaattcgactgtgcgctgcacggcaaccactgggaggatcttggattccaagggtag

SEQ ID NO: 286507 - DNA, 363 bp, Artificial Sequence
  derived and/or modified sequence
atgaacgagaagagctgcagcttccacagcaaggaggagctgcgggatggacagggtgagcgcctttctgccggatactcaccatcttacgacaaagataagagcgtcctggcctttagaggaattcctatttcagaactgaaaaatcacggcattttgcaagctctcactactgaggcttatgagtgggagccccgggtggttagcactgaggtggtgcgggcacaggaagagtgggaggccgttgataccatacagccagaaactggatcacaggcatcctctgagcagcccggccagttaatctcttttagtgaagccctgcagcactttcagaccgtggacctgagtccattcaaatag

SEQ ID NO: 286508 - DNA, 765 bp, Artificial Sequence
  derived and/or modified sequence
atgaacgagaagagctgcagcttccacagcaaggaggagctgcgggatggacagggtgagagactcagcgctggttactcaccatcttacgacaaggacaaatcggttctcgccttcagaggtattcccatttctgagctaaagaatcacggtattttgcaagcgctcacaactgaggcgtatgagtgggaaccaagagttgtgtctaccgaggtagttcgagcccaggaggagtgggaagcagttgataccattcagccggagaccggttcacaggctagcagtgagcagcccggccagctgatctctttttctgaagcacttcaacatttccagacagttgatctgagcccttttaagaaaaggatacaaccgaccatccggagaacaggcctcgccgccctgaggcactacctctttgggccccccaagctgcatcaacggcttcgcgaagagcgcgatctggttttgacaatcgctcaatgtggactcgatagtcaggatcctgtccatggccgagtgctgcagacaatctataagaagctgaccggcagcaagtttgattgtgcccttcacggtaaccattgggaggacttgggttttcagggtgctaatccggccactgacctcagaggagccggatttctcgccctcctacacctactttacctggtaatggattctaagaccctgcctatggcacaggagatctttagactgagtaggcaccacatccagatcgagcggaaccagggtaaaggctag

SEQ ID NO: 286509 - DNA, 612 bp, Artificial Sequence
  derived and/or modified sequence
atgaatgagaaatcatgctcattccactctaaagaggagctgagggacggccaaggcgagagattatccgccggttatagtccttcatatgataaggacaagtccgttctagcttttcgtgggatccccatcagtgagcttaagaaccacggcattctgcaggctcttacaacagaggcctacgaatgggagccaagagtcgtgagcactgaggtcgtgagggctcaagaggagtgggaggctgttgatactattcagccggagaccggctcccaggccagctcagagcagcctggtcaactgatctcgttctcagaagccctccagcatttccagaccgttgatctgagtcctttcaagaagcgcattcagcccacaatccgcaggacagggctcgctgcactcagacactacctatttggtcctcccaagctgcatcaaagactgcgggaagagcgagacttggtgctgacaatcgctcagtgcggattggactctcaggacccagtccacggcagagtactgcagaccatctataagaagttgacgggctcaaaatttgattgcgccctccatggaaaccactgggaggacttgggcttccagggctag

SEQ ID NO: 286510 - DNA, 363 bp, Artificial Sequence
  derived and/or modified sequence
atgaacgaaaaatcatgtagtttccacagcaaagaggaactacgtgatgggcaaggagagaggctaagcgcgggttatagccctagttatgataaggataagagcgttctcgcatttagggggatacctatttccgaactgaagaaccatggaatcctccaagctctgactactgaagcatatgaatgggaacccagggtcgtgtctactgaggtggtgagagctcaggaggagtgggaagctgtggacactatacaaccggaaacgggatcacaggcctctagcgagcagcctgggcagctgatctctttttccgaggccctgcagcatttccagacggtggacctgtctccattcaaatag

SEQ ID NO: 286511 - DNA, 765 bp, Artificial Sequence
  derived and/or modified sequence
atgaacgaaaaatcatgctcttttcactccaaagaagaactcagagacgggcagggggagcgcctgtctgcgggttattctccgagctacgataaggataagagtgttctggctttccggggaatccctatcagcgagctgaagaatcacggaatactccaggcattgactactgaagcgtatgagtgggagcctcgcgttgtctctacagaagtggtacgtgcacaggaggagtgggaagcagtcgatacgatacagcctgaaaccgggtctcaagcctcctctgagcagccaggccagctgatatccttcagtgaggccctgcaacattttcaaactgtggatctgtcccctttcaagaagagaatccagccaaccattagacgcacagggctggccgctctccgacactatctcttcggtccgccaaagcttcaccagagactacgggaagaacgtgacctggtgctgacgatcgcccagtgtggactagattctcaggaccctgtgcatgggagggtgttgcaaacaatctataaaaaactcaccggctccaaatttgactgcgctctccacggtaaccactgggaagacctcgggttccaaggagccaatcctgctactgatttgcgtggcgctggttttctggcccttttacatctactttacttggtgatggacagtaaaactttgcctatggcacaggaaatctttagactgtctcgacaccacatccaaatcgagcgaaaccaaggtaaagggtag

SEQ ID NO: 286512 - protein, 635 aa, Artificial Sequence
  derived and/or modified sequence
MSVGVSTSAPLSPTSGTSVGMSTFSIMDYVVFVLLLVLSLAIGLYHACRGWGRHTVGELLMADRKMGCLPVALSLLATFQSAVAILGVPSEIYRFGTQYWFLGCCYFLGLLIPAHIFIPVFYRLHLTSAYEYLELRFNKTVRVCGTVTFIFQMVIYMGVVLYAPSLALNAVTGFDLWLSVLALGIVCTVYTALGGLKAVIWTDVFQTLVMFLGQLAVIIVGSAKVGGLGRVWAVASQHGRISGFELDPDPFVRHTFWTLAFGGVFMMLSLYGVNQAQVQRYLSSRTEKAAVLSCYAVFPFQQVSLCVGCLIGLVMFAYYQEYPMSIQQAQAAPDQFVLYFVMDLLKGLPGLPGLFIACLFSGSLSTISSAFNSLATVTMEDLIRPWFPEFSEARAIMLSRGLAFGYGLLCLGMAYISSQMGPVLQAAISIFGMVGGPLLGLFCLGMFFPCANPPGAVVGLLAGLVMAFWIGIGSIVTSMGSSMPPSPSNGSSFSLPTNLTVATVTTLMPLTTFSKPTGLQRFYSLSYLWYSAHNSTTVIVVGLIVSLLTGRMRGRSLNPATIYPVLPKLLSLLPLSCQKRLHCRSYGQDHLDTGLFPEKPRNGVLGDSRDKEAMALDGTAYQGSSSTCILQETSL

SEQ ID NO: 286513 - DNA, 1908 bp, Artificial Sequence
  derived and/or modified sequence
atgagcgtgggcgtgagcaccagcgcccccctgagccccaccagcggcaccagcgtgggcatgagcaccttcagcatcatggactacgtggtgttcgtgctgctgctggtgctgagcctggccatcggcctgtaccacgcctgcagaggctggggcagacacaccgtgggcgagctgctgatggccgacagaaagatgggctgcctgcccgtggccctgagcctgctggccaccttccagagcgccgtggccatcctgggcgtgcccagcgagatctacagattcggcacccagtactggttcctgggctgctgctacttcctgggcctgctgatccccgcccacatcttcatccccgtgttctacagactgcacctgaccagcgcctacgagtacctggagctgagattcaacaagaccgtgagagtgtgcggcaccgtgaccttcatcttccagatggtgatctacatgggcgtggtgctgtacgcccccagcctggccctgaacgccgtgaccggcttcgacctgtggctgagcgtgctggccctgggcatcgtgtgcaccgtgtacaccgccctgggcggcctgaaggccgtgatctggaccgacgtgttccagaccctggtgatgttcctgggccagctggccgtgatcatcgtgggcagcgccaaggtgggcggcctgggcagagtgtgggccgtggccagccagcacggcagaatcagcggcttcgagctggaccccgaccccttcgtgagacacaccttctggaccctggccttcggcggcgtgttcatgatgctgagcctgtacggcgtgaaccaggcccaggtgcagagatacctgagcagcagaaccgagaaggccgccgtgctgagctgctacgccgtgttccccttccagcaggtgagcctgtgcgtgggctgcctgatcggcctggtgatgttcgcctactaccaggagtaccccatgagcatccagcaggcccaggccgcccccgaccagttcgtgctgtacttcgtgatggacctgctgaagggcctgcccggcctgcccggcctgttcatcgcctgcctgttcagcggcagcctgagcaccatcagcagcgccttcaacagcctggccaccgtgaccatggaggacctgatcagaccctggttccccgagttcagcgaggccagagccatcatgctgagcagaggcctggccttcggctacggcctgctgtgcctgggcatggcctacatcagcagccagatgggccccgtgctgcaggccgccatcagcatcttcggcatggtgggcggccccctgctgggcctgttctgcctgggcatgttcttcccctgcgccaacccccccggcgccgtggtgggcctgctggccggcctggtgatggccttctggatcggcatcggcagcatcgtgaccagcatgggcagcagcatgccccccagccccagcaacggcagcagcttcagcctgcccaccaacctgaccgtggccaccgtgaccaccctgatgcccctgaccaccttcagcaagcccaccggcctgcagagattctacagcctgagctacctgtggtacagcgcccacaacagcaccaccgtgatcgtggtgggcctgatcgtgagcctgctgaccggcagaatgagaggcagaagcctgaaccccgccaccatctaccccgtgctgcccaagctgctgagcctgctgcccctgagctgccagaagagactgcactgcagaagctacggccaggaccacctggacaccggcctgttccccgagaagcccagaaacggcgtgctgggcgacagcagagacaaggaggccatggccctggacggcaccgcctaccagggcagcagcagcacctgcatcctgcaggagaccagcctgtag

SEQ ID NO: 286514 - DNA, 84 bp, Artificial Sequence
  derived and/or modified sequence
atgagcgtgggcgtgagcaccagcgcccccctgagccccaccagcggcaccagcgtgggcatgagcaccttcagcatcatgtag

SEQ ID NO: 286515 - DNA, 1908 bp, Artificial Sequence
  derived and/or modified sequence
atgagcgtgggggtgagtacatccgcccccctaagtcctacatccggtaccagtgtgggtatgagcactttttcaattatggattatgtagtgttcgttctgctgttagtgctgtctctggccatcggattgtatcacgcctgtcggggctgggggcggcatacggtaggtgaacttttgatggccgacaggaagatgggttgcttgccagtggctctgtcacttctggcaaccttccagtctgccgtcgctatcttaggggtgccaagcgagatctatcgatttggcacacaatactggttcttaggttgctgttactttttgggcttgctcatccctgcccatattttcattcccgtgttttatagactgcacctcacttctgcttatgagtacctcgaactccgattcaataaaaccgtgcgcgtctgtggaacagtgaccttcattttccagatggtgatctatatgggtgtggtgctctacgctcccagcttggccctgaacgccgtaacaggattcgacctctggttgtcagtgctggcactggggatcgtatgcacagtttacacagccctcggtggtctcaaggccgtgatctggactgacgtatttcagaccctggttatgtttttggggcaactggccgtgatcatcgtagggagtgccaaggttggaggccttggtcgagtgtgggctgtcgccagccagcatggccggatcagtgggtttgagctcgaccccgatccttttgtacggcatacattttggaccttagcttttggcggagtgttcatgatgctttccttgtacggtgtgaatcaggcacaggttcaacgctacttatcttcacggacagagaaggccgctgttttatcatgttacgcagtttttcccttccagcaggtcagcctatgtgtcgggtgcctaatcggtttagtgatgtttgcatactaccaggagtatccgatgtccatccagcaggctcaggcagcacctgatcagttcgtgctatatttcgttatggatttactgaaaggactgcctggcttgcctgggctgtttattgcctgtctattttctggttccttgtcaaccatttccagcgccttcaattcgcttgccacagtgacaatggaagatctcattcggccttggttccctgaatttagtgaggcacgagctattatgctgtcaagaggtctcgccttcggttacgggctgctgtgtctcggcatggcttacatatcctcacaaatgggccccgtactccaggccgccatctccatttttggaatggtgggcggcccgttactcggcctgttctgccttgggatgttcttcccctgcgccaaccctcccggtgccgtcgtaggattacttgcgggtctcgtcatggccttctggataggaatcggctcaatcgttacatcaatggggagctctatgcctcctagcccatccaacgggtcaagcttctccctaccaactaatctcaccgtggcaactgtcacgactttgatgcccctcaccacattctccaaaccaaccgggctgcagcgattttacagtctgtcctacttatggtattctgcccataattccaccaccgtgatcgtagtgggcctgatcgtttctctcctaacgggcagaatgcgaggtaggtcgctgaatcctgctacaatttatcctgtgctaccaaagttactctctctgctacctttgtcctgtcagaaaagactgcactgccgctcatatgggcaggaccacctcgacaccgggctgttcccggagaagcctcgaaatggggtgcttggggattcaagagacaaagaagccatggcgttagacggcacagcttatcaggggtcctcatctacctgcatactgcaagagacctccttgtag

SEQ ID NO: 286516 - DNA, 1908 bp, Artificial Sequence
  derived and/or modified sequence
atgtcagtgggggtatccacatctgcaccactgtcgcctacctctggcactagcgttggtatgagcacgttcagtattatggattatgtagtcttcgtactgctgttggtcctgtcattggcaatagggctgtatcacgcttgccggggttggggacgtcacactgtcggtgaacttctgatggcagacaggaaaatgggctgtctgcccgtggcactgagcctgctggccacattccagagtgccgtggccattctgggggtgccctctgaaatatatagatttgggacacaatattggttccttggctgctgttactttttgggactgctcatccccgctcacatcttcatcccagtattttacagactgcacctgaccagcgcatacgagtacctagagcttagattcaataaaaccgtcagggtgtgtggaaccgttacctttattttccagatggtaatctatatgggagtagtactctacgcccccagcctcgcgctgaacgccgttaccgggttcgatctgtggctgtcggtgttagctctgggtatagtgtgtaccgtttacacggccctcggcggacttaaggcagtaatctggactgacgtctttcaaacactggtgatgtttctgggccagcttgccgtaattattgttggaagtgccaaagtcggtggattaggtcgggtgtgggccgtggctagccagcacgggcgtattagcggatttgaactggatcctgatcccttcgtccggcacacattctggaccctagctttcggcggcgtgttcatgatgttaagtctgtacggcgtgaatcaggcgcaggtgcagagatatttaagctcccggactgagaaggcagcagtcctgtcttgctacgccgtcttccccttccagcaagtgtcactctgcgtaggatgcctgattgggttagtgatgtttgcctactaccaggagtatcccatgtctatccaacaggctcaggccgcacccgatcagttcgtgctgtacttcgtgatggacttgctgaaggggctgcctggcttacctggtctattcattgcttgcctgtttagcggcagccttagcaccatcagcagtgctttcaactcgcttgcaacggtgaccatggaagatctgatccgcccatggtttcctgagttctcagaggctagagccattatgctctcacgaggtctcgctttcggatatggtctgctctgtctgggtatggcttacatcagttctcagatggggcccgtactgcaggctgctatctccatcttcgggatggtcgggggcccattacttggactcttctgcctcggcatgttttttccatgcgctaatccacctggagccgtcgttgggcttcttgcgggccttgtaatggctttttggattggcattggatcgatcgtgacttctatgggaagttctatgccgccatctccttccaacggatctagttttagcttaccaacgaacttgacagtagctaccgtgactactcttatgcctctaaccacgttcagtaagcccacaggtctgcagcgattttactctctgtcttacctgtggtactccgcccataatagtacaacggtcatcgttgtcgggctgatcgtcagtctactgaccggacgaatgagagggagatccctcaaccctgccaccatctacccagtgctgccaaagctgctgtcactccttccactttcatgtcaaaagagactccactgtcggagctacgggcaggaccacctcgataccgggctgtttccagaaaagcctcggaatggagtgcttggagattccagagacaaggaggcgatggctctggatggaacagcctatcagggaagctcaagcacgtgcattctgcaggaaacctccctctag

SEQ ID NO: 286517 - DNA, 84 bp, Artificial Sequence
  derived and/or modified sequence
atgtcagtaggagtgtctacaagcgcccccctatcccccacatctggaacgtctgtcggaatgagtacgtttagcatcatgtag

SEQ ID NO: 286518 - DNA, 1908 bp, Artificial Sequence
  derived and/or modified sequence
atgtctgtgggcgtgtccaccagcgcccccctgagccccaccagcggcacctctgtgggcatgagcaccttcagcatcatggactatgtggtgtttgtgctgctgctggtgctgagcctggccatcggcctgtaccacgcctgccggggctggggccgccacacagtgggggagctgctgatggctgacaggaagatgggctgcctgcctgtggccctgagcctgctggccaccttccagagcgctgtggccatcctgggcgtgcccagcgagatctacagatttggcacccagtactggttcctgggctgctgctacttcctgggcctgctgatcccagcccacatcttcatccctgtgttctaccgcctgcacctgaccagcgcctatgagtacctggagctgcgcttcaacaagacagtgcgggtgtgtggcaccgtgaccttcatcttccagatggtgatctacatgggcgtggtgctgtatgcccccagcctggccctgaatgctgtgacaggctttgacctgtggctgtctgtgctggccctgggcatcgtgtgcaccgtgtacacagccctgggcggcctgaaggccgtcatctggacagatgtgttccagaccctggtgatgttcctgggccagctggccgtcatcatcgtgggcagcgccaaggtgggcggcctgggccgggtgtgggccgtggccagccagcacggccgcatcagcggctttgagctggaccctgacccctttgtgcgccacaccttctggaccctggcctttggaggagtcttcatgatgctgagcctgtatggagtgaaccaggcccaggtgcagcgctacctgagcagcaggacagagaaggctgctgtgctgagctgctatgctgtgttccccttccagcaggtgtccctgtgtgtgggctgcctgattggcctggtgatgtttgcctactaccaggagtaccccatgagcatccagcaggcccaggccgccccagaccagtttgtgctgtactttgtgatggacctgctgaagggcctgcccggcctgcccggcctcttcatcgcctgcctcttcagcggcagcctgagcaccatcagcagcgccttcaacagcctggccaccgtgaccatggaggacctgatccggccctggttccctgagttcagcgaggcccgggccatcatgctgagccggggcctggccttcggctacggcctgctgtgcctgggcatggcctacatcagcagccagatgggccctgtgctgcaggccgccatcagcatcttcggcatggtgggcggccccctgctgggcctcttctgcctgggcatgttcttcccctgtgccaaccccccaggagctgtggtgggcctgctggccggcctggtgatggccttctggattggcatcggcagcatcgtgacctccatgggcagctccatgccacccagccccagcaatggcagcagcttcagcctgcccaccaacctgactgtggccaccgtgaccaccctgatgcccctgaccaccttcagcaagcccaccggcctgcagcgcttctacagcctgagctacctgtggtacagcgcccacaacagcaccaccgtgattgtggtgggcctcatcgtgtccctgctgactggaaggatgaggggccgcagcctgaacccagccaccatctaccctgtgctgcccaagctgctgagcctgctgcccctgagctgccagaagaggctgcactgccgctcctatggccaggaccacctggacaccggcctcttccctgagaagcccagaaatggagtgctgggggacagccgggacaaggaggccatggccctggatggaacagcctaccagggcagcagcagcacctgcatcctgcaggagaccagcctgtag

SEQ ID NO: 286519 - DNA, 84 bp, Artificial Sequence
  derived and/or modified sequence
atgtctgtgggcgtgtccaccagcgcccccctgagccccaccagcggcacctctgtgggcatgagcaccttcagcatcatgtag

SEQ ID NO: 286520 - DNA, 1908 bp, Artificial Sequence
  derived and/or modified sequence
atgagcgtgggcgtgagcaccagcgcccccctgagccccaccagcggtacaagtgtggggatgtccaccttttccattatggactacgttgtgttcgtgttgttactggttctgagtctggcgataggtttgtatcatgcttgtcggggttggggaagacacactgtgggtgaactgctaatggcggaccggaagatgggatgcctgccggtcgcactgtctctcttagctaccttccagtcggcggtggctattttgggcgtgcccagtgagatttataggttcggtacacaatattggttcctgggttgctgctatttcctgggcctgctaatccctgcgcatatctttatcccagtgttctataggctgcacctgacctccgcctacgagtacctcgagctgagattcaataaaacagtacgggtctgcggaacggtgacatttatattccagatggttatatatatgggagtagtattgtacgccccttctctcgccctcaatgccgtcactggatttgacctgtggctgagcgttctggcactaggcatcgtgtgcaccgtttatacagctctgggagggctcaaagctgtcatctggactgatgtgtttcagactctcgttatgttcttgggtcaactcgctgtgattattgtcggatccgcaaaggttggaggcctaggcagagtgtgggcagtggcaagccagcacgggaggataagcggatttgaactggacccagacccatttgtccggcacacattctggaccctcgcattcggcggggtgttcatgatgctgtctctttacggcgtgaaccaagctcaggtccagaggtacctctctagtcggaccgagaaggcagcagtactgtcatgttatgccgtgtttcccttccagcaggtttctttgtgtgtagggtgcctgattggattagttatgttcgcctattaccaggagtacccaatgtcgatccagcaggcccaggccgcgccagatcaattcgtcctgtatttcgtgatggacttgctgaagggcctccccggcctcccagggctgttcatcgcctgcctcttctcgggcagcctctccacgattagtagcgctttcaattcgctggcaaccgttaccatggaagatcttatcagaccttggttcccagagtttagcgaagcacgcgccatcatgctctctaggggccttgccttcggatacggcctcctgtgcttgggaatggcatatatctcgtcccagatgggtccagtgttacaggcagctatttccatcttcgggatggtggggggcccccttctgggactgttttgcctcggcatgttttttccttgcgccaatcctccaggggccgtcgtaggcttgttggcaggtctggtcatggctttctggatcggtattggctcaatcgtgacatctatgggatcgagtatgccaccatcccccagtaatggttcaagtttctcacttcctactaatctgacagtggcaaccgttaccaccctaatgccactcacaacgttttctaaacccacaggcctgcagcgcttttacagcctttcttacctctggtatagtgcacacaacagcaccaccgtgatagtggtgggcctcatcgtcagcctgctcacagggcgtatgcgaggaaggagcctgaatccagctaccatctatcctgtgctcccaaagctgctttcactgctgcccctgagctgtcagaagagattgcattgccgtagctacggccaggaccacctggatacaggactttttcctgagaaaccacgcaatggggtcctgggcgatagcagggacaaggaggcgatggctctggacggtaccgcataccagggaagtagctcgacatgtatccttcaggaaacaagcctgtag

SEQ ID NO: 286521 - DNA, 1908 bp, Artificial Sequence
  derived and/or modified sequence
atgagcgtgggcgtgagcaccagcgcccccctgagccccaccagcggcacctctgtgggcatgtcaacttttagtatcatggattacgttgtgttcgtgctcctgctggtgctgtcactggctatcggcctgtatcacgcctgccgcggatggggacgccacaccgtcggcgaactgctgatggctgacagaaagatgggctgcctcccggttgccctttcacttctcgctaccttccaatctgcggtagccatcctcggggttccatctgaaatataccgtttcggaacccagtactggttcttgggctgttgctactttctcggtctgctcatccctgcgcacatcttcatccccgtgttctatcgactgcacctcactagtgcctacgagtacctggagctgagatttaacaagaccgtacgagtatgcgggacggtcacattcatatttcagatggtgatttacatgggtgtggtactgtatgccccctcacttgccctcaacgctgtgaccggttttgacttatggttatcagtgctggctttggggatcgtgtgtacagtgtacaccgcactgggtggactgaaagctgtaatctggacagatgtctttcagactctcgtgatgttcttggggcagctggcggtgattattgtggggtccgctaaggtaggtggcctgggccgcgtctgggccgttgcctcccaacatggccgcatctccgggtttgaactggacccagatccttttgttcggcacactttttggacactggcgttcggcggggtgttcatgatgttgtccctctatggagtgaaccaggcccaggtgcagcgctatctctcttctagaacagagaaggcagctgtacttagttgttacgcagtatttccgttccagcaagtcagtctttgcgtggggtgcttgataggtttggttatgttcgcttactatcaggagtatcccatgtccatacagcaagcacaggcggccccagaccagtttgtactttatttcgtcatggacctgctaaagggattgcctggactacctggactcttcatcgcctgcctgttctccggctcactgagcactatttctagcgcatttaatagccttgccacagtaactatggaggatctgatccggccctggttccctgaattcagtgaggcgcgcgctattatgctgtcacgtggactcgcctttggatacggtctgctttgcctgggaatggcttacatatcaagccagatgggccctgttctgcaggccgccatctctattttcggcatggtgggcggcccgctcctcgggcttttctgcctgggtatgttctttccatgcgcaaatcctccaggagccgttgtcgggctcctggcaggccttgtgatggccttttggatcggaataggttcgattgtgactagcatgggcagtagtatgccgccgagtcccagcaacgggtctagcttcagcctgcccacaaacttaaccgtggccactgtgacaactctgatgcctctgactactttcagcaaacccaccggactccagcgattttatagcctgtcctacctgtggtactccgcccataactctactacagtaattgtagtgggcctgattgtgtcgctgctgacgggaaggatgaggggcaggagccttaaccccgctactatttatccagtgctgcctaagttattaagcctactgcctcttagctgtcagaaaagattgcactgtagaagttatggacaggatcatcttgacacaggcctgttcccggaaaagccacggaatggcgtgttaggggatagcagagacaaggaggccatggcactggacggtacagcataccaagggagttcctctacatgcatccttcaagaaacatcgctctag

SEQ ID NO: 286522 - DNA, 84 bp, Artificial Sequence
  derived and/or modified sequence
atgagcgtgggcgtgagcaccagcgcccccctgagccccaccagcggaaccagcgtgggtatgagtacttttagcattatgtag

SEQ ID NO: 286523 - DNA, 1908 bp, Artificial Sequence
  derived and/or modified sequence
atgtcagtgggtgtctcaacgagcgcccctctgtcaccgacctctggtacgtctgtgggcatgtccaccttcagtatcatggattatgtggtattcgtgctgctgctggttttgagtttagccatcgggctttatcacgcttgcagaggatgggggcgtcacacagtaggggagctgctcatggctgaccggaagatgggctgcctccccgtcgctctctctctgctcgccaccttccaaagtgccgtcgcgatactgggggtccccagcgaaatctatcgattcggtacccaatattggtttctgggttgttgctatttcctgggtcttctcattcccgcacacatctttatccccgtattttacaggctccatctgactagcgcttacgaatatctggagctccggtttaacaagaccgtgcgcgtatgtgggacggtgactttcatatttcagatggttatttatatgggcgtggtcctttacgccccttctttggccctgaacgcagttacagggttcgacctctggctcagcgtgctagccttggggatagtttgcactgtgtacacagcccttgggggtctgaaagccgtaatatggacggatgtgtttcagactctggtcatgtttctcggacagttggctgttattattgttggttcggccaaagttggcggattaggcagagtgtgggcagtcgcgtcccagcatggtcgcatcagtggttttgagctagatccggaccccttcgtaagacacaccttctggactcttgccttcggcggtgtgttcatgatgctctcactttacggagttaatcaggctcaggtgcagaggtacttgtctagccggactgaaaaggctgccgtactaagctgttacgcagttttcccatttcaacaagtcagtctttgcgtaggctgcctcatcggtctcgttatgtttgcatactatcaagagtatcccatgtccatccaacaggcccaggcagcccctgatcagtttgttctgtattttgtcatggatctgttgaagggcctgcctgggctgccgggactgttcattgcgtgccttttctcaggctccctctctactattagctcagccttcaacagcctcgctaccgtaaccatggaagatctgattcgtccctggtttccggaattcagcgaggctcgggcaattatgctctcccggggacttgcattcggatatggattactctgcttaggcatggcctatatctcctctcagatgggtcccgtgctgcaggccgctatctccatttttggcatggtaggcggaccactgctcggcttgttctgtctgggcatgttttttccctgtgcaaaccctcccggtgccgtggtaggacttctggcgggacttgtgatggccttttggatcggcatcggaagtatagtgacaagcatgggctcaagtatgccacccagccccagcaacggaagctcttttagcctgccaaccaatctgacagtggctacagttactaccctgatgccactgaccacctttagtaaaccaaccggactgcagcgtttctacagcctgtcttacctctggtacagcgcccacaacagtacaacggtgatcgtggttggactaatcgtgagcctcctcacaggtcggatgcggggaagaagtctgaatccagccaccatttatccggttctgcccaagctactgtcgctgctgcccctaagttgtcaaaaacggctgcattgccgtagctacggtcaagatcatcttgataccggcctttttccagagaaaccacgaaacggagtgctgggcgacagcagagacaaagaagccatggcactggatggaaccgcgtaccagggcagttcctcaacctgcatacttcaggaaacttctctgtag

SEQ ID NO: 286524 - DNA, 1908 bp, Artificial Sequence
  derived and/or modified sequence
atgtccgtgggtgtgtcaacatccgcaccccttagccccacgtcaggcacttcagtggggatgagtacattctcaattatggactatgtggtgtttgtgcttctgctggtcctcagtcttgccatcggtttgtaccatgcctgtaggggctggggaaggcatacagtaggagagttgctcatggctgataggaagatgggatgtctgcctgtggcactgagcctactggcaactttccaatccgcagtcgcgattctcggagttccctccgaaatttataggttcgggacacaatactggttcttaggttgttgttactttcttggtctcctaatcccggctcatatcttcattcctgtgttctaccgtctgcacctgacttccgcttatgagtaccttgagctacgctttaataagaccgtgagggtctgtggtaccgtaacatttatttttcagatggtgatttacatgggagttgtgctctatgccccaagcttggctttgaatgctgtgacaggcttcgacctctggctgtccgtgctagccctcggtatcgtttgtacagtgtacaccgccctggggggactgaaagcagtaatctggacagatgtcttccagactctcgtcatgttccttggacagttggctgttattatcgtgggaagtgccaaagtaggaggattaggtcgagtatgggccgttgccagccagcacggtcgtatttccggtttcgagctggatccagatccctttgtgaggcatacattctggaccttggcctttgggggagtgtttatgatgctgagcttgtacggcgtaaaccaagctcaggtgcagcgctaccttagcagccgtactgagaaagccgcagttctgtcttgctacgctgtgttccctttccagcaggtgagtttgtgcgtcggatgtctcataggacttgtcatgtttgcatactaccaggaataccctatgagtatccagcaagctcaagcagcacccgaccagttcgtcctgtactttgtaatggatctcctcaaaggtcttcctggccttcccggtctctttatagcatgcctgttctcaggttctctgagcacaatcagcagcgccttcaacagcctggccactgttaccatggaggatttgatcagaccctggttcccagaatttagcgaggctcgagccatcatgttgtcccggggattagcttttgggtatggtctactgtgcctgggcatggcctacatctcttcacagatgggcccagtcctgcaggccgctataagcatcttcggcatggtgggaggcccactgctgggactcttttgcctgggcatgttcttcccgtgcgccaaccctcctggagctgtggttggcctgcttgctgggctcgttatggccttttggattggaataggctcaattgtaacaagtatgggcagttcaatgcctccatctccaagtaacggaagctccttctctctcccaactaacctgacagttgctactgtgacaactttaatgcccctgacgacattcagcaaaccaaccggactccagagattctactccttgtcttacctatggtattccgctcacaactccacaaccgtgatagtcgttgggctgatcgtgtctctcctgacgggccgaatgagagggcgatctttaaaccctgcaactatttatccagtgctgcccaagctattgtcgttgcttccgctaagctgtcagaagcgcctgcattgccgcagctacggccaagatcacctcgatacaggactcttcccagaaaagcctcggaatggcgtgctaggcgactcacgtgacaaagaagccatggcactcgatgggaccgcgtatcagggcagtagctcaacatgtatacttcaggagacaagcctgtag

SEQ ID NO: 286525 - DNA, 84 bp, Artificial Sequence
  derived and/or modified sequence
atgtccgtgggtgttagcacatcagcccctctctctcccaccagcggaacgagcgtgggcatgtccactttcagtatcatgtag

SEQ ID NO: 286526 - DNA, 3231 bp, Artificial Sequence
  derived and/or modified sequence
gcgtggcctaagcggcccggtccagtcgccctggggctgcttgggggcttttcctgctcgtggagctctgcgctggtcttcatgcgccctagccctctttcggggatactggccgaccccctcttccttttcccctttagtgaaggcctcccccgtcgccgcgcggcttcccggagccgactgcagactccctcagcccggtgttccccgcgtccggacgccgaggtcgcggcttcgcagaaactcgggcccctccatccgccctcagaaaagggagcgatgttgatctcaggaagcacaaagggaccttcctagctctgactgaaccacggagctcaccctggacagtatcactccgtggaggaagactgtgagactgtggctggaagccagattgtagccacacatccgcccctgccctaccccagagccctggagcagcaactggctgcagatcacagacacagtgaggatatgagtgtaggggtgagcacctcagcccctctttccccaacctcgggcacaagcgtgggcatgtctaccttctccatcatggactatgtggtgttcgtcctgctgctggttctctctcttgccattgggctctaccatgcttgtcgtggctggggccggcatactgttggtgagctgctgatggcggaccgcaaaatgggctgccttccggtggcactgtccctgctggccaccttccagtcagccgtggccatcctgggtgtgccgtcagagatctaccgatttgggacccaatattggttcctgggctgctgctactttctggggctgctgatacctgcacacatcttcatccccgttttctaccgcctgcatctcaccagtgcctatgagtacctggagcttcgattcaataaaactgtgcgagtgtgtggaactgtgaccttcatctttcagatggtgatctacatgggagttgtgctctatgctccgtcattggctctcaatgcagtgactggctttgatctgtggctgtccgtgctggccctgggcattgtctgtaccgtctatacagctctgggtgggctgaaggccgtcatctggacagatgtgttccagacactggtcatgttcctcgggcagctggcagttatcattgtggggtcagccaaggtgggcggcttggggcgtgtgtgggccgtggcttcccagcacggccgcatctctgggtttgagctggatccagacccctttgtgcggcacaccttctggaccttggccttcgggggtgtcttcatgatgctctccttatacggggtgaaccaggctcaggtgcagcggtacctcagttcccgcacggagaaggctgctgtgctctcctgttatgcagtgttccccttccagcaggtgtccctctgcgtgggctgcctcattggcctggtcatgttcgcgtattaccaggagtatcccatgagcattcagcaggctcaggcagccccagaccagttcgtcctgtactttgtgatggatctcctgaagggcctgccaggcctgccagggctcttcattgcctgcctcttcagcggctctctcagcactatatcctctgcttttaattcattggcaactgttacgatggaagacctgattcgaccttggttccctgagttctctgaagcccgggccatcatgctttccagaggccttgcctttggctatgggctgctttgtctaggaatggcctatatttcctcccagatgggacctgtgctgcaggcagcaatcagcatctttggcatggttgggggaccgctgctgggactcttctgccttggaatgttctttccatgtgctaaccctcctggtgctgttgtgggcctgttggctgggctcgtcatggccttctggattggcatcgggagcatcgtgaccagcatgggctccagcatgccaccctctccctctaatgggtccagcttctccctgcccaccaatctaaccgttgccactgtgaccacactgatgcccttgactaccttctccaagcccacagggctgcagcggttctattccttgtcttacttatggtacagtgctcacaactccaccacagtgattgtggtgggcctgattgtcagtctactcactgggagaatgcgaggccggtccctgaaccctgcaaccatttacccagtgttgccaaagctcctgtccctccttccgttgtcctgtcagaagcggctccactgcaggagctacggccaggaccacctcgacactggcctgtttcctgagaagccgaggaatggtgtgctgggggacagcagagacaaggaggccatggccctggatggcacagcctatcaggggagcagctccacctgcatcctccaggagacctccctgtgatgttgactcaggaccccgcctctgtcctcactgtgccaggccatagccagaggccaccctgtagtacagggatgagtcttggtgtgttctgcagggacaggcctggatgatctagctcataccaaaggaccttgttctgagaggttcttgcctgcaggagaagctgtcacatctcaagcatgtgaggcaccgtttttctcgtcgcttgccaatctgttttttaaaggatcaggctcgtagggagcaggatcatgccagaaatagggatggaagtgcatcctctgggaaaaagataatggcttctgattcaacatagccatagtcctttgaagtaagtggctagaaacagcactctggttataattgccccagggcctgattcaggactgactctccaccataaaactggaagctgcttcccctgtagtccccatttcagtaccagttctgccagccacagtgagcccctattattactttcagattgtctgtgacactcaagcccctctcatttttatctgtctacctccattctgaagagggaggttttggtgtccctggtcctctgggaatagaagatccatttgtctttgtgtagagcaagcacgttttccacctcactgtctccatcctccacctctgagatggacacttaagagacggggcaaatgtggatccaagaaaccagggccatgaccgggtccactgtggagcagccatctatctacctgactcctgagccaggctgccgtggtgtcatttctgtcatccgtgctctgtttccttttggagtttcttctccacattatctttgttcctggggaataaaaactaccattggacctagaa

SEQ ID NO: 286527 - DNA, 2230 bp, Artificial Sequence
  derived and/or modified sequence
tccgccgcgtagagggaagcgggaaaccgagaaagaacgagggaaaagggagcgatgttgatctcaggaagcacaaagggaccttcctagctctgactgaaccacggagctactcatagagccagatcctcagctctgcagctccaggcaactctgcctcagaacagggattgcttctccagctcaccctggacagtatcactccgtggaggaagactgtgagactgtggctggaagccagattgtagccacacatccgcccctgccctaccccagagccctggagcagcaactggctgcagatcacagacacagtgaggatatgagtgtaggggtgagcacctcagcccctctttccccaacctcgggcacaagcgtgggcatgtctaccttctccatcatggactatgtggtgttcgtcctgctgctggttctctctcttgccattgggctctaccatgcttgtcgtggctggggccggcatactgttggtgagctgctgatggcggaccgcaaaatgggctgccttccggtggcactgtccctgctggccaccttccagtcagccgtggccatcctgggtgtgccgtcagagatctaccgatttgggacccaatattggttcctgggctgctgctactttctggggctgctgatacctgcacacatcttcatccccgttttctaccgcctgcatctcaccagtgcctatgagtacctggagcttcgattcaataaaactgtgcgagtgtgtggaactgtgaccttcatctttcagatggtgatctacatgggagttgtgctctatgctccgtcattggctctcaatgcagtgactggctttgatctgtggctgtccgtgctggccctgggcattgtctgtaccgtctatacagctctgggtgggctgaaggccgtcatctggacagatgtgttccagacactggtcatgttcctcgggcagctggcagttatcattgtggggtcagccaaggtgggcggcttggggcgtgtgtgggccgtggcttcccagcacggccgcatctctgggtttgagctggatccagacccctttgtgcggcacaccttctggaccttggccttcgggggtgtcttcatgatgctctccttatacggggtgaaccaggctcaggtgcagcggtacctcagttcccgcacggagaaggctgctgtgctctcctgttatgcagtgttccccttccagcaggtgtccctctgcgtgggctgcctcattggcctggtcatgttcgcgtattaccaggagtatcccatgagcattcagcaggctcaggcagccccagaccagttcgtcctgtactttgtgatggatctcctgaagggcctgccaggcctgccagggctcttcattgcctgcctcttcagcggctctctcagcactatatcctctgcttttaattcattggcaactgttacgatggaagacctgattcgaccttggttccctgagttctctgaagcccgggccatcatgctttccagaggccttgcctttggctatgggctgctttgtctaggaatggcctatatttcctcccagatgggacctgtgctgcaggcagcaatcagcatctttggcatggttgggggaccgctgctgggactcttctgccttggaatgttctttccatgtgctaaccctcctggtgctgttgtgggcctgttggctgggctcgtcatggccttctggattggcatcgggagcatcgtgaccagcatgggctccagcatgccaccctctccctctaatgggtccagcttctccctgcccaccaatctaaccgttgccactgtgaccacactgatgcccttgactaccttctccaagcccacagggctgcagcggttctattccttgtcttacttatggtacagtgctcacaactccaccacagtgattgtggtgggcctgattgtcagtctactcactgggagaatgcgaggccggtccctgaaccctgcaaccatttacccagtgttgccaaagctcctgtccctccttccgttgtcctgtcagaagcggctccactgcaggagctacggccaggaccacctcgacactggcctgtttcctgagaagccgaggaatggtgtgctgggggacagcagagacaaggaggccatggccctggatggcacagcctatcaggggagcagctccacctgcatcctccaggagacctccctgtga

SEQ ID NO: 286528 - DNA, 871 bp, Artificial Sequence
  derived and/or modified sequence
cggccgggctctggctacccacgtgtggagaccgggcaggaaaagggagcgatgttgatctcaggaagcacaaagggaccttcctagctctgactgaaccacggagctcaccctggacagtatcactccgtggaggaagactgtgagactgtggctggaagccagattgtagccacacatccgcccctgccctaccccagagccctggagcagcaactggctgcagatcacagacacagtgaggatatgagtgtaggggtgagcacctcagcccctctttccccaacctcgggcacaagcgtgggcatgtctaccttctccatcatggactatgtggtgttcgtcctgctgctggttctctctcttgccattgggctctaccatgcttgtcgtggctggggccggcatactgttggtgagctgctgatggcggaccgcaaaatgggctgccttccggtggcactgtccctgctggccaccttccagtcagccgtggccatcctgggtgtgccgtcagagatctaccgatttgggacccaatattggttcctgggctgctgctactttctggggctgctgatacctgcacacatcttcatccccgttttctaccgcctgcatctcaccagtgcctatgagtacctggagcttcgattcaataaaactgtgcgagtgtgtggaactgtgaccttcatctttcagatgtgactggctttgatctgtggctgtccgtgctggccctgggcattgtctgtaccgtctatacagctctgggtgggctgaaggccgtcatctggacagatgtgttccagacactggtcatgttcctcgggcagctggcagttatcattgtggggtcagccaaggtggg

SEQ ID NO: 286529 - protein, 147 aa, Artificial Sequence
  derived and/or modified sequence
MSVGVSTSAPLSPTSGTSVGMSTFSIMDYVVFVLLLVLSLAIGLYHACRGWGRHTVGELLMADRKMGCLPVALSLLATFQSAVAILGVPSEIYRFGTQYWFLGCCYFLGLLIPAHIFIPVFYRLHLTSAYEYLELRFNKTVRVCGTV

SEQ ID NO: 286530 - protein, 193 aa, Artificial Sequence
  derived and/or modified sequence
MSVGVSTSAPLSPTSGTSVGMSTFSIMDYVVFVLLLVLSLAIGLYHACRGWGRHTVGELLMADRKMGCLPVALSLLATFQSAVAILGVPSEIYRFGTQYWFLGCCYFLGLLIPAHIFIPVFYRLHLTSAYEYLELRFNKTVRVCGTVTFIFQMVIYMGVVLYAPSLALNAVTGFDLWLSVLALGIVCTVYTAL

SEQ ID NO: 286531 - protein, 78 aa, Artificial Sequence
  derived and/or modified sequence
MSVGVSTSAPLSPTSGTSVGMSTFSIMDYVVFVLLLVLSLAIGLYHACRGWGRHTVGELLMADRKMGCLPVALSLLAT

SEQ ID NO: 286532 - protein, 115 aa, Artificial Sequence
  derived and/or modified sequence
MSVGVSTSAPLSPTSGTSVGMSTFSIMDYVVFVLLLVLSLAIGLYHACRGWGRHTVGELLMADRKMGCLPVALSLLATFQSAVAILGVPSEIYRFGTQYWFLGCCYFLGLLIPAH

SEQ ID NO: 286533 - protein, 59 aa, Artificial Sequence
  derived and/or modified sequence
MSVGVSTSAPLSPTSGTSVGMSTFSIMDYVVFVLLLVLSLAIGLYHACRGWGRHTVGEL

SEQ ID NO: 286534 - protein, 39 aa, Artificial Sequence
  derived and/or modified sequence
MSVGVSTSAPLSPTSGTSVGMSTFSIMDYVVFVLLLVLS

SEQ ID NO: 286535 - protein, 133 aa, Artificial Sequence
  derived and/or modified sequence
MSVGVSTSAPLSPTSGTSVGMSTFSIMDYVVFVLLLVLSLAIGLYHACRGWGRHTVGELLMADRKMGCLPVALSLLATFQSAVAILGVPSEIYRFGTQYWFLGCCYFLGLLIPAHIFIPVFYRLHLTSAYEYL

SEQ ID NO: 286536 - protein, 27 aa, Artificial Sequence
  derived and/or modified sequence
MSVGVSTSAPLSPTSGTSVGMSTFSIM

SEQ ID NO: 286537 - protein, 153 aa, Artificial Sequence
  derived and/or modified sequence
MSVGVSTSAPLSPTSGTSVGMSTFSIMDYVVFVLLLVLSLAIGLYHACRGWGRHTVGELLMADRKMGCLPVALSLLATFQSAVAILGVPSEIYRFGTQYWFLGCCYFLGLLIPAHIFIPVFYRLHLTSAYEYLELRFNKTVRVCGTVTFIFQM

SEQ ID NO: 286538 - DNA, 444 bp, Artificial Sequence
  derived and/or modified sequence
atgagcgtgggcgtgagcaccagcgcccccctgagccccaccagcggcaccagcgtgggcatgagcaccttcagcatcatggactacgtggtgttcgtgctgctgctggtgctgagcctggccatcggcctgtaccacgcctgcagaggctggggcagacacaccgtgggcgagctgctgatggccgacagaaagatgggctgcctgcccgtggccctgagcctgctggccaccttccagagcgccgtggccatcctgggcgtgcccagcgagatctacagattcggcacccagtactggttcctgggctgctgctacttcctgggcctgctgatccccgcccacatcttcatccccgtgttctacagactgcacctgaccagcgcctacgagtacctggagctgagattcaacaagaccgtgagagtgtgcggcaccgtgtag

SEQ ID NO: 286539 - DNA, 582 bp, Artificial Sequence
  derived and/or modified sequence
atgagcgtgggcgtgagcaccagcgcccccctgagccccaccagcggcaccagcgtgggcatgagcaccttcagcatcatggactacgtggtgttcgtgctgctgctggtgctgagcctggccatcggcctgtaccacgcctgcagaggctggggcagacacaccgtgggcgagctgctgatggccgacagaaagatgggctgcctgcccgtggccctgagcctgctggccaccttccagagcgccgtggccatcctgggcgtgcccagcgagatctacagattcggcacccagtactggttcctgggctgctgctacttcctgggcctgctgatccccgcccacatcttcatccccgtgttctacagactgcacctgaccagcgcctacgagtacctggagctgagattcaacaagaccgtgagagtgtgcggcaccgtgaccttcatcttccagatggtgatctacatgggcgtggtgctgtacgcccccagcctggccctgaacgccgtgaccggcttcgacctgtggctgagcgtgctggccctgggcatcgtgtgcaccgtgtacaccgccctgtag

SEQ ID NO: 286540 - DNA, 237 bp, Artificial Sequence
  derived and/or modified sequence
atgagcgtgggcgtgagcaccagcgcccccctgagccccaccagcggcaccagcgtgggcatgagcaccttcagcatcatggactacgtggtgttcgtgctgctgctggtgctgagcctggccatcggcctgtaccacgcctgcagaggctggggcagacacaccgtgggcgagctgctgatggccgacagaaagatgggctgcctgcccgtggccctgagcctgctggccacctag

SEQ ID NO: 286541 - DNA, 348 bp, Artificial Sequence
  derived and/or modified sequence
atgagcgtgggcgtgagcaccagcgcccccctgagccccaccagcggcaccagcgtgggcatgagcaccttcagcatcatggactacgtggtgttcgtgctgctgctggtgctgagcctggccatcggcctgtaccacgcctgcagaggctggggcagacacaccgtgggcgagctgctgatggccgacagaaagatgggctgcctgcccgtggccctgagcctgctggccaccttccagagcgccgtggccatcctgggcgtgcccagcgagatctacagattcggcacccagtactggttcctgggctgctgctacttcctgggcctgctgatccccgcccactag

SEQ ID NO: 286542 - DNA, 180 bp, Artificial Sequence
  derived and/or modified sequence
atgagcgtgggcgtgagcaccagcgcccccctgagccccaccagcggcaccagcgtgggcatgagcaccttcagcatcatggactacgtggtgttcgtgctgctgctggtgctgagcctggccatcggcctgtaccacgcctgcagaggctggggcagacacaccgtgggcgagctgtag

SEQ ID NO: 286543 - DNA, 120 bp, Artificial Sequence
  derived and/or modified sequence
atgagcgtgggcgtgagcaccagcgcccccctgagccccaccagcggcaccagcgtgggcatgagcaccttcagcatcatggactacgtggtgttcgtgctgctgctggtgctgagctag

SEQ ID NO: 286544 - DNA, 402 bp, Artificial Sequence
  derived and/or modified sequence
atgagcgtgggcgtgagcaccagcgcccccctgagccccaccagcggcaccagcgtgggcatgagcaccttcagcatcatggactacgtggtgttcgtgctgctgctggtgctgagcctggccatcggcctgtaccacgcctgcagaggctggggcagacacaccgtgggcgagctgctgatggccgacagaaagatgggctgcctgcccgtggccctgagcctgctggccaccttccagagcgccgtggccatcctgggcgtgcccagcgagatctacagattcggcacccagtactggttcctgggctgctgctacttcctgggcctgctgatccccgcccacatcttcatccccgtgttctacagactgcacctgaccagcgcctacgagtacctgtag

SEQ ID NO: 286545 - DNA, 462 bp, Artificial Sequence
  derived and/or modified sequence
atgagcgtgggcgtgagcaccagcgcccccctgagccccaccagcggcaccagcgtgggcatgagcaccttcagcatcatggactacgtggtgttcgtgctgctgctggtgctgagcctggccatcggcctgtaccacgcctgcagaggctggggcagacacaccgtgggcgagctgctgatggccgacagaaagatgggctgcctgcccgtggccctgagcctgctggccaccttccagagcgccgtggccatcctgggcgtgcccagcgagatctacagattcggcacccagtactggttcctgggctgctgctacttcctgggcctgctgatccccgcccacatcttcatccccgtgttctacagactgcacctgaccagcgcctacgagtacctggagctgagattcaacaagaccgtgagagtgtgcggcaccgtgaccttcatcttccagatgtag

SEQ ID NO: 286546 - DNA, 444 bp, Artificial Sequence
  derived and/or modified sequence
atgtctgtcggggtgtccacaagcgctccgctgtcacccacctctggaactagcgttgggatgagcacatttagcattatggactacgtggtgttcgttttgctgctggtgctgtcccttgctatcggattgtaccatgcttgccggggttgggggcggcacactgtgggagagctgctgatggccgatagaaaaatggggtgtttgccggtagctcttagtttactcgcgacatttcaatctgctgtggccatcctgggtgtgccttctgaaatttaccgcttcgggacccagtattggttcctggggtgttgctacttcctaggactattgatacctgcacacatcttcatcccagtcttttaccgtctgcatctgactagcgcctacgaatacctggaactacgctttaacaagaccgttcgcgtctgtggaacagtgtag

SEQ ID NO: 286547 - DNA, 582 bp, Artificial Sequence
  derived and/or modified sequence
atgtctgtaggggtgtctaccagtgctccgctgtcgcctacatcagggaccagtgtcggtatgagcacattcagcatcatggattatgttgtgtttgtgttgctgctcgtgctgagtcttgctatcggactctatcatgcttgtagggggtggggtagacacactgtaggtgaactccttatggctgaccgcaagatggggtgcctgccagtggctctttccttgttagccactttccaatcagccgtagccatacttggcgttccctcagaaatttaccggttcggcacacagtattggtttctgggctgctgctattttctggggctgctgataccagctcatatctttatccctgtcttttatcgactgcacctgacaagtgcatatgaatacctcgagctccggtttaacaagaccgtgagagtgtgcgggacagttaccttcatcttccagatggtcatttacatgggagtcgtcctctacgctcctagtttggccctcaacgcagtgacaggcttcgacttatggctcagcgtcctggctctcggcattgtttgtaccgtctacacggccctttag

SEQ ID NO: 286548 - DNA, 237 bp, Artificial Sequence
  derived and/or modified sequence
atgagtgtaggcgtctcaactagtgcgcccctgtcacccacaagcggcacttctgtcggcatgtctaccttctctatcatggattatgtggtgtttgtgctgctgctggtattaagtttggccattggtctgtatcacgcatgccgggggtggggtaggcacaccgtcggagagctcctgatggctgacaggaagatgggttgtctgcccgtggctcttagcctacttgccacatag

SEQ ID NO: 286549 - DNA, 348 bp, Artificial Sequence
  derived and/or modified sequence
atgtcagtgggagtgtcgacctctgcccctctgagccccacgtcaggcacatcagtcgggatgtcgactttctccataatggattacgtcgtttttgtgctcttactagtcctatctcttgcaattggcctgtaccatgcctgccggggctgggggaggcacaccgtgggcgaactgcttatggcagaccgaaagatgggctgcctacccgtggccctatccctcctggccacattccaaagcgctgtcgctatacttggcgtgcctagcgagatttatcgctttggcacccaatactggtttctagggtgctgctatttcttgggactgttaattcccgcacattag

SEQ ID NO: 286550 - DNA, 180 bp, Artificial Sequence
  derived and/or modified sequence
atgagtgttggcgtctccacgtcagctccgctgagcccgactagcgggaccagtgtagggatgtctaccttttctatcatggattacgtagtgtttgtcctccttctggtactttctctggccattggactgtaccatgcttgcagaggttggggccgacacactgtgggggagttatag

SEQ ID NO: 286551 - DNA, 120 bp, Artificial Sequence
  derived and/or modified sequence
atgtcagtcggcgtgtccacttctgctccgctctcccccacctctggcacatcagtggggatgtcaactttttcgatcatggactatgtggtgtttgtattactactggtgctgagctag

SEQ ID NO: 286552 - DNA, 402 bp, Artificial Sequence
  derived and/or modified sequence
atgagtgtgggagtctccacctcagcccccctgagccctaccagcggcacatccgtcggcatgagcaccttctcaataatggattatgtcgtgtttgtgctcttgctggtactgtccctcgcgatcgggctataccatgcatgtcgggggtggggaaggcacacagtgggcgaactccttatggccgaccggaagatgggctgtctgccagtggccctttccctgctcgcaactttccagtccgcagtggctatcctgggagttccctcagaaatctaccgatttgggacccagtattggttcctgggctgctgctacttcctgggacttctgatccccgcacacattttcatcccagtattctacagattgcacctgactagcgcctatgagtatttatag

SEQ ID NO: 286553 - DNA, 462 bp, Artificial Sequence
  derived and/or modified sequence
atgagcgtgggcgtttctacaagcgccccactgagcccgacctcagggacaagcgtaggcatgtcaacatttagtatcatggattacgtggtctttgtgctgctgctcgtcttgtcccttgctattggactgtaccatgcttgtcgagggtggggacgccacaccgttggggagcttcttatggccgaccggaagatgggctgcttacccgtggcactttccctactggccacctttcagtccgccgtggcaattcttggagtgccgtcggagatctacagattcgggacgcagtattggtttcttggctgttgctattttttgggacttcttatcccagcacatatctttatccctgttttctaccgtctgcacctcacctctgcttacgaatacttagagctccgttttaataagacagtcagggtgtgtggcacggttaccttcatcttccagatgtag

SEQ ID NO: 286554 - DNA, 444 bp, Artificial Sequence
  derived and/or modified sequence
atgtctgtgggcgtgtccaccagcgcccccctgagccccaccagcggcacctctgtgggcatgagcaccttcagcatcatggactatgtggtgtttgtgctgctgctggtgctgagcctggccatcggcctgtaccacgcctgccggggctggggccgccacacagtgggggagctgctgatggctgacaggaagatgggctgcctgcctgtggccctgagcctgctggccaccttccagagcgctgtggccatcctgggcgtgcccagcgagatctacagatttggcacccagtactggttcctgggctgctgctacttcctgggcctgctgatcccagcccacatcttcatccctgtgttctaccgcctgcacctgaccagcgcctatgagtacctggagctgcgcttcaacaagacagtgcgggtgtgtggcaccgtgtag

SEQ ID NO: 286555 - DNA, 582 bp, Artificial Sequence
  derived and/or modified sequence
atgtctgtgggcgtgtccaccagcgcccccctgagccccaccagcggcacctctgtgggcatgagcaccttcagcatcatggactatgtggtgtttgtgctgctgctggtgctgagcctggccatcggcctgtaccacgcctgccggggctggggccgccacacagtgggggagctgctgatggctgacaggaagatgggctgcctgcctgtggccctgagcctgctggccaccttccagagcgctgtggccatcctgggcgtgcccagcgagatctacagatttggcacccagtactggttcctgggctgctgctacttcctgggcctgctgatcccagcccacatcttcatccctgtgttctaccgcctgcacctgaccagcgcctatgagtacctggagctgcgcttcaacaagacagtgcgggtgtgtggcaccgtgaccttcatcttccagatggtgatctacatgggcgtggtgctgtatgcccccagcctggccctgaatgctgtgacaggctttgacctgtggctgtctgtgctggccctgggcatcgtgtgcaccgtgtacacagccctgtag

SEQ ID NO: 286556 - DNA, 237 bp, Artificial Sequence
  derived and/or modified sequence
atgtctgtgggcgtgtccaccagcgcccccctgagccccaccagcggcacctctgtgggcatgagcaccttcagcatcatggactatgtggtgtttgtgctgctgctggtgctgagcctggccatcggcctgtaccacgcctgccggggctggggccgccacacagtgggggagctgctgatggctgacaggaagatgggctgcctgcctgtggccctgagcctgctggccacctag

SEQ ID NO: 286557 - DNA, 348 bp, Artificial Sequence
  derived and/or modified sequence
atgtctgtgggcgtgtccaccagcgcccccctgagccccaccagcggcacctctgtgggcatgagcaccttcagcatcatggactatgtggtgtttgtgctgctgctggtgctgagcctggccatcggcctgtaccacgcctgccggggctggggccgccacacagtgggggagctgctgatggctgacaggaagatgggctgcctgcctgtggccctgagcctgctggccaccttccagagcgctgtggccatcctgggcgtgcccagcgagatctacagatttggcacccagtactggttcctgggctgctgctacttcctgggcctgctgatcccagcccactag

SEQ ID NO: 286558 - DNA, 180 bp, Artificial Sequence
  derived and/or modified sequence
atgtctgtgggcgtgtccaccagcgcccccctgagccccaccagcggcacctctgtgggcatgagcaccttcagcatcatggactatgtggtgtttgtgctgctgctggtgctgagcctggccatcggcctgtaccacgcctgccggggctggggccgccacacagtgggggagctgtag

SEQ ID NO: 286559 - DNA, 120 bp, Artificial Sequence
  derived and/or modified sequence
atgtctgtgggcgtgtccaccagcgcccccctgagccccaccagcggcacctctgtgggcatgagcaccttcagcatcatggactatgtggtgtttgtgctgctgctggtgctgtcctag

SEQ ID NO: 286560 - DNA, 402 bp, Artificial Sequence
  derived and/or modified sequence
atgtctgtgggcgtgtccaccagcgcccccctgagccccaccagcggcacctctgtgggcatgagcaccttcagcatcatggactatgtggtgtttgtgctgctgctggtgctgagcctggccatcggcctgtaccacgcctgccggggctggggccgccacacagtgggggagctgctgatggctgacaggaagatgggctgcctgcctgtggccctgagcctgctggccaccttccagagcgctgtggccatcctgggcgtgcccagcgagatctacagatttggcacccagtactggttcctgggctgctgctacttcctgggcctgctgatcccagcccacatcttcatccctgtgttctaccgcctgcacctgaccagcgcctatgagtacctgtag

SEQ ID NO: 286561 - DNA, 462 bp, Artificial Sequence
  derived and/or modified sequence
atgtctgtgggcgtgtccaccagcgcccccctgagccccaccagcggcacctctgtgggcatgagcaccttcagcatcatggactatgtggtgtttgtgctgctgctggtgctgagcctggccatcggcctgtaccacgcctgccggggctggggccgccacacagtgggggagctgctgatggctgacaggaagatgggctgcctgcctgtggccctgagcctgctggccaccttccagagcgctgtggccatcctgggcgtgcccagcgagatctacagatttggcacccagtactggttcctgggctgctgctacttcctgggcctgctgatcccagcccacatcttcatccctgtgttctaccgcctgcacctgaccagcgcctatgagtacctggagctgcgcttcaacaagacagtgcgggtgtgtggcaccgtgaccttcatcttccagatgtag

SEQ ID NO: 286562 - DNA, 444 bp, Artificial Sequence
  derived and/or modified sequence
atgagcgtgggcgtgagcaccagcgcccccctgagccccaccagcggaacgagtgtggggatgagcacattttctattatggactacgtcgtctttgtcctgctcctggtgctctccttggcaatcggcctgtaccacgcatgtaggggttggggacggcataccgtgggtgaactgttgatggctgatagaaagatgggatgcctgcctgtggccttgtcccttctcgccacgttccagtccgccgtggctatcctcggggtccccagcgaaatataccgttttggtacgcagtactggtttctcgggtgttgctattttcttgggctgctgataccagcccatatcttcattccagtattctacagacttcaccttacttctgcctatgagtatttagagctgcggtttaacaaaacggttagagtttgtggcaccgtttag

SEQ ID NO: 286563 - DNA, 582 bp, Artificial Sequence
  derived and/or modified sequence
atgagcgtgggcgtgagcaccagcgcccccctgagccccaccagcgggaccagtgtgggcatgtctaccttcagcattatggactacgtggtgttcgttttgttgctggtcttgagcctggcaattggcctgtaccacgcctgtcgtgggtgggggagacacactgtcggcgagttactcatggcagatcggaaaatgggctgcctacccgtagctttgagtctgctggcaacttttcaatccgccgtggccatattaggagtgccctccgagatatacaggtttggaacccaatactggttcttagggtgctgctatttccttgggcttcttataccagcccacatctttattccagttttctataggttgcaccttaccagcgcctacgaatatctcgagttgcgtttcaataagactgtaagggtgtgtggcactgtgacatttatcttccagatggtcatctacatgggcgtcgtcctgtacgctccttcgctagctttaaatgctgtaactgggttcgatctctggctgagcgtcctcgcattggggattgtgtgcacagtttatactgccctctag

SEQ ID NO: 286564 - DNA, 237 bp, Artificial Sequence
  derived and/or modified sequence
atgagcgtgggcgtgagcaccagcgcccccctgagccccaccagcggcaccagtgtgggtatgtccacattctcgataatggactatgttgtcttcgtgctgctgctcgtcctatcactggccatcggactttatcatgcctgtcgcggctggggccgtcacactgttggagagctccttatggccgacagaaaaatgggctgtctacctgtcgcactgtcgcttttggccacatag

SEQ ID NO: 286565 - DNA, 348 bp, Artificial Sequence
  derived and/or modified sequence
atgagcgtgggcgtgagcaccagcgcccccctgagccccaccagcggtacatccgtaggtatgtccactttttctattatggattatgtggtcttcgtcctattgcttgtgctcagcctcgcgatcgggctatatcatgcctgcagaggctggggccgccacaccgttggggagctgctcatggcagatcgtaaaatgggctgtctccccgttgccttgtctctgctcgccacctttcagtccgctgtcgccatcctcggagtacccagcgagatatatagattcggcacgcagtactggttcttagggtgttgctacttcctcgggcttctcatcccagctcattag

SEQ ID NO: 286566 - DNA, 180 bp, Artificial Sequence
  derived and/or modified sequence
atgagcgtgggcgtgagcaccagcgcccccctgagccccaccagcggaaccagcgtgggtatgtccactttctcaatcatggactacgtcgtgtttgtcttattactggtgcttagtctggcaatcggtctttaccacgcctgtcgaggatggggacgccatacggttggcgagttatag

SEQ ID NO: 286567 - DNA, 120 bp, Artificial Sequence
  derived and/or modified sequence
atgagcgtgggcgtgagcaccagcgcccccctgagccccaccagcggtacttctgtcggcatgtctaccttttcaatcatggactatgttgtgtttgtgctgctcttggttctgtcttag

SEQ ID NO: 286568 - DNA, 402 bp, Artificial Sequence
  derived and/or modified sequence
atgagcgtgggcgtgagcaccagcgcccccctgagccccaccagcgggactagtgtgggaatgagtaccttttctattatggactacgtggtcttcgtgctcctcctcgttctttccctggcaatcggcctatatcatgcctgccgtggatggggccgacacactgtgggagaactgctgatggccgaccgtaagatggggtgcctccctgtagcattgagcctgctggcaacctttcaatctgcagtagctatcctcggtgtaccttccgaaatttataggtttggaacgcagtactggtttctgggctgctgttactttttagggttattaattccagcccacatttttatccccgtgttttacagattgcatttaacttccgcttacgagtatttatag

SEQ ID NO: 286569 - DNA, 462 bp, Artificial Sequence
  derived and/or modified sequence
atgagcgtgggcgtgagcaccagcgcccccctgagccccaccagcggaacaagcgtgggcatgtccacgttctcaatcatggattacgtggtcttcgtgctactactcgtgttgagtctggcaattggactgtatcatgcatgtcgaggatggggccggcacaccgtgggcgaacttctgatggccgacagaaaaatgggatgtctgcctgtggcgttaagcttactggctactttccagtctgccgtagcgattttgggggtgccatctgagatctacagatttggcacccagtactggttcctgggatgctgttattttttgggtctgctgatccctgcccatatcttcattccagtgttttaccgtcttcatctcacttccgcctatgagtacctggagctgaggttcaataagaccgttcgcgtgtgcggcacagtgacttttatctttcaaatgtag

SEQ ID NO: 286570 - DNA, 444 bp, Artificial Sequence
  derived and/or modified sequence
atgtctgtgggggtgtccactagcgcccctctgtctccaactagtggcacctccgtaggcatgagcacattttctattatggattatgtggtgttcgtgctcctgttggtactgagtttggccattggcctttaccatgcctgtcgagggtggggacgtcacaccgtaggggagctactgatggccgaccggaagatgggctgtctaccagtagccttatccctcctggcaacatttcagtctgctgtagcaattctgggcgtcccctccgaaatttatcgcttcggcacacagtattggttcctcggctgctgttacttcctggggctcctgattcctgcacacattttcattccagtgttctatcgcctccacttgacgagtgcctacgagtacttagagcttagatttaataaaacggtcagggtttgcgggaccgtgtag

SEQ ID NO: 286571 - DNA, 582 bp, Artificial Sequence
  derived and/or modified sequence
atgagcgtaggagtgtcaaccagcgccccactcagtccgactagcggtacctcggtggggatgtccactttttctatcatggactacgtagtgttcgtcttgctattggtgctgtccctggccatcggcctttaccacgcgtgccggggttggggacgtcacaccgtaggggagctcctcatggccgacaggaagatgggctgcctgcctgtagcgctctcactgctagctacctttcagtctgccgtcgccatactcggagtaccctcagaaatttatcggttcgggacacagtactggtttctgggttgctgctactttctcggcctgttgattccagcccacatatttattccagtgttttatcggttgcacctgacatccgcctatgagtatctggagctgcggttcaataaaaccgtccgggtttgcggcacagtcaccttcatctttcaaatggttatctacatgggcgttgtcttgtatgcccctagtctggcgctaaatgccgttactggattcgatctctggctctcagttctggccctcgggatcgtctgtacagtctacacagcgctgtag

SEQ ID NO: 286572 - DNA, 237 bp, Artificial Sequence
  derived and/or modified sequence
atgtcggtcggggtctccaccagcgcgccattgtcccctacatcaggtacctctgtggggatgtctacattttctatcatggattacgtcgtgttcgttctcctccttgtattgagcctggcaattggcctgtaccatgcctgcaggggctggggtcgacacactgtcggggaactgctgatggcagatagaaaaatgggatgtttaccagtggcgctgtccctgttggcgacctag

SEQ ID NO: 286573 - DNA, 348 bp, Artificial Sequence
  derived and/or modified sequence
atgtctgtaggcgtatctacaagtgctcctctaagcccaacaagtggtacgtcagttggtatgtccacattctcaataatggactatgtggtgttcgtgctcctgttagtgctgagtttagcaattggcctgtaccatgcctgtagaggatggggccgacacacggtcggagagctgctaatggcggataggaaaatgggctgcctgcccgtggccctgagcctgcttgccaccttccagtctgctgtcgctatcctgggcgtcccctcagagatttacaggtttggtacacagtactggttcctaggatgctgctatttcctcgggctgctgatacccgcacattag

SEQ ID NO: 286574 - DNA, 180 bp, Artificial Sequence
  derived and/or modified sequence
atgagcgtcggagtcagtacatccgctccattgagccctacctctggaaccagcgtggggatgtctacctttagcatcatggactacgtcgtctttgtactattgcttgtcctctccctagccattgggctatatcatgcatgcagagggtggggaagacataccgtcggagaactgtag

SEQ ID NO: 286575 - DNA, 120 bp, Artificial Sequence
  derived and/or modified sequence
atgagtgtgggagtttcgacaagtgctccgctgagccccacttctgggactagcgttgggatgtcaaccttctctatcatggactacgtcgtgtttgtactgctcctcgtgctgtcgtag

SEQ ID NO: 286576 - DNA, 402 bp, Artificial Sequence
  derived and/or modified sequence
atgagcgtcggggtgtctacgtcagctccgctgagcccaacatcgggcacttccgtgggtatgagcaccttcagcattatggactacgtggtgttcgtacttctcctggtgctatctctagccattggactgtaccatgcctgtcgcggttggggtcggcacaccgttggtgaactgttgatggccgaccgcaagatggggtgtctgccagttgctctttctttgctggccactttccagagtgcagtggcgattctgggggtccctagtgaaatctaccgtttcggaacccagtattggttccttggctgttgctacttcctcggactgctgattcccgctcacatatttatccctgtgttctaccgtctgcatctcacaagtgcctacgaatacctctag

SEQ ID NO: 286577 - DNA, 462 bp, Artificial Sequence
  derived and/or modified sequence
atgtcagtcggagtgtctaccagcgctcccctgtcccctacatctgggacaagcgttggaatgtcaactttctcaataatggattatgtggtgtttgttctgcttcttgtgcttagcttggccattggactgtatcatgcttgcaggggctggggacggcataccgtgggagagctgctaatggctgataggaaaatgggctgtctcccggtggccttatccctgctggccacatttcagagcgctgttgcaatcctcggagtaccttcggaaatctatcggttcggtacccagtactggtttctggggtgctgctactttctcggtcttctgattccggcacacatctttattccggtgttctaccgattacacctgacctccgcctacgaataccttgaacttcggttcaacaagacagttcgagtgtgcgggacggtcactttcatctttcagatgtag

SEQ ID NO: 286578 - DNA, 732 bp, Artificial Sequence
  derived and/or modified sequence
gtgggtctgagatcttaagtgcgagcggtaaggtggtggtctccgccgcgtagagggaagcgggaaaccgagaaagaacgagggaaaagggagcgatgttgatctcaggaagcacaaagggaccttcctagctctgactgaaccacggagctcaccctggacagtatcactccgtggaggaagactgtgagactgtggctggaagccagattgtagccacacatccgcccctgccctaccccagagccctggagcagcaactggctgcagatcacagacacagtgaggatatgagtgtaggggtgagcacctcagcccctctttccccaacctcgggcacaagcgtgggcatgtctaccttctccatcatggactatgtggtgttcgtcctgctgctggttctctctcttgccattgggctctaccatgcttgtcgtggctggggccggcatactgttggtgagctgctgatggcggaccgcaaaatgggctgccttccggtggcactgtccctgctggccaccttccagtcagccgtggccatcctgggtgtgccgtcagagatctaccgatttgggacccaatattggttcctgggctgctgctactttctggggctgctgatacctgcacacatcttcatccccgttttctaccgcctgcatctcaccagtgcctatgagtacctggagcttcgattcaataaaactgtgcgagtgtgtggaactgtga

SEQ ID NO: 286579 - DNA, 917 bp, Artificial Sequence
  derived and/or modified sequence
atccgccctcagtaaacatggcggcacggcgagcggggcgggcagggggcgggcagggggcggggcccccgcgggctcccggccagggctctcggccgggctctggctacccacgtgtggagaccgggcaggaaaagggagcgatgttgatctcaggaagcacaaagggaccttcctagctctgactgaaccacggagctcaccctggacagtatcactccgtggaggaagactgtgagactgtggctggaagccagattgtagccacacatccgcccctgccctaccccagagccctggagcagcaactggctgcagatcacagacacagtgaggatatgagtgtaggggtgagcacctcagcccctctttccccaacctcgggcacaagcgtgggcatgtctaccttctccatcatggactatgtggtgttcgtcctgctgctggttctctctcttgccattgggctctaccatgcttgtcgtggctggggccggcatactgttggtgagctgctgatggcggaccgcaaaatgggctgccttccggtggcactgtccctgctggccaccttccagtcagccgtggccatcctgggtgtgccgtcagagatctaccgatttgggacccaatattggttcctgggctgctgctactttctggggctgctgatacctgcacacatcttcatccccgttttctaccgcctgcatctcaccagtgcctatgagtacctggagcttcgattcaataaaactgtgcgagtgtgtggaactgtgaccttcatctttcagatggtgatctacatgggagttgtgctctatgctccgtcattggctctcaatgcagtgactggctttgatctgtggctgtccgtgctggccctgggcattgtctgtaccgtctatacagctctg

SEQ ID NO: 286580 - DNA, 741 bp, Artificial Sequence
  derived and/or modified sequence
gtcgccctggggctgcttgggggcttttcctgctcgtggagctctgcgctggtcttcatgcgccctagccctctttcggggatactggccgaccccctcttccttttcccctttagtgaaggcctcccccgtcgccgcgcggcttcccggagccgactgcagactccctcagcccggtgttccccgcgtccggacgccgaggtcgcggcttcgcagaaactcgggcccctccatccgccctcagaaaagggagcgatgttgatctcaggaagcacaaagggaccttcctagctctgactgaaccacggagccgctcttcctgcgtctgctgttgactgtgatgttgcaggtagaggggctgagagctcaccctggacagtatcactccgtggaggaagactgtgagactgtggctggaagccagattgtagccacacatccgcccctgccctaccccagagccctggagcagcaactggctgcagatcacagacacagtgaggatatgagtgtaggggtgagcacctcagcccctctttccccaacctcgggcacaagcgtgggcatgtctaccttctccatcatggactatgtggtgttcgtcctgctgctggttctctctcttgccattgggctctaccatgcttgtcgtggctggggccggcatactgttggtgagctgctgatggcggaccgcaaaatgggctgccttccggtggcactgtccctgctggccacctt

SEQ ID NO: 286581 - DNA, 676 bp, Artificial Sequence
  derived and/or modified sequence
gagcgtgagccggtgccgagaggcaccggggagcggcgtctgagccggggcggggacaagggggcggggaggggcggagcgagccggcctccggcgtgggtctgagatcttaagtgcgagcggaaaagggagcgatgttgatctcaggaagcacaaagggaccttcctagctctgactgaaccacggagctcaccctggacagtatcactccgtggaggaagactgtgagactgtggctggaagccagattgtagccacacatccgcccctgccctaccccagagccctggagcagcaactggctgcagatcacagacacagtgaggatatgagtgtaggggtgagcacctcagcccctctttccccaacctcgggcacaagcgtgggcatgtctaccttctccatcatggactatgtggtgttcgtcctgctgctggttctctctcttgccattgggctctaccatgcttgtcgtggctggggccggcatactgttggtgagctgctgatggcggaccgcaaaatgggctgccttccggtggcactgtccctgctggccaccttccagtcagccgtggccatcctgggtgtgccgtcagagatctaccgatttgggacccaatattggttcctgggctgctgctactttctggggctgctgatacctgcacacat

SEQ ID NO: 286582 - DNA, 570 bp, Artificial Sequence
  derived and/or modified sequence
acgcacggctggccagcgaccctgcttcagcccgacctcaaacttgcttctgtacctcggtgaaggcctcccccgtcgccgcgcggcttcccggagccgactgcagactccctcagcccggtgttccccgcgtccggacgccgaggtcgcggcttcgcagaaactcgggcccctccatccgccctcagaaaagggagcgatgttgatctcaggaagcacaaagggaccttcctagctctgactgaaccacggagctcaccctggacagtatcactccgtggaggaagactgtgagactgtggctggaagccagattgtagccacacatccgcccctgccctaccccagagccctggagcagcaactggctgcagatcacagacacagtgaggatatgagtgtaggggtgagcacctcagcccctctttccccaacctcgggcacaagcgtgggcatgtctaccttctccatcatggactatgtggtgttcgtcctgctgctggttctctctcttgccattgggctctaccatgcttgtcgtggctggggccggcatactgttggtgagct

SEQ ID NO: 286583 - DNA, 599 bp, Artificial Sequence
  derived and/or modified sequence
atatggcgttcgtgcgtagagagattacacaagaggcagaggacccgtctgtagaaagaacttaaagttattctaaaattaaggggcgaaatcaagtttcacaggtctttgaaagtcggcaggactggggcgccgaaggcctgcacgactgaaggcctcccccgtcgccgcgcggcttcccggagccgactgcagactccctcagcccggtgttccccgcgtccggacgccgaggtcgcggcttcgcagaaactcgggcccctccatccgccctcagaaaagggagcgatgttgatctcaggaagcacaaagggaccttcctagctctgactgaaccacggagctcaccctggacagtatcactccgtggaggaagactgtgagactgtggctggaagccagattgtagccacacatccgcccctgccctaccccagagccctggagcagcaactggctgcagatcacagacacagtgaggatatgagtgtaggggtgagcacctcagcccctctttccccaacctcgggcacaagcgtgggcatgtctaccttctccatcatggactatgtggtgttcgtcctgctgctggttctctc

SEQ ID NO: 286584 - DNA, 725 bp, Artificial Sequence
  derived and/or modified sequence
atatcgcacagggaaggtcctcatctctgaagatcactattcgaacttatttattatgctttctgcagagacttctcaatctgacagccctagtttggcgcggtgtaaaacgaccgcaggaaaagggagcgatgttgatctcaggaagcacaaagggaccttcctagctctgactgaaccacggagctcaccctggacagtatcactccgtggaggaagactgtgagactgtggctggaagccagattgtagccacacatccgcccctgccctaccccagagccctggagcagcaactggctgcagatcacagacacagtgaggatatgagtgtaggggtgagcacctcagcccctctttccccaacctcgggcacaagcgtgggcatgtctaccttctccatcatggactatgtggtgttcgtcctgctgctggttctctctcttgccattgggctctaccatgcttgtcgtggctggggccggcatactgttggtgagctgctgatggcggaccgcaaaatgggctgccttccggtggcactgtccctgctggccaccttccagtcagccgtggccatcctgggtgtgccgtcagagatctaccgatttgggacccaatattggttcctgggctgctgctactttctggggctgctgatacctgcacacatcttcatccccgttttctaccgcctgcatctcaccagtgcctatgagtacctg

SEQ ID NO: 286585 - DNA, 542 bp, Artificial Sequence
  derived and/or modified sequence
agtaccagatatcgcacagggaaggtcctcatctctgaagatcactattcgaacttatttattatgctttctgcagagacttctcaatctgacagccctagtttggcgcggtgtaaaacgaccgcagtgaaggcctcccccgtcgccgcgcggcttcccggagccgactgcagactccctcagcccggtgttccccgcgtccggacgccgaggtcgcggcttcgcagaaactcgggcccctccatccgccctcagaaaagggagcgatgttgatctcaggaagcacaaagggaccttcctagctctgactgaaccacggagctcaccctggacagtatcactccgtggaggaagactgtgagactgtggctggaagccagattgtagccacacatccgcccctgccctaccccagagccctggagcagcaactggctgcagatcacagacacagtgaggatatgagtgtaggggtgagcacctcagcccctctttccccaacctcgggcacaagcgtgggcatgtctaccttctccatcatg

SEQ ID NO: 286586 - protein, 152 aa, Artificial Sequence
  derived and/or modified sequence
MAHLRGFANQHSRVDPEELFTKLDRIGKGSFGEVYKGIDNHTKEVVAIKIIDLEEAEDEIEDIQQEITVLSQCDSPYITRYFGSYLKSTKLWIIMEYLGGGSALDLLKPGPLEETYIATILREILKGLDYLHSERKIHRDIKAANVLLSEQG

SEQ ID NO: 286587 - DNA, 423 bp, Artificial Sequence
  derived and/or modified sequence
atgctgcaggccgccgacttcatcgagagaaccgagaccgccggcgagctgagcagaggcctgatcggcgtgctgagcagccagatcagctggtgcctgctgaacgtgaacctgagcaagctgcccaccagactgcagagactgagctgcagcgtgctgaacagcagccccgccatgagaggcggcgccagaggcagaccccagctgaccctggagagacccctgagacccggctgcagactgcacagctgcagcgaggccgagaagggcggcttcgtgagaagaaaggagatcatcctgttccccccctgcgaggaccccgccagaggctggctgagcgccaaccccggcagagagcccagccccggcatctgctggcacctgaacctgggcctgcccagcctgcacaactgcgaggagtag

SEQ ID NO: 286588 - protein, 480 aa, Artificial Sequence
  derived and/or modified sequence
MAHVGDCTQTPWLPVLVVSLMCSARAEYSNCGENEYYNQTTGLCQECPPCGPGEEPYLSCGYGTKDEDYGCVPCPAEKFSKGGYQICRRHKDCEGFFRATVLTPGDMENDAECGPCLPGYYMLENRPRNIYGMVCYSCLLAPPNTKECVGATSGASANFPGTSGSSTLSPFQHAHKELSGQGHLATALIIAMSTIFIMAIAIVLIIMFYILKTKPSAPGDGPHAPVPCFLDSPSTPPVGEPGCSLPPLSPACCTSHPGKSVEAQVSKDEEKKEAPDNVVMFSEKDEFEKLTATPAKPTKSENDASSENEQLLSRSVDSDEEPAPDKQGSPELCLLSLVHLAREKSATSNKSAGIQSRRKKILDVYANVCGVVEGLSPTELPFDCLEKTSRMLSSTYNSEKAVVKTWRHLAESFGLKRDEIGGMTDGMQLFDRISTAGYSIPELLTKLVQIERLDAVESLCADILEWAGVVPPASQPHAAS

SEQ ID NO: 286589 - DNA, 1443 bp, Artificial Sequence
  derived and/or modified sequence
atggcccacgtgggcgactgcacccagaccccctggctgcccgtgctggtggtgagcctgatgtgcagcgccagagccgagtacagcaactgcggcgagaacgagtactacaaccagaccaccggcctgtgccaggagtgccccccctgcggccccggcgaggagccctacctgagctgcggctacggcaccaaggacgaggactacggctgcgtgccctgccccgccgagaagttcagcaagggcggctaccagatctgcagaagacacaaggactgcgagggcttcttcagagccaccgtgctgacccccggcgacatggagaacgacgccgagtgcggcccctgcctgcccggctactacatgctggagaacagacccagaaacatctacggcatggtgtgctacagctgcctgctggccccccccaacaccaaggagtgcgtgggcgccaccagcggcgccagcgccaacttccccggcaccagcggcagcagcaccctgagccccttccagcacgcccacaaggagctgagcggccagggccacctggccaccgccctgatcatcgccatgagcaccatcttcatcatggccatcgccatcgtgctgatcatcatgttctacatcctgaagaccaagcccagcgcccccggcgacggcccccacgcccccgtgccctgcttcctggacagccccagcaccccccccgtgggcgagcccggctgcagcctgccccccctgagccccgcctgctgcaccagccaccccggcaagagcgtggaggcccaggtgagcaaggacgaggagaagaaggaggcccccgacaacgtggtgatgttcagcgagaaggacgagttcgagaagctgaccgccacccccgccaagcccaccaagagcgagaacgacgccagcagcgagaacgagcagctgctgagcagaagcgtggacagcgacgaggagcccgcccccgacaagcagggcagccccgagctgtgcctgctgagcctggtgcacctggccagagagaagagcgccaccagcaacaagagcgccggcatccagagcagaagaaagaagatcctggacgtgtacgccaacgtgtgcggcgtggtggagggcctgagccccaccgagctgcccttcgactgcctggagaagaccagcagaatgctgagcagcacctacaacagcgagaaggccgtggtgaagacctggagacacctggccgagagcttcggcctgaagagagacgagatcggcggcatgaccgacggcatgcagctgttcgacagaatcagcaccgccggctacagcatccccgagctgctgaccaagctggtgcagatcgagagactggacgccgtggagagcctgtgcgccgacatcctggagtgggccggcgtggtgccccccgccagccagccccacgccgccagctag

SEQ ID NO: 286590 - DNA, 1443 bp, Artificial Sequence
  derived and/or modified sequence
atggctcatgtaggcgactgcacacagacgccctggttgccagttctggtcgtgagtttgatgtgtagcgccagagcagagtactccaattgtggcgaaaacgagtactacaaccagaccaccgggctctgtcaagaatgccctccctgcggtcctggagaggagccgtatctttcatgtggttatgggacaaaggatgaggattacggctgtgtgccttgtcccgcggagaagttttctaaaggcggatatcagatatgccggcggcacaaagattgtgaaggattctttcgtgcaacagtactgaccccaggtgatatggagaacgacgccgagtgcggaccatgcttgcctggatattatatgctcgaaaacaggccacgaaatatctatgggatggtatgttactcttgtctgcttgcgcctccaaacactaaggagtgcgtcggtgccacatccggggcgagtgccaactttcccggaacaagtgggtccagtacgctctccccatttcagcatgcacacaaagagcttagtggtcagggacacctggccacagccctgatcatcgcgatgtcgactatattcattatggccattgctattgtcctgatcatcatgttttacattttgaaaacgaagccatcagctcccggcgatggaccccacgcccccgtgccttgctttctggacagtccgagcacaccccccgtcggcgagcccgggtgctcattgcctccactaagccccgcatgctgtacatcccacccagggaagtccgtcgaggcccaggtgagcaaagatgaggagaagaaggaagcccccgataacgtcgtgatgttctctgagaaggatgagtttgagaagcttaccgcaacgcccgccaaaccaaccaaatcagaaaacgatgcatcaagtgagaatgaacaactgctgtcaaggtcagtggattcagacgaggaaccagcgccagacaaacagggctcccccgagctgtgcctgctgtctctggtgcatctcgctagagaaaaaagcgccacaagcaacaagtcagctggcatccaatcccgccggaaaaaaatcttagacgtctatgccaacgtgtgtggagtggtggaggggctgagcccaaccgagttacctttcgattgtctggagaagaccagtcggatgctttcctctacatacaattcagagaaagccgttgttaaaacttggcgtcatctggcggagagcttcgggctcaagagagatgaaatcggagggatgacggacgggatgcagctgtttgatcgcatctccacagcgggttatagcatcccagaactcctgacgaagttggtccaaatagagagacttgacgccgttgaatcactctgtgcagacatcctggaatgggctggtgttgtcccccccgccagccagcctcatgctgcgagctag

SEQ ID NO: 286591 - DNA, 1443 bp, Artificial Sequence
  derived and/or modified sequence
atggcccacgtcggcgattgcactcagaccccctggctgccagttctggtcgtgagtctaatgtgctctgcgagagccgaatactcaaactgcggagagaacgaatactataaccagacaaccgggctctgtcaggagtgccccccatgtggccctggcgaggaaccttacctgtcttgcggttacggaacgaaggatgaggattacgggtgcgtaccctgccctgccgagaaattctccaaaggcggctatcagatatgcaggaggcacaaggactgtgaggggttttttcgggccaccgtgttgacccccggtgatatggaaaatgatgctgagtgcgggccatgcctgcccggttactacatgctggagaacaggcctcggaatatctacgggatggtttgttacagctgcctgctggcaccccccaacacgaaggagtgtgtaggagccacctcaggcgcttctgcgaacttcccgggcactagtgggtcctcaactctgtccccctttcagcacgcccacaaggagctgtctggccagggacatctggcaactgcattaatcatcgcaatgagcacaattttcataatggccattgctatcgttttgataatcatgttttatatcttgaagacaaagccatccgcccccggcgacgggccacacgcccccgtgccctgtttcctggacagcccaagcactccccctgtgggcgagcccggctgtagtttgcctccattgtcccctgcctgctgcactagccacccgggcaagagtgttgaagctcaggtctccaaggatgaggagaaaaaggaagcgcccgataatgtggtgatgttctccgaaaaggatgagtttgaaaagctgacggcaaccccagcaaaacctactaaatctgagaatgacgcctcttccgagaacgagcagctgttgtcccgaagcgtggactctgacgaagagccagcccctgacaaacagggttcgccagagctgtgcttactgtcgctcgtgcatttggcgagggagaagagcgccacaagcaacaaaagtgcaggtattcagtcccggcggaaaaaaatcctagatgtttatgccaatgtatgcggtgttgtagagggactgtctcctacagagctgccgttcgattgcctcgaaaagaccagtcgaatgctatcgtcaacctataattccgaaaaggctgtggtgaaaacgtggaggcatttggccgagagctttggtctgaaaagagatgaaatcggcggaatgaccgatggtatgcagttgttcgatcggattagcaccgcgggctacagcattcccgaattgctgaccaaactggtccaaattgaacgactggatgctgtagaaagcctgtgcgccgacatccttgagtgggctggagttgtgcccccagcctctcagccccatgccgcctcttag

SEQ ID NO: 286592 - DNA, 1443 bp, Artificial Sequence
  derived and/or modified sequence
atggcccacgtgggggactgcacccagaccccctggctgcctgtgctggtggtgtccctgatgtgcagcgcccgggcagagtacagcaactgtggagaaaatgagtactacaaccagaccaccggcctgtgccaggagtgccccccctgtggccctggagaggagccctacctgagctgtggctacggcaccaaggatgaagattatggctgtgtgccctgcccagctgagaagttcagcaaaggaggctaccagatctgccgccgccacaaggactgtgagggcttcttccgggccaccgtgctgacccctggggacatggagaatgatgctgaatgtggcccctgcctgcccggctactacatgctggagaaccggcccaggaacatctacggcatggtgtgctacagctgcctgctggccccacccaacaccaaggaatgtgtgggcgccaccagcggggccagcgccaacttccctggcaccagcggcagcagcaccctgagccccttccagcacgcccacaaggagctgagcggccagggccacctggccacagccctgatcatcgccatgagcaccatcttcatcatggccatcgccatcgtgctgatcatcatgttctacatcctgaagaccaagcccagcgcccctggagatggcccccacgcccctgtgccctgcttcctggacagccccagcaccccacctgtgggggagcccggctgcagcctgccccccctgagccctgcctgctgcaccagccaccctgggaagtctgtggaggcccaggtgtccaaggatgaggagaagaaggaggccccagacaacgtggtgatgttcagcgagaaggatgaatttgagaagctgacagccaccccagccaagcccaccaagtcagaaaatgatgccagcagtgaaaatgagcagctgctgagccgctctgtggacagtgatgaggagcccgccccagacaagcagggcagccctgagctgtgcctgctgagcctggtgcacctggcccgggagaagagcgccaccagcaacaagtctgctggcatccagagcaggaggaagaagatcctggatgtgtatgccaacgtgtgtggggtggtggagggcctgagccccacagagctgccctttgactgcctggagaagaccagcaggatgctgagcagcacctacaacagcgagaaggctgtggtgaagacctggaggcacctggccgagagctttggcctgaagagagatgagatcggcggcatgacagatggcatgcagctgtttgaccgcatcagcacagctggctacagcatccctgagctgctgaccaagctggtgcagatcgagcggctggatgctgtggagagcctgtgtgccgacatcctggagtgggccggcgtggtgcccccagccagccagccccacgccgccagctag

SEQ ID NO: 286593 - DNA, 1443 bp, Artificial Sequence
  derived and/or modified sequence
atggcccacgtgggcgactgcacccagaccccctggctgcccgtgttggtagtgtcactgatgtgcagcgcccgagctgaatatagcaattgtggggaaaatgaatattataatcagactaccgggctgtgccaggaatgcccaccatgtgggcctggcgaggagccatatctctcatgcggttacggcaccaaagacgaggattatggttgtgtgccttgtcctgctgagaaattcagtaaaggcggctaccaaatttgtagacgccacaaggactgcgaaggctttttccgggccaccgttctcacccctggcgacatggagaatgatgcggagtgtggtccctgcttacccggatattatatgctggagaacaggcccagaaacatttacggtatggtgtgctactcttgtttgctggctccacccaataccaaagaatgcgtgggcgctacaagtggggcatcagccaacttccccgggacttcagggtcaagtactttgagccctttccagcacgcgcataaggagctttcaggccagggccacctggctaccgcccttatcattgccatgagcacgatctttattatggccattgctatagtactaataattatgttttatattcttaaaacaaagcctagcgccccaggggacgggccacatgccccagtcccttgcttcttagattccccatccactccacccgttggagaaccgggctgtagcctcccgccgctctcaccagcctgttgcactagccatcctggaaaatccgtcgaggcccaggtcagtaaggacgaggaaaagaaagaggccccagacaacgtagtcatgttctcagagaaggatgagttcgagaagctgaccgctactccagccaagcccacgaagtcagagaacgatgcctcttctgaaaacgagcagcttctgagccgcagcgttgatagtgacgaggagccagctccagataaacagggatcaccggaattatgccttctttccctggtgcacctggctcgggaaaagtccgctacgagtaataaaagcgctggcatacagagcagaagaaagaaaatactggacgtgtacgcaaacgtttgtggcgtggtcgaaggtctcagtccaacagagttgccattcgattgtcttgagaagactagccggatgctgtcttcaacgtataactcggagaaagccgtcgttaagacatggagacacctggctgagtctttcggactcaagcgagacgagattgggggcatgaccgacggcatgcagctgtttgaccgcatttccacggctggatactccatacctgaactgctgactaagctggttcagatcgaaaggttagatgccgtggaatctctgtgtgctgatatcctggagtgggccggagtagtaccacctgcttcgcaaccccacgctgcttcatag

SEQ ID NO: 286594 - DNA, 1443 bp, Artificial Sequence
  derived and/or modified sequence
atggcccacgtgggcgactgcacccagaccccctggctgcccgtgcttgtggtgagtctgatgtgctcggctagagccgaatatagcaactgtggcgaaaacgagtactacaaccaaactactggattgtgccaagagtgcccaccctgcggtcccggtgaggagccttatctcagttgcggatacggcaccaaggatgaagactacgggtgtgtcccttgcccagctgagaagttcagtaaagggggctaccagatttgccgccggcacaaagactgtgagggattcttccgcgccacagtcctgacgccgggcgacatggaaaatgacgctgaatgcggaccctgtctgccagggtactacatgttagagaaccggccccggaacatttatggcatggtgtgctacagctgtctgctcgctcctccaaatacaaaagagtgtgttggcgcaactagcggcgcttccgccaattttcctggtactagcggcagcagcacgcttagtccctttcagcacgcacataaggaactgtcgggacaggggcaccttgcgacagccttgatcattgcaatgagcaccatttttatcatggcaatcgctatagtgctaatcatcatgttttacatcttgaaaacgaagcccagcgcccccggtgacggccctcatgcccccgtaccatgcttcctggacagcccatccacccccccagtgggggaacccggttgttcactgccgcctttgtctccagcatgctgcacctcccatccgggtaagtctgtggaggcacaggtgtccaaggatgaggagaaaaaggaagcacccgacaatgtagtcatgttctctgagaaagacgagttcgagaagttgaccgcaaccccagctaaaccaacgaaatcggaaaacgacgccagcagcgagaatgaacagctgttgagccggtctgtcgatagtgatgaagagccagccccagacaagcaaggttcaccagagttatgcctgctgagtttggtgcaccttgcaagggagaagtcagccacttccaataaaagtgctggaatacaatcccggcggaagaagattctggacgtttatgcaaatgtgtgcggcgtcgtggagggcctgagcccgaccgagttgcctttcgactgtctggagaagacaagcagaatgctttctagtacatataactccgagaaagctgttgtgaagacatggcgtcacttggctgagtcctttgggctgaagcgggatgagataggagggatgaccgacggtatgcagctgttcgaccggatctccacagcggggtacagcattcccgagctccttaccaagttagtccagatcgagcggttagacgctgtagagagtctctgtgctgatatcttggagtgggccggtgtggtccctcccgcaagtcagccgcacgcagcctcttag

SEQ ID NO: 286595 - DNA, 1443 bp, Artificial Sequence
  derived and/or modified sequence
atggcgcacgtgggagactgcacacagactccttggctcccagtacttgtcgtgtcgctcatgtgttcagcacgggctgaatattctaattgcggagaaaacgaatactacaaccaaacaacagggttatgccaggaatgtcccccatgcgggcctggcgaggaaccctacctgtcctgcgggtatggaacaaaagatgaggactatgggtgcgtgccatgccccgcagaaaagttttcgaaaggcggttatcagatttgccggcgtcataaggactgcgaaggcttttttcgggcaactgttttaactcctggtgacatggagaacgacgcggagtgcgggccatgtttgcccggttactacatgcttgaaaaccggcctcggaatatctatggtatggtttgctactcctgcttgctggcccctcccaacactaaggagtgcgttggggctaccagcggagcctcagccaattttcctggcaccagtggcagtagcactctgtcgccttttcaacacgctcacaaagagttgtcaggacagggtcacctagccaccgcactgatcattgccatgtctacgattttcatcatggccatagcgatcgttctgatcatcatgttctacattctcaagaccaaaccaagtgcacccggagacgggcctcacgccccagtgccctgttttctggactccccctccaccccccctgtgggagaacctggctgttcattgccacctcttagccctgcctgttgcacatcacaccctggaaaatcagtggaagcacaagtctccaaagacgaagaaaaaaaagaggccccagacaacgtcgtgatgttcagcgagaaggatgaatttgaaaagcttacggccactcctgccaagcccacaaagagcgagaacgacgccagttcggagaatgagcaactgttgtcgagatctgtggactccgatgaagaacctgccccagacaagcagggttctcctgagctttgcctgctgtcattagtgcatctcgcacgtgagaagtcagcgacaagcaataagtcggccggtatccaatcacggcgtaaaaagatcttagacgtgtacgctaatgtgtgcggcgtagtggaggggctttcccctaccgagcttccctttgattgtctggagaagacatctcggatgctgtcttcaacttacaacagcgagaaagcggtcgtgaaaacctggagacatcttgccgaatccttcggcctgaagcgcgacgagattggcggaatgaccgacggaatgcagctatttgacaggatctccacggccggatactctattcctgagcttcttactaaattggtgcagatcgaacgcctagatgctgtggaatccctgtgtgccgacatccttgagtgggcaggtgtggtgccgccagcctcccaaccccatgcggcaagctag

SEQ ID NO: 286596 - DNA, 1443 bp, Artificial Sequence
  derived and/or modified sequence
atggcacacgtcggggactgcacacaaaccccttggttacccgtgctggtggtgtcattgatgtgttctgctagagcggaatatagcaattgtggggaaaacgaatattacaaccaaaccaccggcctttgccaggaatgccctccatgtggacctggcgaagaaccttacctgtcatgtggctacgggactaaagacgaggactatggatgtgtgccctgccccgctgagaagttttccaaagggggttatcaaatctgtcgccgtcacaaggattgtgaaggctttttcagggccaccgttctgacgccaggtgatatggaaaacgacgcggaatgcggaccatgtctgccgggatactacatgctggagaatcgtcccaggaacatatatggtatggtgtgttactcttgccttctggctccaccgaacaccaaagagtgcgtgggcgctacgtctggcgcatccgcgaatttccccggaacaagtggatcttcaaccctttccccatttcaacacgcccacaaagagttgtccggtcagggacatctggctactgccttgataattgctatgtctaccatttttatcatggccattgctattgtgctgataatcatgttctacatactcaagaccaaaccaagcgcacccggagacgggcctcacgccccagtaccttgttttctggatagtccctccactcctcctgttggtgagcccggatgtagcctccctcctttgagccccgcatgttgtacgagtcaccctggcaagtctgtggaagcgcaagtgtccaaagacgaagagaagaaagaagcacccgacaatgttgttatgttctccgaaaaggacgagttcgagaagctgactgccactcccgctaaacccactaagtctgagaacgacgcctccagtgagaatgagcagcttctgagtcgctccgtagacagcgacgaagagcctgcccctgataaacaggggtcccctgaactgtgcctgctgtcgttggtacatctggccagagagaaaagcgcaacttccaacaagtccgcgggtatccaaagcaggaggaaaaagatcctggacgtgtatgctaacgtgtgtggtgtcgtagagggcctctcgcctactgaactgcccttcgattgcctggagaagacctcccgtatgttaagctcaacctacaacagtgagaaagctgtcgtaaagacttggagacacctggccgaaagttttggtcttaagcgagacgaaattgggggtatgactgatggaatgcagctgttcgatcgaatttcaaccgccggatactctatccccgaactcctcactaagcttgtacagatcgaacgactggacgctgtggaatccctgtgtgctgacatacttgaatgggccggtgttgtgcccccagcatcgcagcctcatgccgcttcatag

SEQ ID NO: 286597 - DNA, 150 bp, Artificial Sequence
  derived and/or modified sequence
atgtaccccaaccccctgatctactgcacctgctgggacccctggaacctgggccccagaaagctgatcaagaccccccagctgcccagaaagaacagcaccggcagcagcaagctgacccccctggtgcccgcccccaagaaccactag

SEQ ID NO: 286598 - DNA, 150 bp, Artificial Sequence
  derived and/or modified sequence
atgtaccctaatccgctgatatactgtacctgctgggatccctggaacctgggacctcgcaagctgataaagaccccgcaactgcctaggaagaacagcactggtagctctaagctgacaccacttgtgcccgcccctaagaaccactag

SEQ ID NO: 286599 - DNA, 150 bp, Artificial Sequence
  derived and/or modified sequence
atgtaccccaaccccctcatctactgcacctgctgggacccctggaacctgggccccaggaagctgatcaagaccccccagctgcccaggaagaacagcacaggcagcagcaagctgacccccctggtgcctgcccccaagaaccactag

SEQ ID NO: 286600 - DNA, 150 bp, Artificial Sequence
  derived and/or modified sequence
atgtaccccaaccccctgatctactgcacctgctgggacccctggaatctcgggccaagaaaattgataaaaacaccccagttacctagaaagaactctaccgggagctccaaactgacacccctggttccagctcctaagaaccattag

SEQ ID NO: 286601 - DNA, 458 bp, Artificial Sequence
  derived and/or modified sequence
ctcagtagcttcatctatagtatcagcataacaataattgagcagttttacctggctcacagcaaggactcggctatggcaaattttattttattttaattattttgttttatttttatttgtatcttattttattttttgagacgaagtctcactcttcacccaggctggagtgcagtggcacaatctcagctcactgcaacctctgcctcccaggttcaagcaatcctcccacctcagcctcctgagtagctgggactatagcaagagcctcctgatctagcagccaagactccccctgacctttggccatgtaccccaaccctctcatctactgcacctgctgggacccctggaacttgggaccacggaagctaatcaagacccctcaactaccacgcaagaactccacagggagttccaagctaactcctcttgtaccagctccaaaaaatcac

SEQ ID NO: 286602 - DNA, 150 bp, Artificial Sequence
  derived and/or modified sequence
atgtatccaaaccccctaatttattgtacatgttgggatccatggaacctgggaccaaggaagttgatcaagaccccacaactccccaggaagaatagcactggcagctccaaattgacccccctggtgcccgcaccaaaaaaccactag

SEQ ID NO: 286603 - protein, 1277 aa, Artificial Sequence
  derived and/or modified sequence
KHLYGLFHYNPMMLGLESLPDPTDTWEIIETIGKGTYGKVYKVTNKRDGSLAAVKILDPVSDMDEEIEAEYNILQFLPNHPNVVKFYGMFYKADHCVGGQLWLVLELCNGGSVTELVKGLLRCGQRLDEAMISYILYGALLGLQHLHNNRIIHRDVKGNNILLTTEGGVKLVDFGVSAQLTSTRLRRNTSVGTPFWMAPEVIACEQQYDSSYDARCDVWSLGITAIELGDGDPPLFDMHPVKTLFKIPRNPPPTLLHPEKWCEEFNHFISQCLIKDFERRPSVTHLLDHPFIKGVHGKVLFLQKQLAKVLQDQKHQNPVAKTRHERMHTRRPYHVEDAEKYCLEDDLVNLEVLDEDTIIHQLQKRYADLLIYTYVGDILIALNPFQNLSIYSPQFSRLYHGVKRASNPPHIFASADAAYQCMVTLSKDQCIVISGESGSGKTESAHLIVQHLTFLGKANNQTLREKILQVNSLVEAFGNSCTAINDNSSRFGKYLEMMFTPTGVVMGARISEYLLEKSRVIKQAAREKNFHIFYYIYAGLHHQKKLSDFRLPEEKPPRYIADETGRVMHDITSKESYRRQFEAIQHCFRIIGFTDKEVHSVYRILAGILNIGNIEFAAISSQHQTDKSEVPNAEALQNAASVLCISPEELQEALTSHCVVTRGETIIRANTVDRAADVRDAMSKALYGRLFSWIVNRINTLLQPDENICSAGGGMNVGILDIFGFENFQRNSFEQLCINIANEQIQYYFNQHVFALEQMEYQNEGIDAVPVEYEDNRPLLDMFLQKPLGLLALLDEESRFPQATDQTLVDKFEDNLRCKYFWRPKGVELCFGIQHYAGKVLYDASGVLEKNRDTLPADVVVVLRTSENKLLQQLFSIPLTKTGNLAQTRARITVASSSLPPHFSAGKAKVDTLEVIRHPEETTNMKRQTVASYFRYSLMDLLSKMVVGQPHFVRCIKPNDDREALQFSRERVLAQLRSTGILETVSIRRQGYSHRILFEEFVKRYYYLAFTAHQTPLASKESCVAILEKSRLDHWVLGKTKVFLKYYHVEQLNLLLREVIGRVVVLQAYTKGWLGARRYKRVREKREKGAIAIQSAWRGYDARRKFKKISNRRNESAAHNQAGDTSNQSSGPHSPVAAGTRGSAEVQDCSEPGDHKVLRGSVHRRSHSQAESNNGRTQTSSNSPAVTEKNGHSQAQSSPKGCDIFAGHANKHSVSGTDLLSSRICHPAPDQQGLSLWGAPQKPAFPHYGCNFYGFRKWSCTEASNTSPTMSAAQNAE

SEQ ID NO: 286604 - protein, 1350 aa, Artificial Sequence
  derived and/or modified sequence
MLQSALLSTRKHLYGLFHYNPMMLGLESLPDPTDTWEIIETIGKGTYGKVYKVTNKRDGSLAAVKILDPVSDMDEEIEAEYNILQFLPNHPNVVKFYGMFYKADHCVGGQLWLVLELCNGGSVTELVKGLLRCGQRLDEAMISYILYGALLGLQHLHNNRIIHRDVKGNNILLTTEGGVKLVDFGVSAQLTSTRLRRNTSVGTPFWMAPEVIACEQQYDSSYDARCDVWSLGITAIELGDGDPPLFDMHPVKTLFKIPRNPPPTLLHPEKWCEEFNHFISQCLIKDFERRPSVTHLLDHPFIKGVHGKVLFLQKQLAKVLQDQKHQNPVAKTRHERMHTRRPYHVEDAEKYCLEDDLVNLEVLDEDTIIHQLQKRYADLLIYTYVGDILIALNPFQNLSIYSPQFSRLYHGVKRASNPPHIFASADAAYQCMVTLSKDQCIVISGESGSGKTESAHLIVQHLTFLGKANNQTLREKILQVNSLVEAFGNSCTAINDNSSRFGKYLEMMFTPTGVVMGARISEYLLEKSRVIKQAAREKNFHIFYYIYAGLHHQKKLSDFRLPEEKPPRYIADETGRVMHDITSKESYRRQFEAIQHCFRIIGFTDKEVHSVYRILAGILNIGNIEFAAISSQHQTDKSEVPNAEALQNAASVLCISPEELQEALTSHCVVTRGETIIRANTVDRAADVRDAMSKALYGRLFSWIVNRINTLLQPDENICSAGGGMNVGILDIFGFENFQRNSFEQLCINIANEQIQYYFNQHVFALEQMEYQNEGIDAVPVEYEDNRPLLDMFLQKPLGLLALLDEESRFPQATDQTLVDKFEDNLRCKYFWRPKGVELCFGIQHYAGKVLYDASGVLEKNRDTLPADVVVVLRTSENKLLQQLFSIPLTKTGNLAQTRARITVASSSLPPHFSAGKAKVDTLEVIRHPEETTNMKRQTVASYFRYSLMDLLSKMVVGQPHFVRCIKPNDDREALQFSRERVLAQLRSTGILETVSIRRQGYSHRILFEEFVKRYYYLAFTAHQTPLASKESCVAILEKSRLDHWVLGKTKVFLKYYHVEQLNLLLREVIGRVVVLQAYTKGWLGARRYKRVREKREKGAIAIQSAWRGYDARRKFKKISNRRNESAAHNQAGDTSNQSSGPHSPVAAGTRGSAEVQDCSEPGDHKVLRGSVHRRSHSQAESNNGRTQTSSNSPAVTEKNGHSQAQSSPKGCDIFAGHANKHSVSGTDLLSSRICHPAPDQQGLSLWGAPQKPGSENGLAQKHRTPRRRCQQPKMLSSPEDTMYYNQLNGTLEYQGSKRKPRKLGQIKVLDGEDEYYKSLSPVDCIPEENNSAHPSFFSSSSKGDSFAQH

SEQ ID NO: 286605 - DNA, 3834 bp, Artificial Sequence
  derived and/or modified sequence
aaacacttatacggcttattccattacaatcctatgatgttgggtctggaatccctgcctgatcccaccgacacatgggagatcatcgagactattgggaaaggaacctacgggaaagtatataaggtgacgaacaagagagacggcagcctcgctgccgtgaagattctagacccagtgtctgatatggacgaagagatcgaagccgagtataacatcctgcagtttctcccgaatcatcccaacgttgtgaagttctatgggatgttttataaggctgaccattgtgtaggtggtcagctgtggcttgtactcgaactgtgcaatggagggtctgtaaccgagcttgtgaaggggctgctgcgctgcggacagcgactggacgaggcaatgatctcctacattttatacggtgctctcctgggactgcagcacctacacaacaataggattatccatcgtgacgtcaagggcaataacatcctgctgaccacagagggaggagtgaaactcgtcgatttcggagtgtctgcacaactgacatccacacgcttgcggagaaatacttccgtcgggactcccttttggatggccccggaagtcatcgcctgcgagcagcagtatgactcatcctatgatgccagatgtgatgtgtggtctcttggtatcaccgctattgagttgggtgatggtgacccgcctctcttcgatatgcatccagtcaaaaccctgttcaagattccccgcaatccaccccccacgctccttcacccggagaagtggtgtgaagagtttaatcactttatctcgcagtgcctaataaaagactttgaacgacggccatctgtgacacatcttctggatcaccccttcataaagggagtccatggcaaagtcctgttcctacagaagcaactggcaaaagtgctgcaggaccaaaaacaccagaaccctgtggcgaagactagacacgagaggatgcatacgcggaggccatatcacgtggaagacgctgagaaatactgtctcgaagacgacctggtgaatctagaggtattggacgaggataccattattcaccagcttcagaaaagatatgcagaccttttgatctacacatacgtgggcgacattctgatagcgctgaacccatttcagaatctttctatctatagtccccaattctcgcgcctctaccatggggtgaaaagggcctcgaatccacctcatatctttgctagtgccgacgcggcttaccagtgtatggtgactttgtctaaggaccagtgcattgtgattagcggcgaatcaggtagtggcaaaacggagtcagcccacttgatcgttcagcatcttacgttcctgggaaaggccaataatcagactctccgggaaaaaatcctgcaggtcaactcacttgtagaggccttcggcaatagctgtacagccattaacgataatagtagccgatttggcaagtatcttgagatgatgtttacccccaccggagtggttatgggggcaaggatctcagaatacttgctcgagaagtctcgggtgatcaagcaggccgcgcgagaaaagaacttccacatcttttattatatatatgctgggcttcatcaccaaaaaaagttgtcagatttccggctgccggaagagaaaccaccaaggtacatcgcagatgagaccggcagagtcatgcacgacatcactagtaaagagagctaccggagacaattcgaagccattcagcattgcttccgaatcatcggcttcacagacaaagaggtgcatagtgtctatagaattttggccggaattcttaatataggcaacattgagtttgctgccatcagcagccaacaccagacagataagagcgaggtccctaatgctgaagcgcttcaaaatgctgcaagtgttctctgcatatcccccgaggagctgcaagaagcccttacatctcactgtgtcgtaacccgtggcgaaaccatcatccgcgcaaatacagtggaccgagcggccgacgttagggacgccatgtccaaggctttatacggacggcttttctcttggatcgtgaaccgcatcaacacactcctgcaacccgatgagaatatttgctcagccggggggggaatgaatgtgggcattcttgatattttcggatttgaaaacttccaacgcaactctttcgaacagctttgcatcaatattgccaacgaacagattcaatactatttcaaccagcatgtgtttgctctggagcagatggagtaccaaaatgagggcatagatgcggtgcctgtcgaatatgaagataatcgtcctcttctggacatgttcctgcaaaaacctttgggactgttagcgctgttagatgaggagtcaaggttcccccaggctacggaccagacattagttgataagtttgaggacaatctgcgctgcaaatatttctggcggcctaagggagttgaattgtgcttcggaattcagcactatgccgggaaagtgctctacgacgcttccggcgtgcttgagaaaaaccgcgacacgctgccggccgatgtggttgtcgtgctacgcacttctgagaataagctcttacagcagctatttagcattcctttgactaaaacgggaaatctggcccagactcgcgctcggataacggtggctagcagcagtctgcctccgcacttttctgccggtaaggccaaagtggacacattagaggttatccggcatcctgaagagaccacgaacatgaagagacaaacggttgcttcttatttccgatactcactcatggacctgctcagcaaaatggtggtgggacaaccgcattttgtgcgctgcatcaagcccaatgacgacagggaggctcttcagttcagccgagagcgcgttttagcccagcttcggagtaccggcattctggaaacagtgtcaattaggaggcaaggttacagccaccggatcctgttcgaggaattcgtcaagaggtactattatttggctttcactgcccaccagactcccctcgcgagcaaggagtcttgtgttgccatcttggagaagagccggctggaccactgggtgctgggtaagaccaaagtctttctgaaatactatcatgtggagcagctgaatctgctgctgcgggaagtgatagggagagtcgtggtcctgcaggcttacaccaagggctggctgggggcccgacggtataagcgggtgcgcgaaaagcgcgagaaaggcgcgattgccattcaaagtgcctggagggggtatgacgcccgacgtaaatttaagaaaatcagtaataggcgtaacgagagtgccgcccacaaccaggctggagacacatcaaatcaatcttcagggccacattctccagtggcagcaggcactcgcggctcagcagaggttcaggactgcagcgaacccggcgaccacaaggttctccgcggaagcgtccacagacgctcacactctcaggcagagtctaacaacgggcggacccagacatcctctaactctcccgctgtcacagagaagaatggccattctcaggcgcagagtagcccaaaaggctgtgatattttcgcaggtcatgccaataaacactctgtctcaggcaccgacttgctgagtagccgcatttgccacccagcccccgaccagcaggggctctccctgtggggcgcgccccagaaacctgccttccctcattatggttgcaacttttatggatttcggaaatggtcatgtaccgaagcgagcaatacctctcctaccatgtccgccgctcagaacgccgagtag

SEQ ID NO: 286606 - DNA, 4053 bp, Artificial Sequence
  derived and/or modified sequence
atgctccagtcagcactgctctctacacgtaaacacctatacggcttatttcactataaccctatgatgctgggacttgaatccctgcctgatccaacagacacatgggagatcatagagactatcggcaaaggaacgtacgggaaggtgtacaaagtcacaaacaagagggacggaagtctggccgccgtgaaaattttagaccccgtgagtgacatggacgaagaaatcgaagccgaatataatattctgcagtttctgcctaaccatccaaacgtggtgaagttttatggaatgttttacaaggcagaccattgtgtggggggccagctgtggctggtgttagagttatgcaatggagggtctgtcactgagctagtaaaaggactgctccgatgcggacagaggctggatgaagctatgattagctacatcttatatggcgccctgctggggctgcagcatttacataacaatcggatcattcatcgcgacgtgaagggcaataacattttactgacgactgaaggcggggtaaaactagtggatttcggcgtcagcgctcagctgaccagtacgcgcctgcgacgtaacacctcggtcggcacgcctttctggatggctccggaggttatcgcttgcgaacaacagtacgattcctcatatgacgcgaggtgcgacgtgtggagcctgggcatcaccgcgatcgagcttggagacggggatcctcccctgttcgatatgcaccccgtgaagactctgtttaagatccccaggaaccccccaccgacgctgctgcacccagagaaatggtgcgaggaattcaaccacttcatttctcagtgtctgattaaagactttgagcgccggccgtctgtcacgcatctcctggatcacccttttattaagggcgtgcatggtaaagttctgtttctgcagaagcaactggccaaggtgttgcaagaccagaagcaccagaatcctgttgcaaaaacccgtcatgagaggatgcatactcgacgtccttaccatgtggaagatgccgaaaagtactgcctcgaagacgacttggtgaacctggaggtattagatgaagacaccatcattcatcagcttcaaaagaggtacgctgatctacttatctatacgtacgtgggggacatcctcatcgcccttaacccatttcagaacctttccatttacagcccgcaattttcacgcctataccacggggtcaagcgcgcatcaaatccaccccacatatttgcctctgcagacgctgcctatcagtgcatggtgaccctaagtaaagatcagtgcattgtcataagcggagagagcggaagcggcaagaccgagtctgcccatctgattgtacagcatctgacatttctggggaaggctaacaaccagacactgcgagaaaagatactgcaagtgaatagcctcgtagaggcattcggcaactcctgtaccgcaataaatgacaactcgagcagattcgggaagtacctcgagatgatgtttacacccactggcgtagtcatgggtgccagaatcagtgagtatctcctggagaagtcacgcgtaatcaaacaggcggccagggagaaaaactttcacattttctattatatttacgctggccttcaccaccaaaagaagctctccgatttcaggctgcccgaagagaaacctcctagatacatcgccgacgaaaccgggcgagtgatgcatgatataacctcgaaagaatcatatcggcggcagtttgaggcaattcagcactgtttccggataatcggctttaccgataaagaagtccacagcgtttaccggatcctcgcaggtatcctgaacattggaaatattgagttcgcagccatttcttcacagcatcagacggacaaatccgaggtccccaacgcggaagccctgcagaatgcagcttccgtcctgtgcatcagtcccgaggagctacaagaggccctgacctcccactgtgtggtgacccgaggggagactataattcgggccaataccgtggaccgggccgcggacgtaagggatgccatgagtaaagcattgtatggacgcttattctcctggattgtgaataggattaatactctcctgcaaccagacgaaaacatctgctcagccggcggaggcatgaacgttggcatcctggacatatttggatttgaaaactttcagaggaactccttcgagcaactctgtatcaacattgctaatgaacagatccagtactacttcaatcaacacgtcttcgcactggagcaaatggagtaccagaacgaaggtatcgacgcagtaccagtcgagtacgaagacaaccgccctctcctcgatatgtttctgcagaaaccgctcggtctgctcgcactattagacgaggagtccaggtttcctcaggccaccgatcaaactttggtcgacaaatttgaggataatcttcgctgtaagtatttctggagacccaagggtgtcgagctctgttttgggatccagcattatgctggcaaggtgttgtatgacgctagcggcgtgctggagaagaaccgggacacactgccagccgatgtggtggttgtcctgaggacgtctgagaacaagctgcttcagcaactgttcagcattccactgaccaagaccggaaatctcgcacaaacacgtgccagaattacggtggctagctcttctctgccccctcacttttcggcaggcaaggcaaaagttgatacccttgaggtgattcgacaccctgaagagaccactaacatgaagagacagaccgttgcaagttattttcggtacagcctcatggatttgctgagcaaaatggtggttgggcaaccacattttgtccgatgcatcaaacccaacgatgacagggaggctctgcagttctcacgggaacgcgtgctggcacagctcaggtctacgggaattctggagacagtctcaatacggcggcagggctactctcaccggatcttgtttgaggaattcgtgaaaaggtattactacctggcgtttacggctcaccagaccccacttgcctctaaagaaagttgcgtggccattctggaaaagagcaggctcgaccactgggtactcggcaagactaaggtctttttaaagtactaccacgtagaacagctgaatttgttactgagggaagtcatcgggagggtggtcgtgctgcaggcgtacactaaaggttggttgggagccagacgctacaagagagtgcgggagaagagggagaagggcgcaatcgcgatccagtcagcttggcgcggttatgatgcgcgtcgaaaatttaaaaagattagtaaccggaggaacgaatccgccgcccacaaccaagccggggatacatcgaatcagagtagcggcccacactccccggtggctgcgggtacaagagggtctgctgaggtacaagactgtagtgagcctggggatcataaggtcctgagaggatcggttcatagacggtctcattcccaggccgagtcaaataacggaagaacccagacctcgtccaacagccccgctgtcactgagaagaatggtcacagccaggcacagagctcacctaaaggctgcgatatcttcgccggtcacgctaataagcatagcgtctcaggcacagatctgttaagttcacggatctgccaccccgcacctgaccagcagggcctttccctatggggtgccccccagaagccagggtccgagaacggcctggctcaaaaacacagaaccccccgcaggaggtgccagcaacccaagatgctgtcatctcctgaggacacaatgtattataaccagttaaacggtacgctagagtaccaggggtccaagaggaagccccgtaagctcggtcagatcaaggtattggacggcgaagatgagtattacaagtccctctcccctgttgactgtataccagaggagaacaattctgcacatccctcattttttagctcctcctccaaaggcgacagctttgcccagcactag

SEQ ID NO: 286607 - DNA, 3834 bp, Artificial Sequence
  derived and/or modified sequence
aagcacctgtatggcctcttccactacaaccccatgatgctgggcctggagagcctgcctgaccccacagacacctgggagatcatcgagaccatcggcaagggcacctacggcaaggtgtacaaggtgaccaacaagagagatggcagcctggccgctgtgaagatcctggaccctgtgtctgacatggatgaggagattgaagctgagtacaacatcctgcagttcctgcccaaccaccccaacgtggtgaagttctacggcatgttctacaaggctgaccactgtgtgggcggccagctgtggctggtgctggagctgtgcaatggaggctctgtgacagagctggtgaagggcctgctgcgctgtggccagaggctggatgaggccatgatctcctacatcctgtatggagccctgctgggcctgcagcacctgcacaacaaccgcatcatccacagagatgtgaagggcaacaacatcctgctgaccacagaaggaggagtgaagctggtggactttggagtgtctgcccagctgaccagcacccggctgcggaggaacacctctgtgggcacccccttctggatggcccctgaggtgattgcctgtgagcagcagtatgacagcagctatgatgcccgctgtgatgtgtggagcctgggcatcacagccatcgagctgggagatggagacccccccctgtttgacatgcaccctgtgaagaccctcttcaagatccccagaaatcctccacccaccctgctgcaccctgagaagtggtgtgaggagttcaaccacttcatcagccagtgcctgatcaaggactttgaaagaagacccagcgtgacccacctgctggaccaccccttcatcaagggcgtgcacggcaaggtgctcttcctgcagaagcagctggccaaggtgctgcaggaccagaagcaccagaaccctgtggccaagaccaggcatgagaggatgcacacccggcggccctaccacgtggaggatgctgagaagtactgcctggaggatgacctggtgaacctggaggtgctggatgaggacaccatcatccaccagctgcagaagagatatgctgacctgctgatctacacctacgtgggggacatcctgattgccctgaaccccttccagaacctgagcatctacagcccccagttcagccggctgtaccacggcgtgaagagggccagcaaccccccccacatctttgccagcgcagatgctgcctaccagtgcatggtgaccctgagcaaggaccagtgcatcgtcatcagcggggagagcggcagcggcaagacagagagcgcccacctgattgtgcagcacctgaccttcctgggcaaggccaacaaccagaccctgcgggagaagatcctgcaggtgaacagcctggtggaggcctttggaaacagctgcacagccatcaatgacaacagcagcagatttgggaagtacctggagatgatgttcacccccaccggggtggtgatgggcgcccgcatcagcgagtacctgctggagaagagcagggtcatcaagcaggccgcccgggagaagaacttccacatcttctactacatctatgccggcctgcaccaccagaagaagctgagtgacttccggctgcctgaggagaagccaccccgctacatcgcagatgagaccggccgggtgatgcatgacatcaccagcaaggagagctaccgccggcagtttgaggccatccagcactgcttccgcatcatcggcttcacagacaaggaggtgcacagcgtgtaccgcatcctggccggcatcctgaacatcggcaacatcgagtttgctgccatcagcagccagcaccagacagacaagtctgaggtgcccaatgctgaggccctgcagaatgctgcctctgtgctgtgcatcagccctgaggagctgcaggaggccctgaccagccactgtgtggtgaccagaggagagaccatcatccgggccaacacagtggacagagctgctgatgtgagagatgccatgagcaaggccctgtatggccgcctcttctcctggatcgtgaaccgcatcaacaccctgctgcagccagatgagaacatctgcagcgctgggggcggcatgaatgtgggcatcctggacatctttggatttgagaacttccagaggaacagctttgagcagctgtgcatcaacatcgccaatgagcagatccagtactacttcaaccagcacgtgtttgccctggagcagatggagtaccagaatgaaggaattgatgctgtgcctgtggagtatgaggacaaccggcccctgctggacatgttcctgcagaagcccctgggcctgctggccctgctggatgaggagagccgcttcccccaggccacagaccagaccctggtggacaagtttgaggacaacctgcgctgcaagtacttctggaggcccaagggcgtggagctgtgcttcggcatccagcactacgccggcaaggtgctgtatgatgccagcggcgtgctggagaagaacagagacaccctgcctgcagatgtggtggtggtgctgcggaccagcgagaacaagctgctgcagcagctgttcagcatccccctgaccaagacaggcaacctggcccagacccgggcccgcatcaccgtggccagcagcagcctgcccccccacttctctgctgggaaggccaaggtggacaccctggaggtgatccgccaccctgaggagaccaccaacatgaagaggcagacagtggccagctacttccgctacagcctgatggacctgctgagcaagatggtggtgggccagccccactttgtgcgctgcatcaagcccaatgatgaccgggaggccctgcagttcagccgggagcgggtgctggcccagctgcggagcacaggcatcctggagaccgtgtccatccggcggcagggctacagccaccgcatcctgtttgaggagtttgtgaagcgctactactacctggccttcaccgcccaccagacccccctggccagcaaggagagctgtgtggccatcctggagaagagccggctggaccactgggtgctgggcaagaccaaggtgttcctgaagtactaccacgtggagcagctgaacctgctgctgcgggaggtgattggccgggtggtggtgctgcaggcctacaccaagggctggctgggcgcccggcgctacaagagggtgcgggagaagcgggagaagggggccatcgccatccagagcgcctggaggggctatgatgcccggaggaagttcaagaagatcagcaacagaagaaatgaatctgctgcccacaaccaggccggggacaccagcaaccagagcagcggcccccacagccctgtggccgccggcacccggggcagcgctgaggtgcaggactgcagcgagcccggggaccacaaggtgctgcggggctctgtgcaccggcgcagccacagccaggccgagagcaacaacggccgcacccagaccagcagcaacagccctgctgtgacagagaagaatggccacagccaggcccagagcagccccaagggctgtgacatctttgctggccacgccaacaagcacagcgtgtctggaacagacctgctgagcagccgcatctgccacccagccccagaccagcagggcctgagcctgtggggcgccccccagaagccagccttcccccactacggctgcaacttctacggcttcaggaagtggagctgcacagaggccagcaacaccagccccaccatgtctgctgcccagaatgctgagtag

SEQ ID NO: 286608 - DNA, 4053 bp, Artificial Sequence
  derived and/or modified sequence
atgctgcagagcgccctgctgagcaccaggaagcacctgtatggcctcttccactacaaccccatgatgctgggcctggagagcctgcctgaccccacagacacctgggagatcatcgagaccatcggcaagggcacctacggcaaggtgtacaaggtgaccaacaagagagatggcagcctggccgctgtgaagatcctggaccctgtgtctgacatggatgaggagattgaagctgagtacaacatcctgcagttcctgcccaaccaccccaacgtggtgaagttctacggcatgttctacaaggctgaccactgtgtgggcggccagctgtggctggtgctggagctgtgcaatggaggctctgtgacagagctggtgaagggcctgctgcgctgtggccagaggctggatgaggccatgatctcctacatcctgtatggagccctgctgggcctgcagcacctgcacaacaaccgcatcatccacagagatgtgaagggcaacaacatcctgctgaccacagaaggaggagtgaagctggtggactttggagtgtctgcccagctgaccagcacccggctgcggaggaacacctctgtgggcacccccttctggatggcccctgaggtgattgcctgtgagcagcagtatgacagcagctatgatgcccgctgtgatgtgtggagcctgggcatcacagccatcgagctgggagatggagacccccccctgtttgacatgcaccctgtgaagaccctcttcaagatccccagaaatcctccacccaccctgctgcaccctgagaagtggtgtgaggagttcaaccacttcatcagccagtgcctgatcaaggactttgaaagaagacccagcgtgacccacctgctggaccaccccttcatcaagggcgtgcacggcaaggtgctcttcctgcagaagcagctggccaaggtgctgcaggaccagaagcaccagaaccctgtggccaagaccaggcatgagaggatgcacacccggcggccctaccacgtggaggatgctgagaagtactgcctggaggatgacctggtgaacctggaggtgctggatgaggacaccatcatccaccagctgcagaagagatatgctgacctgctgatctacacctacgtgggggacatcctgattgccctgaaccccttccagaacctgagcatctacagcccccagttcagccggctgtaccacggcgtgaagagggccagcaaccccccccacatctttgccagcgcagatgctgcctaccagtgcatggtgaccctgagcaaggaccagtgcatcgtcatcagcggggagagcggcagcggcaagacagagagcgcccacctgattgtgcagcacctgaccttcctgggcaaggccaacaaccagaccctgcgggagaagatcctgcaggtgaacagcctggtggaggcctttggaaacagctgcacagccatcaatgacaacagcagcagatttgggaagtacctggagatgatgttcacccccaccggggtggtgatgggcgcccgcatcagcgagtacctgctggagaagagcagggtcatcaagcaggccgcccgggagaagaacttccacatcttctactacatctatgccggcctgcaccaccagaagaagctgagtgacttccggctgcctgaggagaagccaccccgctacatcgcagatgagaccggccgggtgatgcatgacatcaccagcaaggagagctaccgccggcagtttgaggccatccagcactgcttccgcatcatcggcttcacagacaaggaggtgcacagcgtgtaccgcatcctggccggcatcctgaacatcggcaacatcgagtttgctgccatcagcagccagcaccagacagacaagtctgaggtgcccaatgctgaggccctgcagaatgctgcctctgtgctgtgcatcagccctgaggagctgcaggaggccctgaccagccactgtgtggtgaccagaggagagaccatcatccgggccaacacagtggacagagctgctgatgtgagagatgccatgagcaaggccctgtatggccgcctcttctcctggatcgtgaaccgcatcaacaccctgctgcagccagatgagaacatctgcagcgctgggggcggcatgaatgtgggcatcctggacatctttggatttgagaacttccagaggaacagctttgagcagctgtgcatcaacatcgccaatgagcagatccagtactacttcaaccagcacgtgtttgccctggagcagatggagtaccagaatgaaggaattgatgctgtgcctgtggagtatgaggacaaccggcccctgctggacatgttcctgcagaagcccctgggcctgctggccctgctggatgaggagagccgcttcccccaggccacagaccagaccctggtggacaagtttgaggacaacctgcgctgcaagtacttctggaggcccaagggcgtggagctgtgcttcggcatccagcactacgccggcaaggtgctgtatgatgccagcggcgtgctggagaagaacagagacaccctgcctgcagatgtggtggtggtgctgcggaccagcgagaacaagctgctgcagcagctgttcagcatccccctgaccaagacaggcaacctggcccagacccgggcccgcatcaccgtggccagcagcagcctgcccccccacttctctgctgggaaggccaaggtggacaccctggaggtgatccgccaccctgaggagaccaccaacatgaagaggcagacagtggccagctacttccgctacagcctgatggacctgctgagcaagatggtggtgggccagccccactttgtgcgctgcatcaagcccaatgatgaccgggaggccctgcagttcagccgggagcgggtgctggcccagctgcggagcacaggcatcctggagaccgtgtccatccggcggcagggctacagccaccgcatcctgtttgaggagtttgtgaagcgctactactacctggccttcaccgcccaccagacccccctggccagcaaggagagctgtgtggccatcctggagaagagccggctggaccactgggtgctgggcaagaccaaggtgttcctgaagtactaccacgtggagcagctgaacctgctgctgcgggaggtgattggccgggtggtggtgctgcaggcctacaccaagggctggctgggcgcccggcgctacaagagggtgcgggagaagcgggagaagggggccatcgccatccagagcgcctggaggggctatgatgcccggaggaagttcaagaagatcagcaacagaagaaatgaatctgctgcccacaaccaggccggggacaccagcaaccagagcagcggcccccacagccctgtggccgccggcacccggggcagcgctgaggtgcaggactgcagcgagcccggggaccacaaggtgctgcggggctctgtgcaccggcgcagccacagccaggccgagagcaacaacggccgcacccagaccagcagcaacagccctgctgtgacagagaagaatggccacagccaggcccagagcagccccaagggctgtgacatctttgctggccacgccaacaagcacagcgtgtctggaacagacctgctgagcagccgcatctgccacccagccccagaccagcagggcctgagcctgtggggcgccccccagaagccaggctctgaaaatggcctggcccagaagcacaggaccccaagaagacgctgccagcagcccaagatgctgagcagccctgaggacaccatgtactacaaccagctgaatggcaccctggagtaccagggcagcaagaggaagcccaggaagctgggccagatcaaggtgctggatggagaagatgagtactacaagagcctgagccctgtggactgcatccctgaggagaacaacagcgcccaccccagcttcttcagcagcagcagcaaaggagacagctttgcccagcactag

SEQ ID NO: 286609 - DNA, 6084 bp, Artificial Sequence
  derived and/or modified sequence
atgctgcagagtgctttactttcaacaaggaaacatctgtatggattatttcactataatcctatgatgcttggacttgaatcacttccagatcccacagacacctgggaaattatagagaccattggtaaaggcacctatggcaaagtctacaaggtaactaacaagagagatgggagcctggctgcagtgaaaattctggatccagtcagtgatatggatgaagaaattgaggcagaatacaacattttgcagttccttcctaatcatcccaatgttgtaaagttttatgggatgttttacaaagcggatcactgtgtagggggacagctgtggctggtcctggagctgtgtaatgggggctcagtcactgagcttgtcaaaggtctactcagatgtggccagcggttggatgaagcaatgatctcatacatcttgtacggggccctcttgggccttcagcatttgcacaacaaccgaatcatccaccgtgatgtgaaggggaataacattcttctgacaacagaaggaggagttaagctcgttgactttggtgtttcagctcaactcaccagtacacgtctgcggagaaacacatctgttggcaccccgttctggatggcccctgaggtcattgcctgtgagcagcagtatgactcttcctatgacgctcgctgtgacgtctggtccttggggatcacagctattgaactgggggatggagaccctcccctctttgacatgcatcctgtgaaaacactctttaagattccaagaaatcctccacctactttacttcatccagaaaaatggtgtgaagaattcaaccactttatttcacagtgtcttattaaggattttgaaaggcgaccttccgtcacacatctccttgaccacccatttattaaaggagtacatggaaaagttctgtttctgcaaaaacagctggccaaggttctccaagaccagaagcatcaaaatcctgttgctaaaaccaggcatgagaggatgcataccagaagaccttatcatgtggaagatgctgaaaaatactgccttgaggatgatttggtcaacctagaggttctggatgaggatacaattatccatcagttgcagaaacgttatgcagacttgctaatttacacatatgttggagacatcttaattgccttaaaccccttccagaatctaagcatatactctccacagttttccagactttatcatggggtgaaacgcgcctccaatcccccccacatatttgcatcagcagatgctgcttaccagtgcatggttactctcagcaaagaccagtgcattgtcatcagcggagagagtggctctgggaagacagaaagcgcccacctgattgttcagcatttgactttcttgggaaaggccaataatcagaccttgagagagaaaattctacaagtcaactccctggtggaagcctttgggaactcatgcactgccatcaatgacaactcgagccgttttggaaaatatctggaaatgatgtttacaccaactggagttgtgatgggggcaagaatctctgaatatctcctggaaaaatccagagttataaaacaggcagcgagagagaaaaattttcatatattttactatatttatgctggtcttcatcaccaaaagaagctttctgatttcagacttcctgaggaaaaacctcctaggtacatagctgatgaaactggaagggtgatgcacgacataacttccaaggagtcttacagaagacaattcgaagcaattcagcattgcttcaggattatagggttcacggacaaagaggtgcactcagtgtacagaattttggctgggattttgaatattgggaacattgagttcgcagctatttcctctcaacatcagactgataaaagtgaggtgcccaatgctgaagctttgcaaaatgctgcctctgttctgtgcattagccctgaagagctccaggaggccctcacctcccactgtgtggtcacccggggcgagaccatcatccgtgccaacactgtagacagggctgcggacgttcgagacgccatgtccaaagccctgtatgggaggctcttcagctggattgtgaatcgcattaatacactcctgcagccagacgaaaacatatgtagtgcaggaggtggaatgaatgtggggatcttggatatctttggattcgagaattttcagagaaattcatttgagcagctctgcataaacatcgccaatgagcaaatccagtactatttcaatcagcatgtttttgctcttgagcagatggaatatcagaatgaaggcattgatgctgtacccgtggaatatgaggacaaccgcccgctcttggacatgttcctccagaaacccctgggactgcttgcacttttggatgaggaaagtcggtttccccaagcaactgaccagaccctggttgataaatttgaagataatctacgatgcaaatacttctggaggcccaaaggagtggaactgtgctttggcattcagcattatgctggaaaggtattatatgatgcttctggggttcttgagaaaaatagagacactctccctgccgatgtggttgtggtcctgagaacgtcagaaaacaagcttcttcagcagctcttctcaatccctctgaccaaaacaggtaatttggcccagacaagagctaggataacagtggcctcaagttctttgcctccacatttcagtgctgggaaagccaaggtggacactctggaggtgatacggcatccggaagaaaccaccaacatgaagaggcaaactgtggcttcttacttccggtattctctgatggacctgctctccaaaatggtggttggacagccccactttgtgcgctgcattaaacccaatgatgaccgagaggccctgcagttctctcgagagagggtgctggcccagctccgctccacagggattctggagacagtcagcatccgccgccagggctattcccaccgcatcctttttgaagaatttgtgaaaaggtattattacttggcattcacagcacatcaaacacctcttgctagcaaagagagctgtgtggctatcttggaaaagtccagattagatcactgggtactgggaaaaacaaaggtttttctcaaatattaccatgttgagcaattaaatttgctgcttcgagaagtcataggcagagtggttgtgctgcaggcatataccaaggggtggcttggagccaggagatacaaaagggtcagagagaagagagagaagggagccattgccatccagtcagcctggagaggatatgatgctcggaggaaatttaagaaaataagcaacagaaggaatgagtctgctgctcataatcaagcaggggacacttcaaaccaaagcagtgggccacattcccccgtcgcagcaggtacgaggggaagtgccgaggttcaagactgcagcgagcctggtgaccataaagttctcaggggctctgtacatcgtaggagccattcacaagcagaatccaacaatggccgtacacagacttcaagcaactctcctgctgtcacagagaaaaatgggcattcacaagcccagagttctccaaaagggtgcgatatcttcgcaggacatgcaaacaagcactcggtttctgggactgatttgctgtcttctcggatatgccatcctgctccagatcagcaaggattgagtctctggggagcccctcaaaagcctggttcagaaaatggtcttgcacagaagcatcgaacacctcgccgacgatgtcagcagcccaaaatgctgagtagccctgaggacaccatgtactataaccagttaaatggaactctagaatatcaagggagcaagaggaagccaagaaaacttggccaaatcaaagtacttgatggggaagatgaatattacaaatctctgtcaccagtggactgtatccctgaggagaacaactcagcccacccttcctttttttcttcatcctcaaaaggagactcttttgctcaacattaaattgtgcttcctaaccctaaatctgtccagagtaggaacattcatggtaatcgactgtctgtcattgcgtaagaaagcactgatatggggtcagcttctttggacatatggtccatgcctgaaccttactgaaccacttgcagattccaaaacatcttatcctatcctctaccactctcccacatgtgttgtgcagcctgagctgggcgctgccttcctttctcatcccatggggccctgtgggacactgagaacacctttacaatagtttaaacagtcattcatgcccccagtgtctaggaagataacagccagtctcaccccagtctaatcatggaccctgataatattgcttgatttttcctatcaagttacttttcaatccattcagaatctgccccagtggagacccaggagttcctttcctgcactcttctccatcctcccacctttgctgggcttttctatcactcccacctcccccagagtcagggctccattgctgagtgccccatcctggaggattggccccaagatctcctagaacaggataattgcctgtgtttaggcagataggcctaaatctttcagattctttctacaaggcaaataacccctctcttgttaattatgatgctgagaaagcctctgtctctttatttcaccttgccaagacacccacactactttggtgatgaaaagaaaggaatgagagggaaagtttggacctgtcactttggtgacagggaaagtccaggtcactttattctgtaactctccattcactggtcaaataactccatgaggctatcagtggctacagtggaaggacctgatcttgtccatctttgtgtgcacagagcctagcacagggcttggtagagggtatatctagtgaatggagaatacatggagaaacttaactaagttacacaagcatatctgacaggaatgttaccttcaattgtatgttacatatgattagtcacttttcatacactataacctctgatttttcactcaagtttgggctgattatattgtaatgatgttagataatactcaacatgattcagtatgacaaacttttttgagcacctactttatataaaacatgacaaattgcagtgtgatgtaatcaaaaacaaagaagccctataagaccatttctctagaacagatgttcttaatatttttcttactctaaaatatgtggtagatagtatgcaagaaaagccgggtgcggtggctcaggcctgtaatcccagcactttgggaggccaagatgggcggatcatgaagtcaggagttcgagaccagcctgaccaacatggtgaaaccccgtctctactaaaaaaaataatgataatacaaaaattagcccagcatggtggtgcatacctgtaatcccagctactcaggaggctgacgcaggagaatcacttgaacccgggaagcaaaggttgcagtcagctgagagcgcaccactgcactccagcctgggcgacagggcaagactctgtctcaaaaaaaaaaaaaaaaaaaaaaaaaagagatagtatgcaagaagacacctaaattttgagagaaataaccttgaagaaaatcttgttatcagagttttgaaagggagcacattaataggccttttatgaagataaataatgaaatgaggtatttaaagatctcagaaattgtaattttacaagtaaaataaatatagccaatttttcaatagctgaacttcacccaaaaggtaatgtttataagtagagcagaaaaaatgcagataaattttattttattgtttaaaaaataatgtgtagaatatataaattttttatgttactgttaatatacgagtgcttttggaagtttcacttttgtcactgattgtctacttttggtttgataatatgagctgcttttcaaattgttgaatggaaatgttcataactccctgcttgtccgtgcacaatgtaattctaaacctggcttgtttctcatttaaatatatctataaataaactt

SEQ ID NO: 286610 - DNA, 3834 bp, Artificial Sequence
  derived and/or modified sequence
aagcacctgtacggcctgttccactacaaccccatgatgctgggcttagaatccctgcccgatccaacagatacatgggagattatcgagactatcgggaaagggacttatggtaaggtgtacaaggtgacgaacaaaagagacggatccctcgcggcggtgaaaattctagatccagtgagcgacatggacgaggaaattgaggctgaatacaatatcttacagtttctacctaaccaccctaacgttgtaaagttttatgggatgttctacaaagcggaccactgtgttggcggtcagctgtggctcgttctggaattgtgtaacggtggctccgttacagagttggtgaagggactgcttcgctgcggtcagagactcgatgaagcgatgatttcatacatcctgtacggagcactgctcggcttgcagcatctgcataataataggattatccaccgggatgtgaaaggaaacaatattctcctgaccacagagggcggcgttaaactggtggactttggcgtgtccgcgcaactcactagcactagactccgtcgtaatacaagcgtcggcactcctttctggatggcacctgaggtgatcgcctgcgagcagcagtacgactcaagctacgacgcccgatgcgacgtttggtctctcggaatcacagccattgaactgggggacggagatccccccctgtttgatatgcaccccgtcaagaccttattcaagatcccccggaaccccccgcctaccctgctccacccagaaaagtggtgtgaggagttcaaccacttcatctctcagtgcctcatcaaggactttgagaggcggccttctgtgacccacttgttggaccatccgtttatcaagggcgttcacgggaaagtactcttcctgcaaaaacagctcgctaaagtgctacaagatcagaagcaccagaatcctgtggcgaagacacggcacgaaagaatgcatactagacggccataccacgtcgaggatgctgaaaagtactgcctcgaggacgacttagtgaacctggaggtcctcgatgaggatactatcattcatcaacttcagaagaggtacgcggacctcctgatttatacgtacgtgggtgacatcctgatcgcactgaacccctttcaaaacttgagtatttactctccgcaattcagcagactgtatcacggagtcaaacgcgcctctaacccaccacatatctttgcctccgccgatgcagcctaccagtgtatggtcacccttagtaaggatcagtgcatcgtgatctctggagagtcgggcagcggcaaaaccgaaagcgcccatctgattgtgcagcatttgacttttctcggtaaagcaaataatcaaacattacgggaaaagattctccaagtgaacagcttggttgaggcgttcggaaactcctgcaccgccatcaacgataattcttcccggtttggcaagtacctagagatgatgttcacacctactggggtggtcatgggggctaggatttctgagtaccttctcgagaaatctagggtgatcaaacaggcggccagagagaagaacttccacatcttttattatatatacgccgggctgcatcaccaaaaaaaattatctgattttcgactccctgaggagaaaccaccacggtacatcgccgacgaaacaggtcgggtcatgcacgacataaccagcaaggagtcttaccgtcgacagtttgaggctatccagcactgttttaggatcattgggttcaccgacaaggaggttcactctgtttacaggatcctggccggaattctcaacatcggaaacattgagttcgccgccatatcttcccaacaccagaccgacaagagcgaagtgcctaacgccgaggctttgcagaacgcagccagcgtcctgtgcatttcacccgaggagttgcaggaagccctgacctctcactgtgtggttacacgtggagaaactatcatccgagctaacactgtcgatcgcgctgccgatgtgagagatgccatgtctaaagctctgtacggtaggctgttcagctggatcgtgaacaggataaataccctccttcagcctgatgaaaacatctgctccgctggggggggtatgaatgtgggaatcctggacattttcgggtttgagaactttcagaggaatagctttgagcaactctgcattaacattgccaatgaacagatccagtattactttaaccagcatgttttcgccctcgagcagatggagtaccagaatgagggcattgacgcagttcctgtagagtacgaggataatcgaccccttctggatatgttcctgcagaagccactgggactgttagccctgctggacgaggaatcacgctttccgcaggccacagatcagacattagtggataagtttgaagataatctgcgatgcaagtacttctggcgcccaaagggagtcgagctttgctttggcattcagcattacgctgggaaggtgctatatgacgcttcaggagtcctggagaaaaatagagacacccttcccgccgatgtggtagtggtgctgcggacaagcgaaaataagcttctgcagcaactgttcagtatacctctgacaaagacagggaatctggcccagacgcgggcccggattaccgtggcctcatcgtccctgccaccccacttcagtgccggcaaagccaaggtagacactctggaagttattcgccaccctgaggagacaactaacatgaagcggcagactgtggctagttattttcgttattccctgatggacctactgagtaagatggtggtcgggcaaccacactttgtccgatgtataaaacccaatgatgaccgtgaggccctccagttcagcagagaaagggtgctggcacagctccggtctacagggattctggagactgtctcgatccgtcgccaaggctacagccatcgaatcctgtttgaggaatttgtcaaacgttactactacctggcatttacagcacaccagaccccacttgcttcaaaagaatcttgcgtagccatcctggaaaagagccgccttgatcactgggtcctgggtaagacgaaggtttttctgaagtactaccacgtagagcagctcaatctgctcctccgagaggtgattggcagagtagtggtactccaagcgtacactaaaggatggctgggtgctcgacgctacaagagagtgagagaaaagcgcgagaagggagcaattgccatccaatccgcttggagggggtacgatgcgagacgcaagtttaaaaaaatcagtaatcgcaggaatgaaagcgccgcgcataatcaggcgggcgacacatctaatcaatccagcggcccccacagcccagtcgctgccggcacaagggggagtgccgaagtgcaggattgtagtgaacccggggatcataaggtgttgagaggttctgtgcacagaaggtcccattctcaagccgaatccaataatgggcgcacccaaaccagctccaactcccctgccgtgaccgaaaagaacggacattcacaggcccagagttctccaaagggctgtgatatcttcgcaggacacgccaataagcatagtgtctcaggcacggatttattgagctcaaggatctgtcatcccgcacctgatcagcagggactgagcctgtggggagcaccacagaaacccgcctttccacattacggctgtaacttttatggatttaggaagtggtcctgtaccgaggctagcaacaccagcccaacaatgtcagcagctcagaatgcagaatag

SEQ ID NO: 286611 - DNA, 4053 bp, Artificial Sequence
  derived and/or modified sequence
atgctgcagagcgccctgctgagcacccggaagcacctgtacggcctgttccattacaatccaatgatgctgggcctggagtctctcccagatcctaccgacacttgggaaatcattgagactattgggaagggaacatatggaaaagtttataaggtgacaaataaaagagatggtagcctcgccgctgtcaagatcttggaccctgtgtcagatatggatgaagagatagaagctgagtataacatcctgcagttcttacccaatcatcccaatgtggtgaagttctatggcatgttctacaaggccgaccattgtgtcggaggccagttgtggctcgtactggagctgtgtaatggcggctctgttaccgagctggtcaagggtttactgcggtgcggccagcgcctcgacgaagccatgatatcttacattctctatggagcacttttgggcctgcaacatctgcacaacaacaggatcattcaccgagacgtgaaggggaacaacatccttctgactaccgaggggggtgtcaagctcgtggatttcggcgtgtcagctcagctcacttccacccggctaaggcgcaacacttccgtggggacccccttctggatggctccagaggtgatcgcctgtgaacagcagtatgacagtagctatgatgctagatgtgacgtgtggtccctggggatcacagccattgagctgggggatggggatccccctctttttgacatgcaccccgtcaaaacgttgtttaagatccctcggaatccccctcccactctcctgcatcccgagaaatggtgcgaggagttcaaccactttatcagccaatgtctcatcaaggattttgagcgacgcccaagcgttactcatctcctcgatcatcctttcatcaaaggagtgcacggcaaagtactgttcttgcagaagcagctcgctaaagtcctgcaggaccaaaaacatcagaaccccgtcgccaagactagacatgaacggatgcacacgagaaggccataccatgtggaagacgcggagaaatactgcctcgaggacgatctggtgaatctggaggtgctggatgaagataccattatccatcagctgcagaagcggtacgctgatcttctaatatacacatacgtcggggacattttaatagccctgaacccattccagaatctgtctatttacagtccgcagttttctaggctgtaccatggtgtaaaacgagctagcaaccctcctcacatcttcgcaagcgctgacgccgcttaccagtgtatggtgacattgtcaaaggatcaatgcattgtcatctcaggagagtcaggctccggaaaaacagagtccgcgcacctcatcgtgcaacacctgacatttcttgggaaagcgaacaaccagacgttgagagagaagattctgcaggtgaacagcctagtcgaggcgtttggcaactcttgcaccgctattaacgacaacagttcaagattcgggaaatacctggagatgatgtttacgcctacaggagtagttatgggagcccggatctctgagtatttgctcgagaaaagccgtgtgatcaagcaggctgctcgggagaagaattttcatatcttctattatatctacgccggcctgcaccatcagaagaaactatcagatttcaggcttccagaggagaaacctccacgctacattgccgacgaaactgggagagttatgcacgacatcacctctaaggagtcctaccggaggcagtttgaggctattcagcactgcttcagaattattggatttacagataaggaagtgcattccgtgtacagaattcttgccggcatccttaatatagggaacatcgagttcgcagccattagctcccaacaccagaccgataaatctgaggttccaaacgctgaggcgcttcagaacgctgcttctgtgctatgtatatcacccgaggagttacaggaggccctgacaagccactgtgtagtgacgcgtggggaaactattattcgggccaacactgtcgaccgggccgccgatgtcagggatgccatgtctaaagcactttatggcagactcttcagctggatcgtgaaccgtatcaatacgctgctccagccagacgagaacatttgctctgctggggggggaatgaatgtggggatactggatatcttcggttttgagaatttccagcgcaacagcttcgagcaactttgcatcaatattgcgaacgaacagatccagtattatttcaatcagcacgtgtttgctcttgagcagatggagtatcagaacgagggcatcgatgcggtaccggtagagtacgaagacaaccgacctctgctcgatatgtttcttcagaaaccactcgggctgctggccctgctggatgaagaatcccggtttcctcaggctaccgaccagacactcgtggacaagttcgaagacaatttaaggtgcaagtacttttggcgccccaaaggggttgaactatgctttggcatccagcactatgccggcaaggtgttgtacgatgcgtcgggtgtgctggagaagaaccgcgacaccttgcccgccgacgtggtggtggtgctgcgcacttcagaaaataaactcctgcagcagctcttctcgattcctctgacaaagaccgggaatctggctcagacccgcgcgagaatcaccgtcgcaagcagcagccttccaccacacttcagcgcggggaaggctaaggtggatactcttgaagtcattagacatcccgaggagaccaccaatatgaaacgccagacggtggctagttattttcggtactctctgatggatctcctgagtaaaatggtagtgggacagccacacttcgtgcgttgtattaaacccaatgatgacagggaagccctccaattctcacgggagcgggtgctagctcaattgcgatcgactggcattttggagaccgtgtccatcaggcgacagggctactcgcatcggatcctgttcgaagagttcgtcaagagatattactatcttgcctttaccgcacatcagacccccctggcgagtaaggagtcttgcgtagcgattctggaaaaatcccggctggatcattgggtcctaggaaagacgaaggtattcctgaaatactatcacgtggagcagcttaatttgctgctccgggaagtgatcgggcgggtggttgtactgcaggcctatactaagggatggctgggagcaaggagatacaagcgtgtgagagagaagagggaaaaaggggccatcgctatccaatcagcgtggagaggctatgacgcacgaagaaagtttaaaaagattagtaacagacggaatgagagtgctgctcacaatcaggcaggcgacacttccaaccagtcttctggcccccacagccccgtcgcagctggaacacgggggtccgccgaggtgcaggactgttccgagccaggcgatcacaaagttctcagggggagcgtacacaggagaagtcacagtcaggcggagagtaataacggccgcactcaaactagttccaactctcccgcagtgaccgagaagaatggacattcccaggcccagagtagcccaaaggggtgtgacattttcgcggggcacgcaaacaagcatagtgttagcggaacagatttactgtcctctagaatctgccaccctgctcctgaccaacaaggactttcactgtggggtgctccgcagaagcctggatccgaaaacggtctcgcacaaaaacaccggacaccccggcgtaggtgtcagcaacccaagatgctgagctccccagaagatacaatgtactataaccagctgaatggaaccctggagtatcaggggtccaagagaaagccaagaaagctgggtcagataaaagtgttagacggggaggacgagtactataaatccctgtcacccgttgactgcatcccagaggagaacaactcagcacacccgtcttttttcagctcttcctccaagggggattcgtttgctcaacattag

SEQ ID NO: 286612 - DNA, 3834 bp, Artificial Sequence
  derived and/or modified sequence
aaacacctgtatggactgttccactacaatcccatgatgctggggttagagtccctgcctgatcctacggacacctgggaaatcatcgagacgataggaaaagggacctacggaaaagtctataaagtgactaacaaacgagatggatctttggctgcagtgaagattctcgatccggtatctgatatggacgaagaaattgaggcagaatataacatcctgcagttcttgcccaatcatcctaatgtggtcaaattctacggcatgttttataaggctgatcactgcgtggggggtcaattgtggttggttcttgagctgtgtaacggcggttccgtcaccgagcttgtgaaggggctattgaggtgcgggcaacgactggacgaagccatgatcagttatatcctctatggcgcactcctaggactgcagcatcttcataacaatagaattattcatagagacgtgaaaggtaataacatcttactgacaaccgaagggggagttaagttggtagatttcggtgtgtcagcccagctcaccagcaccagattgagacgaaatacgtctgtggggactcctttctggatggctccagaagtaatcgcctgtgagcagcagtacgacagttcctacgacgccaggtgtgacgtctggtccctgggtatcaccgccatcgaacttggagacggtgatcctcccctcttcgatatgcatccagtgaaaacgctgttcaaaattcccagaaatccccctccgactctgttgcatcccgagaagtggtgtgaggagttcaatcatttcatcagccaatgcctcattaaagacttcgaacggaggccaagtgtcacacatttgctggaccaccctttcataaaaggtgttcacgggaaagtgcttttcctgcagaagcagcttgccaaggtcctgcaagatcaaaagcatcagaatcccgtcgccaaaaccaggcacgaaagaatgcatactcgcaggccttatcatgtagaggatgctgaaaaatactgcctggaagacgacttggtcaatttggaggtgcttgatgaagataccatcattcatcagctgcagaaacgctacgccgatttgctcatctacacttacgtgggggatattctcatcgccttgaatcctttccaaaacctgagcatctatagtcctcaattctcccgtctatatcatggtgtcaagagagctagcaatccccctcacatcttcgcatcagcggatgcggcttatcagtgcatggtcactctgtccaaagatcagtgtatagttatttcgggcgagtccggatctggcaaaactgaatctgcccatctgattgtacagcatctgacatttctaggaaaagcaaataatcaaacgctgcgggagaagatcctgcaggtcaactcactcgtcgaagctttcggaaatagctgtactgctattaacgacaactcttctcgatttgggaagtatttagaaatgatgtttaccccaaccggcgtggttatgggggcacggattagcgaatacctgttagagaagagtcgggtgataaaacaggcagccagagagaagaactttcacatcttttattatatttatgccggacttcatcatcaaaaaaagctgtctgatttccgattgcccgaggagaagcctcccagatacattgccgacgaaacgggtcgcgtaatgcacgatatcacaagtaaggaatcttaccggagacaattcgaagcaatccaacactgcttccgcattattggcttcaccgataaggaggtccattcagtgtacaggattctggccggaatcctcaatatcggcaacatcgagttcgccgctataagtagccaacaccagaccgataaatccgaagtcccaaatgctgaagcgctgcagaacgctgccagcgtgctgtgtatttcacccgaagaactgcaggaggccttgacatcgcactgcgttgtcaccaggggcgagaccataatccgggcaaatacggtagaccgcgctgccgacgtgcgtgacgccatgtcaaaggcgctctacggtcgactcttttcttggattgtgaataggatcaacactctgctacagcctgacgagaacatatgttctgcgggaggcggaatgaatgtgggaatcctggatatttttggctttgaaaacttccaaagaaactcatttgaacaactgtgcataaacatagctaacgagcaaatccaatattattttaatcagcatgtcttcgcgcttgagcagatggaataccaaaacgagggtatagacgcagttcctgttgagtacgaagacaatcgccctctgctggatatgttccttcagaagccccttggcctactagcccttctagacgaagaatctcggttcccacaggccactgatcagacactggtcgataagtttgaggacaatctgcgctgcaagtacttctggagacctaagggcgtggaactttgtttcgggatccaacactatgcaggaaaggtgttatatgacgcgtctggcgtcctggagaagaacagggataccttgccagccgacgtcgttgtcgtcctgcggacatcagaaaataaactgcttcaacaattattttcaattccgcttaccaagacaggcaacctggcccagacccgcgctaggatcactgtggcctcctcttcacttccccctcacttctctgcaggtaaagctaaggttgacaccctcgaagttattcggcacccggaggagactaccaatatgaaacgccagacggtggcaagttattttaggtattcattgatggaccttctgtccaaaatggtggtgggacagcctcacttcgtcaggtgtattaagcctaatgacgatcgcgaggcgctgcagttctccagggaaagggtcctggctcagctccgcagtactgggatcctggaaacagtgtctattcgcaggcagggctactcgcatagaattctgtttgaggagttcgttaagcggtactattatttggcattcaccgcccaccagacgccccttgccagtaaggaatcatgcgtggccattttagagaagagcagactggaccattgggtgctgggcaagaccaaagtttttcttaagtattatcatgtcgagcagcttaatctgctactccgcgaggtcatcggacgcgtcgttgtgcttcaggcttacacaaaaggctggctgggcgctcggaggtacaaacgagtgagagagaaacgtgaaaaaggcgcaattgccattcaatctgcgtggcgtgggtacgacgcaagacggaagtttaaaaagatttctaacagacgaaatgaatctgctgcccacaatcaagcaggggacacatccaatcaatcaagtggccctcacagccccgtcgctgccggaacaaggggcagtgccgaagtgcaagattgctccgagcctggcgaccacaaagtgttgcgcggatctgtacataggaggtctcacagtcaggccgaatcaaacaatgggcgaactcagacatcatcaaactccccggcagttacagaaaaaaatggacactcccaagcgcaatcttccccgaagggttgcgatatattcgccggacatgctaataaacatagcgtgtcgggtactgacctgctgagctcgcgaatctgccacccagcccctgaccagcaaggcctgagtctgtggggcgcaccacaaaagcctgcgtttccccactacggttgtaatttctacggttttagaaaatggtcgtgcaccgaagccagcaatacatccccaaccatgagcgctgctcagaacgccgagtag

SEQ ID NO: 286613 - DNA, 4053 bp, Artificial Sequence
  derived and/or modified sequence
atgctacagtcagctttactctccaccagaaaacacctgtacggcttattccactacaatcctatgatgttagggttggagtcccttcctgacccaaccgacacatgggaaattattgaaacaatcgggaagggtacttatggaaaggtgtacaaagtgactaataagagggacgggagcttggccgcagtcaagatattagatcccgtaagtgatatggatgaggaaatagaagctgagtacaacattttgcagtttcttcctaaccatcctaatgtggtcaagttctatgggatgttctacaaagcagaccattgtgtagggggacagctgtggctggtgctggaactgtgtaacggaggctcagtaaccgagctggtgaaagggcttctgcgctgtggacagcgtctggacgaagccatgatttcctatatcctgtatggggctttactgggcttgcaacatctgcataataaccggattatccatcgggacgttaaaggaaataacatcctgctgaccacagaagggggagtcaaactggtcgactttggtgtgtccgcacaactcacatcgacgagactgagaaggaacacatcggtcggtacaccgttctggatggctcccgaggttattgcatgcgagcagcagtacgattcatcatacgatgcgagatgcgacgtttggtcactggggatcaccgccatcgagttgggtgacggcgaccccccactttttgatatgcaccccgtgaaaactttattcaagatacccaggaacccgccaccaaccttgttacatcccgagaagtggtgcgaagagttcaaccattttattagtcagtgcttgattaaagatttcgagcggaggccctctgtcacacacctgctggaccaccccttcattaaaggagtgcacggcaaagtgctgttcctccagaaacaacttgccaaagttctgcaggaccagaaacaccaaaaccctgtggctaaaacgcgccatgagaggatgcacacccggcgaccttaccacgtggaggatgccgagaaatattgtctcgaagatgacctggtgaacctcgaagtcttggatgaagatacaatcatccaccagctgcagaagagatatgctgatctcctgatttatacatatgtcggggacatcctgatagccttgaatccatttcaaaatctctcaatttatagccctcagttttcacgcctgtatcatggcgtgaagagagcaagcaatccaccccatatttttgcatcagccgacgccgcttaccagtgcatggtgaccctgtccaaagatcagtgcatcgttatcagcggtgagtccgggagcggtaagacggagagcgctcatttgatcgtccagcatctgacatttcttggcaaggctaataatcagacgttgagagagaaaattctgcaggtaaattccttagtcgaggccttcggcaatagctgcactgctatcaatgacaactcgtctcgattcggaaagtacctggagatgatgtttacaccaacaggcgtggtcatgggtgctcgtatttcagagtatctgctggagaagtcaagggtcataaagcaggcggctcgggagaagaattttcacatattttactatatctatgccggactgcaccatcaaaaaaagttgtcagatttcagactaccagaggagaagcccccacgatacatcgccgatgaaactggacgagtgatgcacgacatcacctctaaagaatcctataggagacagttcgaggcaattcagcactgttttaggatcatagggttcactgacaaagaagttcactctgtgtatcgcatattggccggtatcctcaatattggtaatattgagttcgcggcaatcagctcccagcaccagacagacaaaagcgaggtcccaaatgctgaggctctccagaacgccgcaagcgtattgtgtatttcacctgaggaactccaggaggcgcttacctctcactgcgtggtaactcgaggggaaactatcatcagggcaaacaccgttgaccgcgcagccgacgtacgggacgccatgtcgaaagcactgtacggtcggttattttcatggatcgtcaacagaatcaacactctattgcagccagatgaaaacatctgctctgccggtgggggtatgaatgtcggtatactggatatcttcggcttcgaaaacttccagcggaatagctttgagcaactgtgtatcaatattgccaacgagcagattcagtattactttaatcagcacgtatttgccctggaacagatggagtatcagaatgaagggatcgacgctgtccccgttgagtatgaggataatcggcctctgcttgacatgtttctgcagaaaccactcgggttgttggcgttactggatgaagagtctagatttccccaggctacagaccagactctagtggataaattcgaagataatcttcgctgcaaatacttttggcgacccaagggggtcgaattatgcttcggaatacagcactatgccggtaaggtgctgtatgacgcaagcggcgttctggagaagaacagagataccctaccagccgacgtggtcgtcgtcctgcgaactagtgaaaataagcttctacagcagcttttttctattcccctcactaagacaggcaatctcgcacaaacccgggctcgaattacggtcgcctcttcttcacttccaccacacttttcagctggcaaggcgaaggtagacacactcgaagtgatacgacaccctgaagagacaaccaacatgaagcgacaaaccgttgccagctatttcaggtactcgctgatggacctcctgtcaaaaatggtggtgggacagccccattttgtgcgatgtatcaaacccaatgacgacagggaagcgctgcagttctccagagagagggtcctcgcccagttgcggagcacaggtatccttgagactgtttcaattcggagacaaggatactcccacagaatcctttttgaagaattcgtgaagcgctactactacctggccttcacagctcaccagacaccactggcctccaaagagagctgcgtggctatactagagaagtccagactggatcactgggtcctgggcaagactaaagtattcttgaaatactaccatgtagaacagttaaatctgttgctgcgggaagtgatcggtagggtcgtggtgctgcaggcttataccaaaggatggttgggggctagaagatacaagagggtcagagaaaaaagggaaaaaggagctattgccattcagagcgcctggcggggatacgatgccaggagaaagttcaagaagattagtaatagaaggaatgaatctgctgctcacaatcaggctggagacacctcgaatcagtcaagtggaccgcactctcccgttgccgcagggactcgcggaagtgcagaagtgcaggactgttccgagcccggtgatcataaagtgctgcgcggtagcgtgcacaggcgcagtcatagccaggcggagagcaataatggcagaacccagacttcaagtaattcccccgcagtaactgaaaagaacgggcatagtcaagcccagtcaagccccaagggttgcgacattttcgccggacacgccaacaaacatagcgtttccggaaccgacctgctgtcttctaggatctgtcatcctgcacctgatcagcaaggcctgagtctgtggggggctccccagaagcccggttctgagaatggcttggctcaaaagcacagaacacctcggcgaagatgccagcaacctaaaatgctgagcagtccagaagataccatgtactataatcagctgaacggcacgctggagtaccagggcagcaagcggaaacctcgaaagctaggccaaataaaggttctggatggagaagacgaatattataagagtttaagcccagttgactgtatacctgaggaaaacaattcagcacatccatccttcttctcttccagttctaaaggggactcattcgcccagcactag

SEQ ID NO: 286614 - DNA, 3834 bp, Artificial Sequence
  derived and/or modified sequence
aagcacctgtacggcctgttccactacaaccccatgatgctgggcctggagagcctgcccgaccccaccgacacctgggagatcatcgagaccatcggcaagggcacctacggcaaggtgtacaaggtgaccaacaagagagacggcagcctggccgccgtgaagatcctggaccccgtgagcgacatggacgaggagatcgaggccgagtacaacatcctgcagttcctgcccaaccaccccaacgtggtgaagttctacggcatgttctacaaggccgaccactgcgtgggcggccagctgtggctggtgctggagctgtgcaacggcggcagcgtgaccgagctggtgaagggcctgctgagatgcggccagagactggacgaggccatgatcagctacatcctgtacggcgccctgctgggcctgcagcacctgcacaacaacagaatcatccacagagacgtgaagggcaacaacatcctgctgaccaccgagggcggcgtgaagctggtggacttcggcgtgagcgcccagctgaccagcaccagactgagaagaaacaccagcgtgggcacccccttctggatggcccccgaggtgatcgcctgcgagcagcagtacgacagcagctacgacgccagatgcgacgtgtggagcctgggcatcaccgccatcgagctgggcgacggcgacccccccctgttcgacatgcaccccgtgaagaccctgttcaagatccccagaaaccccccccccaccctgctgcaccccgagaagtggtgcgaggagttcaaccacttcatcagccagtgcctgatcaaggacttcgagagaagacccagcgtgacccacctgctggaccaccccttcatcaagggcgtgcacggcaaggtgctgttcctgcagaagcagctggccaaggtgctgcaggaccagaagcaccagaaccccgtggccaagaccagacacgagagaatgcacaccagaagaccctaccacgtggaggacgccgagaagtactgcctggaggacgacctggtgaacctggaggtgctggacgaggacaccatcatccaccagctgcagaagagatacgccgacctgctgatctacacctacgtgggcgacatcctgatcgccctgaaccccttccagaacctgagcatctacagcccccagttcagcagactgtaccacggcgtgaagagagccagcaaccccccccacatcttcgccagcgccgacgccgcctaccagtgcatggtgaccctgagcaaggaccagtgcatcgtgatcagcggcgagagcggcagcggcaagaccgagagcgcccacctgatcgtgcagcacctgaccttcctgggcaaggccaacaaccagaccctgagagagaagatcctgcaggtgaacagcctggtggaggccttcggcaacagctgcaccgccatcaacgacaacagcagcagattcggcaagtacctggagatgatgttcacccccaccggcgtggtgatgggcgccagaatcagcgagtacctgctggagaagagcagagtgatcaagcaggccgccagagagaagaacttccacatcttctactacatctacgccggcctgcaccaccagaagaagctgagcgacttcagactgcccgaggagaagccccccagatacatcgccgacgagaccggcagagtgatgcacgacatcaccagcaaggagagctacagaagacagttcgaggccatccagcactgcttcagaatcatcggcttcaccgacaaggaggtgcacagcgtgtacagaatcctggccggcatcctgaacatcggcaacatcgagttcgccgccatcagcagccagcaccagaccgacaagagcgaggtgcccaacgccgaggccctgcagaacgccgccagcgtgctgtgcatcagccccgaggagctgcaggaggccctgaccagccactgcgtggtgaccagaggcgagaccatcatcagagccaacaccgtggacagagccgccgacgtgagagacgccatgagcaaggccctgtacggcagactgttcagctggatcgtgaacagaatcaacaccctgctgcagcccgacgagaacatctgcagcgccggcggcggcatgaacgtgggcatcctggacatcttcggcttcgagaacttccagagaaacagcttcgagcagctgtgcatcaacatcgccaacgagcagatccagtactacttcaaccagcacgtgttcgccctggagcagatggagtaccagaacgagggcatcgacgccgtgcccgtggagtacgaggacaacagacccctgctggacatgttcctgcagaagcccctgggcctgctggccctgctggacgaggagagcagattcccccaggccaccgaccagaccctggtggacaagttcgaggacaacctgagatgcaagtacttctggagacccaagggcgtggagctgtgcttcggcatccagcactacgccggcaaggtgctgtacgacgccagcggcgtgctggagaagaacagagacaccctgcccgccgacgtggtggtggtgctgagaaccagcgagaacaagctgctgcagcagctgttcagcatccccctgaccaagaccggcaacctggcccagaccagagccagaatcaccgtggccagcagcagcctgcccccccacttcagcgccggcaaggccaaggtggacaccctggaggtgatcagacaccccgaggagaccaccaacatgaagagacagaccgtggccagctacttcagatacagcctgatggacctgctgagcaagatggtggtgggccagccccacttcgtgagatgcatcaagcccaacgacgacagagaggccctgcagttcagcagagagagagtgctggcccagctgagaagcaccggcatcctggagaccgtgagcatcagaagacagggctacagccacagaatcctgttcgaggagttcgtgaagagatactactacctggccttcaccgcccaccagacccccctggccagcaaggagagctgcgtggccatcctggagaagagcagactggaccactgggtgctgggcaagaccaaggtgttcctgaagtactaccacgtggagcagctgaacctgctgctgagagaggtgatcggcagagtggtggtgctgcaggcctacaccaagggctggctgggcgccagaagatacaagagagtgagagagaagagagagaagggcgccatcgccatccagagcgcctggagaggctacgacgccagaagaaagttcaagaagatcagcaacagaagaaacgagagcgccgcccacaaccaggccggcgacaccagcaaccagagcagcggcccccacagccccgtggccgccggcaccagaggcagcgccgaggtgcaggactgcagcgagcccggcgaccacaaggtgctgagaggcagcgtgcacagaagaagccacagccaggccgagagcaacaacggcagaacccagaccagcagcaacagccccgccgtgaccgagaagaacggccacagccaggcccagagcagccccaagggctgcgacatcttcgccggccacgccaacaagcacagcgtgagcggcaccgacctgctgagcagcagaatctgccaccccgcccccgaccagcagggcctgagcctgtggggcgccccccagaagcccgccttcccccactacggctgcaacttctacggcttcagaaagtggagctgcaccgaggccagcaacaccagccccaccatgagcgccgcccagaacgccgagtag

SEQ ID NO: 286615 - DNA, 4053 bp, Artificial Sequence
  derived and/or modified sequence
atgctgcagagcgccctgctgagcaccagaaagcacctgtacggcctgttccactacaaccccatgatgctgggcctggagagcctgcccgaccccaccgacacctgggagatcatcgagaccatcggcaagggcacctacggcaaggtgtacaaggtgaccaacaagagagacggcagcctggccgccgtgaagatcctggaccccgtgagcgacatggacgaggagatcgaggccgagtacaacatcctgcagttcctgcccaaccaccccaacgtggtgaagttctacggcatgttctacaaggccgaccactgcgtgggcggccagctgtggctggtgctggagctgtgcaacggcggcagcgtgaccgagctggtgaagggcctgctgagatgcggccagagactggacgaggccatgatcagctacatcctgtacggcgccctgctgggcctgcagcacctgcacaacaacagaatcatccacagagacgtgaagggcaacaacatcctgctgaccaccgagggcggcgtgaagctggtggacttcggcgtgagcgcccagctgaccagcaccagactgagaagaaacaccagcgtgggcacccccttctggatggcccccgaggtgatcgcctgcgagcagcagtacgacagcagctacgacgccagatgcgacgtgtggagcctgggcatcaccgccatcgagctgggcgacggcgacccccccctgttcgacatgcaccccgtgaagaccctgttcaagatccccagaaaccccccccccaccctgctgcaccccgagaagtggtgcgaggagttcaaccacttcatcagccagtgcctgatcaaggacttcgagagaagacccagcgtgacccacctgctggaccaccccttcatcaagggcgtgcacggcaaggtgctgttcctgcagaagcagctggccaaggtgctgcaggaccagaagcaccagaaccccgtggccaagaccagacacgagagaatgcacaccagaagaccctaccacgtggaggacgccgagaagtactgcctggaggacgacctggtgaacctggaggtgctggacgaggacaccatcatccaccagctgcagaagagatacgccgacctgctgatctacacctacgtgggcgacatcctgatcgccctgaaccccttccagaacctgagcatctacagcccccagttcagcagactgtaccacggcgtgaagagagccagcaaccccccccacatcttcgccagcgccgacgccgcctaccagtgcatggtgaccctgagcaaggaccagtgcatcgtgatcagcggcgagagcggcagcggcaagaccgagagcgcccacctgatcgtgcagcacctgaccttcctgggcaaggccaacaaccagaccctgagagagaagatcctgcaggtgaacagcctggtggaggccttcggcaacagctgcaccgccatcaacgacaacagcagcagattcggcaagtacctggagatgatgttcacccccaccggcgtggtgatgggcgccagaatcagcgagtacctgctggagaagagcagagtgatcaagcaggccgccagagagaagaacttccacatcttctactacatctacgccggcctgcaccaccagaagaagctgagcgacttcagactgcccgaggagaagccccccagatacatcgccgacgagaccggcagagtgatgcacgacatcaccagcaaggagagctacagaagacagttcgaggccatccagcactgcttcagaatcatcggcttcaccgacaaggaggtgcacagcgtgtacagaatcctggccggcatcctgaacatcggcaacatcgagttcgccgccatcagcagccagcaccagaccgacaagagcgaggtgcccaacgccgaggccctgcagaacgccgccagcgtgctgtgcatcagccccgaggagctgcaggaggccctgaccagccactgcgtggtgaccagaggcgagaccatcatcagagccaacaccgtggacagagccgccgacgtgagagacgccatgagcaaggccctgtacggcagactgttcagctggatcgtgaacagaatcaacaccctgctgcagcccgacgagaacatctgcagcgccggcggcggcatgaacgtgggcatcctggacatcttcggcttcgagaacttccagagaaacagcttcgagcagctgtgcatcaacatcgccaacgagcagatccagtactacttcaaccagcacgtgttcgccctggagcagatggagtaccagaacgagggcatcgacgccgtgcccgtggagtacgaggacaacagacccctgctggacatgttcctgcagaagcccctgggcctgctggccctgctggacgaggagagcagattcccccaggccaccgaccagaccctggtggacaagttcgaggacaacctgagatgcaagtacttctggagacccaagggcgtggagctgtgcttcggcatccagcactacgccggcaaggtgctgtacgacgccagcggcgtgctggagaagaacagagacaccctgcccgccgacgtggtggtggtgctgagaaccagcgagaacaagctgctgcagcagctgttcagcatccccctgaccaagaccggcaacctggcccagaccagagccagaatcaccgtggccagcagcagcctgcccccccacttcagcgccggcaaggccaaggtggacaccctggaggtgatcagacaccccgaggagaccaccaacatgaagagacagaccgtggccagctacttcagatacagcctgatggacctgctgagcaagatggtggtgggccagccccacttcgtgagatgcatcaagcccaacgacgacagagaggccctgcagttcagcagagagagagtgctggcccagctgagaagcaccggcatcctggagaccgtgagcatcagaagacagggctacagccacagaatcctgttcgaggagttcgtgaagagatactactacctggccttcaccgcccaccagacccccctggccagcaaggagagctgcgtggccatcctggagaagagcagactggaccactgggtgctgggcaagaccaaggtgttcctgaagtactaccacgtggagcagctgaacctgctgctgagagaggtgatcggcagagtggtggtgctgcaggcctacaccaagggctggctgggcgccagaagatacaagagagtgagagagaagagagagaagggcgccatcgccatccagagcgcctggagaggctacgacgccagaagaaagttcaagaagatcagcaacagaagaaacgagagcgccgcccacaaccaggccggcgacaccagcaaccagagcagcggcccccacagccccgtggccgccggcaccagaggcagcgccgaggtgcaggactgcagcgagcccggcgaccacaaggtgctgagaggcagcgtgcacagaagaagccacagccaggccgagagcaacaacggcagaacccagaccagcagcaacagccccgccgtgaccgagaagaacggccacagccaggcccagagcagccccaagggctgcgacatcttcgccggccacgccaacaagcacagcgtgagcggcaccgacctgctgagcagcagaatctgccaccccgcccccgaccagcagggcctgagcctgtggggcgccccccagaagcccggcagcgagaacggcctggcccagaagcacagaacccccagaagaagatgccagcagcccaagatgctgagcagccccgaggacaccatgtactacaaccagctgaacggcaccctggagtaccagggcagcaagagaaagcccagaaagctgggccagatcaaggtgctggacggcgaggacgagtactacaagagcctgagccccgtggactgcatccccgaggagaacaacagcgcccaccccagcttcttcagcagcagcagcaagggcgacagcttcgcccagcactag

SEQ ID NO: 286616 - protein, 671 aa, Artificial Sequence
  derived and/or modified sequence
MATMLEGRCQTQPRSSPSGREASLWSSGFGMKLEAVTPFLGKYRPFVGRCCQTCTPKSWESLFHRSITDLGFCNVILVKEENTRFRGWLVRRLCYFLWSLEQHIPPCQDVPQKIMESTGVQNLLSGRVPGGTGEGQVPDLVKKEVQRILGHIQAPPRPFLVRLFSWALLRFLNCLFLNVQLHKGQMKMVQKAAQAGLPLVLLSTHKTLLDGILLPFMLLSQGLGVLRVAWDSRACSPALRALLRKLGGLFLPPEASLSLDSSEGLLARAVVQAVIEQLLVSGQPLLIFLEEPPGALGPRLSALGQAWVGFVVQAVQVGIVPDALLVPVAVTYDLVPDAPCDIDHASAPLGLWTGALAVLRSLWSRWGCSHRICSRVHLAQPFSLQEYIVSARSCWGGRQTLEQLLQPIVLGQCTAVPDTEKEQEWTPITGPLLALKEEDQLLVRRLSCHVLSASVGSSAVMSTAIMATLLLFKHQKLLGEFSWLTEEILLRGFDVGFSGQLRSLLQHSLSLLRAHVALLRIRQGDLLVVPQPGPGLTHLAQLSAELLPVFLSEAVGACAVRGLLAGRVPPQGPWELQGILLLSQNELYRQILLLMHLLPQDLLLLKPCQSSYCYCQEVLDRLIQCGLLVAEESWATQSSCSSSCRPPPRKKGSSSVRTQSSPSVLSGPSET

SEQ ID NO: 286617 - DNA, 2016 bp, Artificial Sequence
  derived and/or modified sequence
atggccaccatgctggagggcagatgccagacccagcccagaagcagccccagcggcagagaggccagcctgtggagcagcggcttcggcatgaagctggaggccgtgacccccttcctgggcaagtacagacccttcgtgggcagatgctgccagacctgcacccccaagagctgggagagcctgttccacagaagcatcaccgacctgggcttctgcaacgtgatcctggtgaaggaggagaacaccagattcagaggctggctggtgagaagactgtgctacttcctgtggagcctggagcagcacatccccccctgccaggacgtgccccagaagatcatggagagcaccggcgtgcagaacctgctgagcggcagagtgcccggcggcaccggcgagggccaggtgcccgacctggtgaagaaggaggtgcagagaatcctgggccacatccaggccccccccagacccttcctggtgagactgttcagctgggccctgctgagattcctgaactgcctgttcctgaacgtgcagctgcacaagggccagatgaagatggtgcagaaggccgcccaggccggcctgcccctggtgctgctgagcacccacaagaccctgctggacggcatcctgctgcccttcatgctgctgagccagggcctgggcgtgctgagagtggcctgggacagcagagcctgcagccccgccctgagagccctgctgagaaagctgggcggcctgttcctgccccccgaggccagcctgagcctggacagcagcgagggcctgctggccagagccgtggtgcaggccgtgatcgagcagctgctggtgagcggccagcccctgctgatcttcctggaggagccccccggcgccctgggccccagactgagcgccctgggccaggcctgggtgggcttcgtggtgcaggccgtgcaggtgggcatcgtgcccgacgccctgctggtgcccgtggccgtgacctacgacctggtgcccgacgccccctgcgacatcgaccacgccagcgcccccctgggcctgtggaccggcgccctggccgtgctgagaagcctgtggagcagatggggctgcagccacagaatctgcagcagagtgcacctggcccagcccttcagcctgcaggagtacatcgtgagcgccagaagctgctggggcggcagacagaccctggagcagctgctgcagcccatcgtgctgggccagtgcaccgccgtgcccgacaccgagaaggagcaggagtggacccccatcaccggccccctgctggccctgaaggaggaggaccagctgctggtgagaagactgagctgccacgtgctgagcgccagcgtgggcagcagcgccgtgatgagcaccgccatcatggccaccctgctgctgttcaagcaccagaagctgctgggcgagttcagctggctgaccgaggagatcctgctgagaggcttcgacgtgggcttcagcggccagctgagaagcctgctgcagcacagcctgagcctgctgagagcccacgtggccctgctgagaatcagacagggcgacctgctggtggtgccccagcccggccccggcctgacccacctggcccagctgagcgccgagctgctgcccgtgttcctgagcgaggccgtgggcgcctgcgccgtgagaggcctgctggccggcagagtgcccccccagggcccctgggagctgcagggcatcctgctgctgagccagaacgagctgtacagacagatcctgctgctgatgcacctgctgccccaggacctgctgctgctgaagccctgccagagcagctactgctactgccaggaggtgctggacagactgatccagtgcggcctgctggtggccgaggagagctgggccacccagagcagctgcagcagcagctgcagacccccccccagaaagaagggcagcagcagcgtgagaacccagagcagccccagcgtgctgagcggccccagcgagacctag

SEQ ID NO: 286618 - DNA, 483 bp, Artificial Sequence
  derived and/or modified sequence
atggccaccatgctggagggcagatgccagacccagcccagaagcagccccagcggcagagaggccagcctgtggagcagcggcttcggcatgaagctggaggccgtgacccccttcctgggcaagtacagacccttcgtgggcagatgctgccagacctgcacccccaagagctgggagagcctgttccacagaagcatcaccgacctgggcttctgcaacgtgatcctggtgaaggaggagaacaccagattcagaggctggctggtgagaagactgtgctacttcctgtggagcctggagcagcacatccccccctgccaggacgtgccccagaagatcatggagagcaccggcgtgcagaacctgctgagcggcagagtgcccggcggcaccggcgagggccaggtgcccgacctggtgaagaaggaggtgcagagaatcctgggccacatccaggccccccccagacccttcctgtag

SEQ ID NO: 286619 - DNA, 2507 bp, Artificial Sequence
  derived and/or modified sequence
agtccacgccttgtggcggctttgcggagctgctgctttggcgggagttggaagctggtgtgaggtgagaggcgcggtggtcgctccccggcgaggccaggtttctgtggggagaaggagagtgccagaggtgactggttcatggttcttctaggctctcatggccaccatgttggaaggcagatgccaaactcagccaaggagcagccccagtggccgagaggctagcctgtggtcgtcaggctttgggatgaagctggaggctgtcactccattcctggggaagtatcgcccctttgtgggtcgctgttgccagacctgcacccccaagagctgggagtccctcttccacagaagcataacggacctaggcttctgcaatgtgatcctggtgaaggaggagaacacaaggtttcggggctggctggttcggaggctctgctatttcctgtggtccctggagcagcacatccccccctgccaggatgtcccacagaagatcatggaaagcaccggggtgcagaacctcctctcagggagggtcccaggaggcactggggaaggccaggtgcctgaccttgtgaagaaggaggtacagcgcatcctgggtcacatccaggccccaccccgtcccttcctggtcaggctgttcagctgggcgctgctgaggttcctgaactgcctgttcctgaatgtgcagctccacaagggtcagatgaagatggtccagaaggccgcccaggcaggcttgccgcttgtcctcctctctactcacaaaaccctcctggatgggatcctgctgccctttatgctgctctcccagggcctgggtgtgcttcgtgtggcctgggactcccgcgcctgctcccctgccctcagagctctgctgaggaagcttggggggcttttcctgcccccagaggccagcctctccctggacagctctgaggggctccttgccagggctgtggtccaggcggtcatagagcagctgctggttagtgggcagcccctgctcatcttcctggaggaacctcctggggctctggggccacggctgtcagccctgggccaggcttgggtggggtttgtggtgcaggcagtccaggtgggcatcgtcccagatgctctgctggtaccagtggccgtcacctatgacctggttccggatgcaccgtgtgacatagaccatgcctcggcccccctggggctgtggacaggagctctggctgtcctacgtagcttgtggagccgctggggctgcagccaccggatctgctcccgggtgcacctagctcagcccttttccctgcaggaatacatcgtcagtgccagaagctgctggggcggcagacagaccctggagcagctactgcagcccatcgtgctgggccaatgtactgctgtcccagacactgagaaggagcaggagtggacccccataactgggcctctcctggccctcaaggaagaggaccagctcctggtcaggagactgagctgtcatgtcctgagtgccagtgtagggagctctgcggtgatgagcacggccattatggcaacgctgctgctcttcaagcatcagaagctcctgggggagttctcctggctgacggaggagatactgttgcgtggctttgatgtaggcttctctgggcagctgcggagcctgctgcagcactcactgagcctgctgcgggcgcacgtggccctgctgcgcatccgtcagggtgacttgctggtggtgccgcagcctggcccaggcctcacacacctggcacaactgagtgctgagctgctgcccgtcttcctgagcgaggctgtgggcgcctgtgcagtgcgggggctgctggcaggcagagtgccgccccaggggccctgggagctgcagggcatattgctgctgagccagaatgagctgtaccgccagatcctgctgctgatgcacctgctgccgcaagacctgctgctgctaaagccctgccagtcttcctactgctactgtcaggaggtgctggaccggctcatccaatgcgggctcctggttgctgaggagagttgggctacacagagcagctgttccagttcctgcaggccaccgcccaggaagaagggatcttcgagtgtgcggacccaaagctcgccatcagtgctgtctggaccttcagagacctaggggttctgcagcagacgccgagccctgcaggccccaggctccacctgtcccctacttttgccagcctggacaatcaggaaaaactagaacagttcatccggcagttcatttgtagctagaactgtgaggaggagcctgtgctgagacttctcagccccagaacacagctgtgtcctagagccagaagatggagaggaggctgcaaacccttagctgctctataaatataatcattgaggcttgattgtcccttgccatctcttgctttttcccttctttgatgtgataaacaaggggacgagacgagttgtcttttccccagcccagcagc

SEQ ID NO: 286620 - DNA, 588 bp, Artificial Sequence
  derived and/or modified sequence
gcagtccacgccttgtggcggctttgcggagctgctgctttggcgggagttggaagctggtgtgaggtgagaggcgcggtggtcgctccccggcgaggccaggctctcatggccaccatgttggaaggcagatgccaaactcagccaaggagcagccccagtggccgagaggctagcctgtggtcgtcaggctttgggatgaagctggaggctgtcactccattcctggggaagtatcgcccctttgtgggtcgctgttgccagacctgcacccccaagagctgggagtccctcttccacagaagcataacggacctaggcttctgcaatgtgatcctggtgaaggaggagaacacaaggtttcggggctggctggttcggaggctctgctatttcctgtggtccctggagcagcacatccccccctgccaggatgtcccacagaagatcatggaaagcaccggggtgcagaacctcctctcagggagggtcccaggaggcactggggaaggccaggtgcctgaccttgtgaagaaggaggtacagcgcatcctgggtcacatccaggccccaccccgtcccttcctg

SEQ ID NO: 286621 - DNA, 2016 bp, Artificial Sequence
  derived and/or modified sequence
atggctacaatgcttgaagggcgctgtcaaacacagccccggagctctcctagcggaagggaggccagtctgtggtcctccggattcgggatgaaactcgaggccgttacccctttcttgggcaagtaccgcccgtttgttggcaggtgctgtcagacttgtacgccaaaatcttgggagtccctgtttcataggtctatcacagatctgggcttttgcaacgtgatcctggtgaaagaggagaacactaggttccgtggctggctcgtgcgcagactgtgctattttttatggagtttagaacaacacatccccccctgtcaggatgtcccccagaagatcatggagagtacaggggtgcagaacctgctatcaggaagggtaccaggtggcactggtgaaggccaggtacccgatctggtgaagaaagaagtacagcgcattttgggccatattcaggctcctcctcgcccctttttggtgagactgttttcttgggccctgctgagattcctgaactgtctgtttctcaacgtacagctgcacaagggtcagatgaagatggtgcaaaaagccgcacaggctggcctccccctggtgctgctgtccactcacaagaccttgctggacggaattctgttaccctttatgcttctgagccagggcctgggagttctccgtgtggcctgggacagtcgagcttgttcccctgcactgagggctctcctaagaaaactcggcgggctgttcctgccacccgaagcaagcctctctctcgattcctcagagggcctcctggcgagagctgttgttcaagctgtgatcgagcagctgctggtgagcgggcagcccctgctgattttcctggaggagcctcccggcgccctcggtccgcgccttagtgcgctcggccaggcttgggtcggattcgtggtccaagccgtgcaggtggggattgtgcctgacgcactgctagtgcctgtcgctgtgacctacgatctcgttcccgacgccccatgcgacattgatcatgcgtccgccccacttggtctctggacgggggccctggccgttcttagaagcctgtggagtagatggggatgcagccatcggatctgctccagggttcatctggcccaacctttctcactccaagagtacattgtttccgctcgcagctgctggggcggtcgtcagaccctagagcagctgcttcagcccatcgtcctggggcaatgcaccgccgtgcctgacacagagaaagagcaagagtggacgcctatcaccggccctctgttagctctgaaggaagaggatcaactgctggtgaggcgactgtcatgccacgtcctatcggcttccgttgggagcagtgccgtgatgagcaccgcaatcatggcaaccttactgcttttcaagcaccagaagctgcttggggaattcagctggcttacagaagagatcctcctccgcggctttgacgtgggcttttctggccagctccgctcactcctgcagcattcactttccctgctccgggcacatgttgcccttctgcgcatcagacagggcgacttattagtggttcctcagcccggaccaggcctcacccacctggcccaactctcagcagagctgctgcccgtgttcctgtccgaggctgtgggtgcctgcgccgtgagaggtctgctggcaggcagggtgcctcctcaagggccgtgggagctccaaggcatcctcctccttagtcagaacgaactctataggcagattctgttgttaatgcaccttctgcctcaggatctacttctgctcaagccctgccagagctcatactgctattgccaggaggtgcttgaccgtctaattcaatgtgggcttctggtggcggaagaaagctgggccacacagtcgtcttgctcctctagctgcagaccccccccccgaaaaaagggtagtagttccgttagaacacaaagcagtccgtccgtgctgtcgggcccgtctgagacttag

SEQ ID NO: 286622 - DNA, 483 bp, Artificial Sequence
  derived and/or modified sequence
atggctactatgcttgagggtcggtgtcaaacccagcctagatcgagcccatccggcagagaagctagtctttggagctcgggttttggaatgaaactggaagccgtgacacccttcctcgggaagtataggccctttgtgggacgctgttgtcagacctgtactccaaagagctgggagtctcttttccatcgttctattaccgacttaggattctgtaatgtcattctggtcaaagaagaaaataccagattccgcggatggcttgtgcggagactctgttatttcctatggtctcttgagcagcacataccaccttgccaggacgtcccccaaaagatcatggagtccacgggcgtgcagaacctcctttccggccgcgtaccaggcggcaccggggaaggccaagttccagatctcgtgaaaaaagaggtgcagcggatactgggacatatacaggccccccccagacccttcctttag

SEQ ID NO: 286623 - DNA, 2016 bp, Artificial Sequence
  derived and/or modified sequence
atggccaccatgctggagggccgctgccagacccagcccaggagcagccccagcggccgggaggccagcctgtggagcagcggcttcggcatgaagctggaggccgtgacccccttcctgggcaagtaccggccctttgtgggccgctgctgccagacctgcacccccaagtcctgggagagcctcttccacaggagcatcacagacctgggcttctgcaacgtcatcctggtgaaggaggagaacacccgcttccggggctggctggtgcggcggctgtgctacttcctgtggagcctggagcagcacatccccccctgccaggatgtgccccagaagatcatggagagcactggagtgcagaacctgctgagcggccgggtgcctgggggcaccggggagggccaggtgcctgacctggtgaagaaggaggtgcagaggatcctgggccacatccaggccccaccccggcccttcctggtgcggctcttctcctgggccctgctgcgcttcctgaactgcctcttcctgaatgtgcagctgcacaagggccagatgaagatggtgcagaaggccgcccaggccggcctgcccctggtgctgctgagcacccacaagaccctgctggatggcatcctgctgcccttcatgctgctgagccagggcctgggcgtgctgcgggtggcctgggacagccgggcctgcagccctgccctgcgggccctgctgaggaagctgggcggcctcttcctgcccccagaggccagcctgagcctggacagcagcgagggcctgctggcccgggctgtggtgcaggccgtgattgagcagctgctggtgtctggccagcccctgctgatcttcctggaggagcccccaggggccctgggcccccggctgagcgccctgggccaggcctgggtgggctttgtggtgcaggccgtgcaggtgggcatcgtgcctgatgccctgctggtgcctgtggccgtgacctatgacctggtgcctgatgccccctgtgacatcgaccacgccagcgcccccctgggcctgtggacaggagccctggccgtgctgcggagcctgtggagccgctggggctgcagccaccgcatctgcagccgggtgcacctggcccagcccttcagcctgcaggagtacatcgtgtctgcccggagctgctggggcggccggcagaccctggagcagctgctgcagcccatcgtgctgggccagtgcacagctgtgcctgacacagagaaggagcaggagtggacccccatcaccggccccctgctggccctgaaggaggaggaccagctgctggtgcggcggctgagctgccacgtgctgagcgcctctgtgggcagcagcgctgtgatgagcacagccatcatggccaccctgctgctcttcaagcaccagaagctgctgggggagttctcctggctgacagaggagatcctgctgcggggctttgatgtgggcttcagcggccagctgcggagcctgctgcagcacagcctgagcctgctgcgggcccacgtggccctgctgcgcatccggcagggcgacctgctggtggtgccccagcccggccctggcctgacccacctggcccagctgtctgctgagctgctgcccgtcttcctgtctgaggccgtgggcgcctgtgctgtgcggggcctgctggccggccgggtgcccccccagggcccctgggagctgcagggcatcctgctgctgagccagaatgagctgtaccggcagatcctgctgctgatgcacctgctgccccaggacctgctgctgctgaagccctgccagagcagctactgctactgccaggaggtgctggacaggctcatccagtgtggcctgctggtggccgaggagagctgggccacccagagcagctgcagcagcagctgccggcccccacccaggaagaagggcagcagctctgtgaggacccagagcagccccagcgtgctgagcggccccagcgagacctag

SEQ ID NO: 286624 - DNA, 483 bp, Artificial Sequence
  derived and/or modified sequence
atggccaccatgctggagggccgctgccagacccagcccaggagcagccccagcggccgggaggccagcctgtggagcagcggcttcggcatgaagctggaggccgtgacccccttcctgggcaagtaccggccctttgtgggccgctgctgccagacctgcacccccaagtcctgggagagcctcttccacaggagcatcacagacctgggcttctgcaacgtcatcctggtgaaggaggagaacacccgcttccggggctggctggtgcggcggctgtgctacttcctgtggagcctggagcagcacatccccccctgccaggatgtgccccagaagatcatggagagcactggagtgcagaacctgctgagcggccgggtgcctgggggcaccggggagggccaggtgcctgacctggtgaagaaggaggtgcagaggatcctgggccacatccaggccccaccccggcccttcctgtag

SEQ ID NO: 286625 - DNA, 2016 bp, Artificial Sequence
  derived and/or modified sequence
atggccaccatgctggagggccggtgccagacccagccccggagctcaccttccgggcgggaggctagcctttggtcctcaggcttcgggatgaagctcgaggcggtcacgccgttcctcggtaagtatcggcctttcgtcgggagatgctgccagacctgcacacctaaaagttgggaatccctgttccatcgttccattacggacctagggttttgcaatgtgatcctcgtgaaggaggagaacactaggtttagggggtggctggtccggaggctctgctacttcctttggtccctcgaacaacatatcccaccctgtcaggatgtgccgcagaagataatggagtccaccggggtacagaacttactgtctgggcgcgtccctggtggcaccggtgaagggcaggtgccagacctggtaaaaaaagaggtgcagcgcatactagggcacattcaagctcccccacgccccttcttagttcgcctcttcagttgggccctcctacggtttctgaactgcctgttcctgaatgtgcagctgcacaagggccagatgaaaatggtccagaaagccgcccaggccggacttcccctagtgttgttgtcaacccacaaaacactgctcgatggcattctgctccctttcatgctgctgtctcagggactgggcgttcttcgagtcgcttgggattcccgggcctgtagccctgccctccgagctctcctgagaaaactcggagggctatttcttccccccgaagcctcccttagcctggattctagtgaagggctgttggccagggcagttgtgcaagccgtgattgaacagctgctggtgagtggacaaccattgctcatttttctagaggaacccccgggtgccctcggccctcgcctgagtgcgttgggccaggcctgggtggggttcgtcgttcaggcagtccaggttggcattgtgccagacgccctgctcgtcccagtagctgtgacttacgacctggtgccagacgctccatgtgacattgaccatgccagtgccccgctcggcctctggactggggctctcgctgtcctgcggagcctatggtcacgctggggatgttctcaccgcatttgctcacgcgtgcatctggcacagcccttttctctgcaggagtacatcgtgtcagctcgtagctgttggggcggtcgacagacacttgagcaactcttacagccgatagtgcttggtcagtgcacagctgtaccagacaccgagaaggagcaggagtggactcctattacaggcccacttctcgctctcaaagaagaagatcagctgctggttagacgactcagctgtcatgtgctctctgccagcgtgggcagcagtgccgtgatgagcacagcaatcatggccacgctgttgctgtttaagcatcagaaattgctaggcgaattcagctggctcaccgaggaaattctactccgggggttcgacgttggcttcagtggacagcttaggtcgctgctccagcacagtctgtctctccttcgggcccacgtcgcgttgttgcggatccggcagggagacctgttggtggttccccagcccggtccaggattaacccacctcgcccaattaagtgccgagcttcttcctgtttttctctccgaggctgtgggtgcctgtgcagtccgagggctgttagcgggtagggtcccaccacaaggcccctgggagctgcagggaatcctgctcctcagtcaaaacgagctgtaccgccagattctgctactgatgcacctcttgccacaggaccttttactgctaaagccctgccagagctcatactgctattgccaggaggtccttgatcgactgatccagtgtggcttattggtggcggaagagtcgtgggcaacccaaagcagttgcagctcgtcttgtcggccaccccctagaaaaaaaggttccagttcagttcggacacaaagcagcccatcagttctgtcgggcccgagcgagacttag

SEQ ID NO: 286626 - DNA, 483 bp, Artificial Sequence
  derived and/or modified sequence
atggccaccatgctggagggccggtgccagacccagccccggagctctccctcagggagagaggccagcctgtggtccagcggatttggcatgaagttggaagctgtcactccatttctgggaaaatatagacccttcgtcggcagatgttgccagacctgtacaccaaaatcatgggaaagcctgttccacaggtccattactgatctgggcttctgcaacgtgatcctggtcaaagaagagaacaccaggtttcgcggctggctagtaagaagactctgctactttctttggtcacttgaacagcatattcctccgtgtcaggatgttccacagaagattatggaatctacaggcgtccagaacttgttgtccggccgtgtaccggggggcactggcgaggggcaggtgcccgacctggttaagaaagaggtgcaaagaatactcgggcatattcaggcacctccccgacctttcttgtag

SEQ ID NO: 286627 - DNA, 2016 bp, Artificial Sequence
  derived and/or modified sequence
atggccactatgcttgaggggaggtgccaaacacaacctagaagctcacccagcggcagggaggcctccctgtggagcagcgggtttggtatgaagctggaagccgtaacaccatttctcggcaagtacaggccttttgtgggccgttgttgccagacttgtacacctaagtcctgggaatctcttttccaccggtctattacggacctaggattctgcaatgtaatcctggtcaaggaggaaaacacacgattccgcggttggttagtgagaagattgtgttacttcctatggtccctcgaacagcacatacccccttgtcaggatgttccacagaaaattatggaatccaccggtgttcaaaatctgctttccggaagggtaccaggtggaacaggagagggtcaggttcctgatctagtgaaaaaagaggtacaacgaatcctggggcacatccaagccccaccacgcccattccttgtccggttgttttcttgggcactgcttcggtttctgaattgcctgttcctgaacgtgcagctgcacaaggggcaaatgaagatggtccagaaagcagcccaggccggtctgccactggtcttgctgtcaactcacaagacactgctagatgggatccttctgcccttcatgctcctgagccaagggttgggtgtgcttagagtggcttgggactctcgagcttgttcaccggctctcagagcgttgctgcgcaagctcggcggtctgttcctgcctccggaagcaagtctcagtcttgatagctcggagggattgctcgcaagagctgtcgtgcaagcagttattgagcagctcctcgtgtccggacagcctcttcttattttcctggaggagccgccaggggcacttgggcctcggctgtccgcactggggcaggcctgggtggggttcgtggtgcaagccgttcaggtcgggatcgtacctgatgcattgctggttcccgtggctgtcacttatgatctggtcccggatgccccttgcgatatcgatcacgcttccgctcctctcggtttatggacgggcgcacttgcagtgctaaggtcgctgtggtcacgctggggttgtagtcaccgtatctgctccagggtgcatctagctcagccattttcgctacaagaatatatcgtgtctgctcgaagctgctgggggggtaggcaaaccctggaacaactccttcaacctatcgtgttaggtcagtgtactgctgtgcctgacaccgagaaggagcaagagtggactcccatcacgggtcctctcttagccctgaaggaagaggaccagctgctggtcagacggctgagttgccatgttctgtcggcgtccgtcggaagcagcgccgtgatgagcacagctattatggccacgctcttactgtttaagcaccagaagctcctcggagagttttcttggctgaccgaggagatattactccggggattcgatgtgggcttctccggtcagctacgatccctcttgcagcattctctgtcccttctgcgggcacatgttgctctgttacgtataaggcagggagatctgctggtcgtgccgcagcctggacccggtttaacccacctcgcccagctgtctgcggagctgctgcctgtgtttctatccgaagccgtcggggcatgcgctgtgagggggctccttgctgggagggtgcctcctcaaggtccttgggagttgcagggtatactgctactttctcagaatgaactgtatcgccagatccttctcttgatgcatctgctgccacaagacctgctgctgctgaagccctgccagtctagctattgctactgtcaggaggttctggacagattgattcaatgcggcctcctcgtggctgaagaatcttgggccacacagagttcttgctcaagctcgtgtcggccaccgcctcgtaagaaaggatcgagctcggtgaggacccagtctagtccctctgtcctgagcggccctagcgagacctag

SEQ ID NO: 286628 - DNA, 483 bp, Artificial Sequence
  derived and/or modified sequence
atggcaaccatgttggagggcagatgccagacgcagccaaggagtagtcccagtgggcgtgaagcctcgctctggtcctccggatttggaatgaagctcgaagcagtgaccccgtttctgggcaagtatcggccatttgttggcagatgctgtcagacctgtactcctaaatcatgggagtccttgtttcatcggagcattacagacctaggcttttgcaatgtcatactagtcaaggaggagaacactcggttcaggggctggctggtgcgacggctctgctactttctctggtccctggagcaacacatacccccttgccaagacgtcccccagaagatcatggaaagtaccggggtccagaatttactctccggacgggtgccaggcggaacgggagagggtcaagtcccggatctcgtcaaaaaggaagtgcagcggatacttggacatatacaggccccacctcgccctttcttgtag

SEQ ID NO: 286629 - protein, 473 aa, Artificial Sequence
  derived and/or modified sequence
MATKTTCMSSQGSDDEQIKRENIRSLTMSGHVGFESLPDQLVNRSIQQGFCFNILCVGETGIGKSTLIDTLFNTNFEDYESSHFCPNVKLKAQTYELQESNVQLKLTIVNTVGFGDQINKEESYQPIVDYIDAQFEAYLQEELKIKRSLFTYHDSRIHVCLYFISPTGHSLKTLDLLTMKNLDSKVNIIPVIAKADTVSKTELQKFKIKLMSELVSNGVQIYQFPTDDDTIAKVNAAMNGQLPFAVVGSMDEVKVGNKMVKARQYPWGVVQVENENHCDFVKLREMLICTNMEDLREQTHTRHYELYRRCKLEEMGFTDVGPENKPVSVQETYEAKRHEFHGERQRKEEEMKQMFVQRVKEKEAILKEAERELQAKFEHLKRLHQEERMKLEEKRRLLEEEIIAFSKKKATSEIFHSQSFLATGSNLRKDKDRKKEPGCRFELLCIDVRACETNGGRKDAEKGREGHSARGQP

SEQ ID NO: 286630 - DNA, 1353 bp, Artificial Sequence
  derived and/or modified sequence
atggcttctagtgaggtcgctcggcatctgctgttccagtcgcacatggcaaccaagacaacttgcatgtccagccaggggtcagatgacgaacaaattaagagagagaatatacgctctctcactatgagcgggcatgtcgggttcgagtccctgccagatcagctggtgaatcgaagcatccagcaggggttctgtttcaacatcctgtgcgtgggcgagactggtatcggaaaaagtactctcatagacactcttttcaacacaaacttcgaggactatgagagctcccatttttgcccaaacgtcaagctgaaagcccagacctacgaactgcaggaaagcaatgtacagctgaagcttacaatcgtgaataccgtgggatttggcgatcagattaacaaggaagagagctatcagcccatcgtagactatatcgatgctcagtttgaagcctatttgcaagaagagctcaagattaagcggagccttttcacataccatgattcccgtatccacgtgtgcctctatttcataagccctactggccatagtctgaaaactctggatctcctgactatgaaaaacttggactcaaaagtgaatatcatccccgtaattgcaaaggcagacactgtttccaaaactgagctccagaaatttaagattaagctcatgagcgaactggtgtcaaacggcgtgcaaatttaccagttccctaccgatgatgatacgatcgccaaggtcaatgcagctatgaatggacagctacctttcgccgtggtaggttccatggacgaggttaaggtcggaaacaaaatggttaaagcccgacagtatccctggggcgtggtgcaggtcgagaacgagaaccattgcgatttcgtgaaattgagggagatgctcatttgtacgaacatggaggatctgcgggaacagacccacacgaggcattacgaactataccgaagatgcaaacttgaggagatgggattcacagacgtagggcctgagaacaagccggtttcggtgcaggaaacctatgaagctaaacgccacgaattccacggtgagaggcaaagaaaagaggaggagatgaagcagatgttcgtgcagagagtaaaagagaaagaggccatattgaaggaagccgaaagggaactccaggccaaattcgagcacttgaagcgtcttcatcaggaggaacgaatgaaattggaggagaaacgcagattactcgaggaagagataattgccttttctaagaagaaggccaccagcgagatcttccactcacaatcatttctcgccaccggcagtaacctgcgaaaggacaaggaccggaagaagtag

SEQ ID NO: 286631 - DNA, 1422 bp, Artificial Sequence
  derived and/or modified sequence
atggcgactaagactacttgcatgtcttcacaaggatccgacgacgagcagattaagagggagaatattcgctccctcaccatgagtggacacgtcggatttgagagcctccccgatcaactagttaatcgttcaattcaacaggggttctgctttaacatattgtgcgtcggcgagaccggaatcggaaaatcaactttaatagatactctcttcaacacaaatttcgaggattacgaaagctctcacttttgccccaacgtgaaactgaaggctcagacatacgagcttcaggagtccaacgtgcagttaaaactgactatagtcaatacagttggtttcggagaccagatcaataaagaagagtcctatcagcccatcgtcgattacattgacgctcagttcgaggcctacttacaggaagagttgaaaatcaagcggtcactgtttacatatcacgattctaggatccacgtttgcctatattttatttctcccacgggacactccctcaaaactctggatctcttaaccatgaaaaatctggacagcaaagtgaatatcatcccggtgatcgctaaggctgacactgtttcaaagactgaactgcaaaaattcaagatcaagctgatgtccgaattggtgtccaacggggtgcagatttatcaatttcccaccgacgacgatacaattgccaaagtcaatgctgccatgaacggacagctgccattcgccgtagtcgggtcaatggatgaagtcaaagtaggtaataagatggttaaggctcgtcagtatccttggggcgtcgtgcaggtggagaacgagaaccattgtgatttcgtaaagcttagagagatgctgatttgtaccaacatggaggatttgcgcgagcagacacacactaggcactatgagctgtatcgccgctgcaaactcgaggagatgggtttcacagatgtggggccggaaaacaagcccgtttcagtacaggagacttatgaggctaaacgccatgagttccacggggaacgccagcggaaagaggaagagatgaagcagatgttcgtccagagagtgaaagagaaggaggcaatattaaaggaggccgagcgcgagttgcaagccaaatttgagcatcttaaacggctgcaccaggaggaaaggatgaaactagaggaaaagcgccgcctgttagaggaggaaattatagcatttagcaagaagaaggcaacatcagagatcttccactctcaaagtttccttgctaccgggagcaacttacgtaaagataaagacaggaagaaggaacctggctgccgattcgagctgctttgtatcgatgtgagggcctgtgagactaacgggggtaggaaggatgccgagaaaggaagggaaggccactctgcccgcggccagccgtag

SEQ ID NO: 286632 - DNA, 1353 bp, Artificial Sequence
  derived and/or modified sequence
atggccagcagcgaggtggcccggcacctgctcttccagagccacatggccaccaagaccacctgcatgagcagccagggcagtgatgatgagcagatcaagcgggagaacatccgcagcctgaccatgagcggccacgtgggctttgagagcctgcctgaccagctggtgaacagaagcatccagcagggcttctgcttcaacatcctgtgtgtgggggagactggaattggcaagagcaccctgattgacaccctcttcaacaccaactttgaggactatgagagcagccacttctgccccaacgtgaagctgaaggcccagacctatgagctgcaggagagcaatgtgcagctgaagctgaccatcgtgaacacagtgggctttggagaccagatcaacaaggaggagagctaccagcccatcgtggactacattgatgcccagtttgaggcctacctgcaggaggagctgaagatcaagaggagcctcttcacctaccatgacagccgcatccacgtgtgcctgtacttcatcagccccaccggccacagcctgaagaccctggacctgctgaccatgaagaacctggacagcaaggtgaacatcatccctgtgattgccaaggctgacacagtgtccaagacagagctgcagaagttcaagatcaagctgatgtctgagctggtgtccaatggagtgcagatctaccagttccccacagatgatgacaccatcgccaaggtgaatgctgccatgaatggccagctgccctttgctgtggtgggctccatggatgaggtgaaggtgggcaacaagatggtgaaggcccggcagtacccctggggcgtggtgcaggtggagaatgaaaaccactgtgactttgtgaagctgcgggagatgctgatctgcaccaacatggaggacctgcgggagcagacccacaccaggcactatgagctgtaccgccgctgcaagctggaggagatgggcttcacagatgtgggccctgagaacaagcctgtgtctgtgcaggagacctatgaggccaagagacatgagttccacggggagcggcagaggaaggaggaggagatgaagcagatgtttgtgcagagggtgaaggagaaggaggccatcctgaaggaggccgagcgggagctgcaggccaagtttgagcacctgaagaggctgcaccaggaggagaggatgaagctggaggagaagaggcggctgctggaggaggagatcatcgccttcagcaagaagaaggccaccagcgagatcttccacagccagagcttcctggccaccggcagcaacctgaggaaggacaaggacaggaagaagtag

SEQ ID NO: 286633 - DNA, 1422 bp, Artificial Sequence
  derived and/or modified sequence
atggccaccaagaccacctgcatgagcagccagggcagtgatgatgagcagatcaagcgggagaacatccgcagcctgaccatgagcggccacgtgggctttgagagcctgcctgaccagctggtgaacagaagcatccagcagggcttctgcttcaacatcctgtgtgtgggggagaccggcatcggcaagagcaccctgattgacaccctcttcaacaccaactttgaagattatgagagcagccacttctgccccaacgtgaagctgaaggcccagacctatgagctgcaggagagcaatgtgcagctgaagctgaccatcgtgaacacagtgggctttggagaccagatcaacaaggaggagagctaccagcccatcgtggactacattgatgcccagtttgaggcctacctgcaggaggagctgaagatcaagaggagcctcttcacctaccatgacagccgcatccacgtgtgcctgtacttcatcagccccaccggccacagcctgaagaccctggacctgctgaccatgaagaacctggacagcaaggtgaacatcatccctgtgattgccaaggctgacacagtgtccaagacagagctgcagaagttcaagatcaagctgatgtctgagctggtgtccaatggagtgcagatctaccagttccccacagatgatgacaccatcgccaaggtgaatgctgccatgaatggccagctgccctttgctgtggtgggctccatggatgaggtgaaggtgggcaacaagatggtgaaggcccggcagtacccctggggcgtggtgcaggtggagaatgaaaaccactgtgactttgtgaagctgcgggagatgctgatctgcaccaacatggaggacctgcgggagcagacccacaccaggcactatgagctgtaccgccgctgcaagctggaggagatgggcttcacagatgtgggccctgagaacaagcctgtgtctgtgcaggagacctatgaggccaagagacatgagttccatggagagcggcagaggaaggaggaggagatgaagcagatgtttgtgcagagggtgaaggagaaggaggccatcctgaaggaggccgagcgggagctgcaggccaagtttgagcacctgaagaggctgcaccaggaggagaggatgaagctggaggagaagaggcggctgctggaggaggagatcatcgccttcagcaagaagaaggccaccagcgagatcttccacagccagagcttcctggccaccggcagcaacctgaggaaggacaaggacaggaagaaggagcccggctgccgctttgagctgctgtgcattgatgtgcgggcctgtgagaccaacggcggcaggaaggatgctgagaagggccgggagggccacagcgcccggggccagccctag

SEQ ID NO: 286634 - DNA, 1353 bp, Artificial Sequence
  derived and/or modified sequence
atggccagcagcgaggtggcccggcacctgctgttccagagccacatggcaaccaagaccacctgcatgtcttcccaagggagtgacgacgaacagatcaagcgcgagaacatcaggtccctcaccatgtccggtcatgtgggcttcgaaagtttgcctgatcagttggtgaatagatctatccagcagggattctgtttcaacatcttgtgtgttggtgaaaccgggataggaaaatccaccctgattgataccctgttcaatactaactttgaggactacgaatccagtcatttttgccctaacgtgaagctcaaagcccaaacgtacgaactacaagagagcaatgtccagctgaagcttacaattgttaacactgtcggctttggtgaccagatcaacaaagaggagtcataccaaccaatcgtagactacatcgatgctcaatttgaggcctatctacaagaagagctgaaaataaagagatcactgtttacataccacgacagccggattcacgtgtgtctctatttcatctccccaacaggccactctttaaagactctagacctgctgactatgaagaatctggacagcaaggtgaatataatccccgttatcgccaaggccgataccgtgagtaagaccgaacttcagaaattcaaaattaaactgatgtccgaattagtttccaatggtgtgcagatctatcagtttcccacggatgatgatacaatcgcaaaggtaaatgccgcaatgaatggccagctccctttcgcagttgtaggttctatggatgaggtgaaagttgggaacaagatggtcaaggccaggcagtacccttggggcgtggtgcaggtggaaaatgaaaaccactgcgatttcgtaaaactgagagagatgctgatctgtaccaacatggaggatctgcgcgaacagacccatacccggcattacgagctctaccggcggtgcaagctggaggagatgggattcacagacgtgggtcccgaaaataaacctgtgagtgtgcaggagacatacgaggccaagcgccatgaattccatggagaaaggcaaagaaaggaggaagagatgaaacagatgttcgttcagagagtgaaagagaaggaggctattctcaaggaagccgaaagagagctgcaagccaagttcgaacacttaaaacgcctacatcaggaagagcgtatgaagctggaggagaaacgcagacttctcgaagaggagatcattgccttcagtaaaaagaaagccacctctgagatcttccattcccagtcatttttggctactggaagtaatctgaggaaggacaaggaccgcaagaagtag

SEQ ID NO: 286635 - DNA, 1422 bp, Artificial Sequence
  derived and/or modified sequence
atggccaccaagaccacctgcatgagcagccagggcagcgacgacgagcaaattaaaagagaaaacatcaggagcctgaccatgtccggccacgttggattcgagtccctacctgaccaattggtgaacagatccatccagcagggcttctgttttaacattttatgtgtgggcgagaccgggataggcaaatcaaccttgattgacaccctgttcaacacgaatttcgaggattacgaatcctcccacttctgtccgaacgtgaaactgaaagctcagacctacgaactgcaggagtctaacgtgcagttgaaacttacaatcgtgaacacggtgggctttggcgaccaaatcaacaaagaggagtcataccagcccatcgtggattacatcgatgcccagttcgaggcttatctgcaagaggagctcaagattaagcgtagtctgttcacctaccacgactcaaggattcatgtctgtctgtacttcatttcgccaactgggcattccctcaagacgttggatttgctgacgatgaaaaatctcgatagtaaggtcaacatcattcctgtaatcgctaaggcagacacggtgtccaagacagagttgcagaaatttaaaatcaaactgatgagcgaactggtgtccaatggagttcagatttaccagtttcctaccgacgatgacacgatcgccaaagtgaatgccgctatgaacggacagctgcccttcgccgtggtaggttcgatggacgaggtgaaggtgggtaataaaatggttaaggccagacaatacccttggggcgtggtgcaggtcgagaatgaaaatcattgcgattttgtgaagctgagggaaatgctgatttgcacaaatatggaggatttgcgggagcagactcacaccaggcattatgaattgtataggcgctgtaaactggaagagatggggtttacagatgtggggcccgagaacaagcccgtgtctgttcaggagacctatgaagccaaaaggcacgaattccacggcgagcggcagaggaaagaagaagagatgaagcagatgtttgtgcagagagtgaaagaaaaggaggccattctgaaagaggccgaacgggagctgcaagctaagtttgagcacctgaagcgcctccaccaggaagagaggatgaaactggaggaaaaaaggcgacttttagaagaggagatcatagcattctccaagaagaaagcaacctcagagatattccacagccagagcttcctggcgaccggcagtaatctgagaaaagataaggatagaaaaaaggagcccggctgtcggtttgagctcttgtgcattgatgtgagggcctgcgaaacaaacggcgggcggaaagacgctgagaagggccgggagggtcactccgcacggggacaaccgtag

SEQ ID NO: 286636 - DNA, 1353 bp, Artificial Sequence
  derived and/or modified sequence
atggccagctcagaagtcgcacggcacctcttgttccagtcccacatggcgacaaaaaccacatgcatgagcagccaaggcagtgatgacgaacagatcaaacgagaaaatatccggtccctcaccatgtccggtcacgtgggctttgagagcctgcctgaccagctcgtcaatagatctatccaacaaggattttgctttaacatactctgtgtcggagagaccggaatcggtaagtccaccctcatcgacacgctcttcaacaccaacttcgaagactatgaatcttcacatttttgcccaaacgtgaaactgaaggcgcagacctacgagctgcaggaatctaacgtgcagctcaagctcaccattgtcaacacagtgggattcggtgaccagatcaacaaggaggagagttaccagcccatcgtcgattatatcgatgcccagtttgaagcgtacctccaggaggaacttaagataaagaggtctctcttcacatatcacgatagtaggatacatgtttgcctttattttatatccccaactggacattctctgaaaacgctggatctgctcacaatgaaaaacctggattccaaagtcaacataattccggtcatagccaaggcagatacagtgagcaagactgagctgcagaagttcaaaattaagctgatgtccgagctcgtaagtaacggcgtgcagatctaccagtttccaacggatgacgataccatcgccaaggtgaacgccgcaatgaatggccagctcccatttgccgtggtgggctccatggatgaggtgaaggttggcaacaaaatggtcaaggcccgacagtacccctggggagtcgttcaagtggagaatgagaaccactgtgattttgtaaaactgagggaaatgctgatatgtacaaacatggaggaccttcgagaacagacccatactaggcactacgagttataccggagatgcaagctcgaagagatgggttttacagacgtgggtcccgaaaataaacctgtatccgtccaagagacgtacgaggcaaagcggcatgagttccatggagagaggcagaggaaagaggaagagatgaagcagatgttcgtccagcgagtcaaagagaaagaagccattctgaaggaggcggaacgagaactgcaggcgaaattcgagcatctgaagcgcctgcaccaggaggaacggatgaaattggaggagaagcgtcgcctgctcgaagaggaaatcattgcctttagcaaaaagaaggctacttcggagatttttcactcacaatcctttctggccacgggtagcaacttgcggaaagacaaggatcgcaaaaagtag

SEQ ID NO: 286637 - DNA, 1422 bp, Artificial Sequence
  derived and/or modified sequence
atggccaccaaaaccacatgcatgagcagccagggctcggacgacgagcagatcaaaagagaaaacattaggagccttaccatgtcggggcatgtcggatttgagagccttcctgaccagctggtgaaccgatctattcaacaaggattctgctttaacatcctgtgcgtgggagagacgggcatcggaaagtctacactgatcgacactctttttaacactaacttcgaggactacgagagtagccacttttgccctaacgtaaaactgaaagcccagacttatgaactgcaagagtcaaacgtgcagttgaagctgacaatcgtgaacacggtgggttttggcgatcaaattaacaaggaggaatcataccagcccatagtggattacatcgatgcccagtttgaagcataccttcaagaagaactaaagatcaagcggtcattgtttacataccacgactctcgaatacacgtgtgcctatactttattagtcccactggacattccttgaagacactcgaccttttgacgatgaaaaatctggactctaaggtgaatatcattcctgtgatagccaaggccgatactgttagcaagacagagctccagaagtttaagataaagctgatgtccgagctggtaagcaacggggtccagatttatcagtttcctacagacgatgacacaattgcaaaagtgaatgctgccatgaacgggcagttgccattcgccgttgtgggtagtatggacgaagttaaagtcggcaacaagatggtcaaagccaggcagtacccttggggggtggttcaggtcgagaatgagaatcactgcgattttgtgaaactgagagagatgctgatttgtactaacatggaggacctgcgcgagcagactcatactaggcactacgagctttaccgcaggtgtaagctagaggagatggggttcaccgacgtgggacccgagaataagccggtgagcgtgcaggagacctatgaggcaaaacgtcacgaattccacggggagagacagcgaaaagaagaggagatgaaacagatgtttgtacagcgggttaaggagaaggaagccattttaaaagaggcggagagggaattgcaggctaagttcgagcacctgaaacgcctgcaccaggaggagagaatgaaattggaagaaaaacggaggctgctggaagaagagattatcgcgttttccaaaaaaaaggccacctcagaaatattccattctcagtcctttctggctacagggtcaaatctccgtaaggataaggaccgcaagaaggaacccggatgtcggtttgaattgctgtgtattgatgttcgtgcctgcgaaacaaatggcggaaggaaggatgctgagaaggggagagagggacactctgcaagaggtcagccttag

SEQ ID NO: 286638 - DNA, 1605 bp, Artificial Sequence
  derived and/or modified sequence
ccgcgaccatggcctcctccgaggtggcgcggcacctgctctttcagtctcacatggcaacgaaaacaacttgtatgtcttcacaaggatcagatgatgaacagataaaaagagaaaacattcgttcgttgactatgtctggccatgttggttttgagagtttgcctgatcagctggtgaacagatccattcagcaaggtttctgctttaatattctctgtgtgggggaaactggaattggaaaatcaacactgattgacacattgtttaatactaattttgaagactatgaatcctcacatttttgcccaaatgttaaacttaaagctcagacatatgaactccaggaaagtaatgttcaattgaaattgaccattgtgaatacagtgggatttggtgaccaaataaataaagaagagagctaccaaccaatagttgactacatagatgctcagtttgaggcctatctccaagaagaactgaagattaagcgttctctctttacctaccatgattctcgcatccatgtgtgtctctacttcatttcaccgacaggccactctctgaagacacttgatctcttaaccatgaagaaccttgacagcaaggtaaacattataccagtgattgccaaagcagatacggtttctaaaactgaattacagaagtttaagatcaagctcatgagtgaattggtcagcaatggcgtccagatataccagttcccaacggatgatgacactattgctaaggtcaacgctgcaatgaatggacagttgccgtttgctgttgtgggaagtatggatgaggtaaaagtcggaaacaagatggtcaaagctcgccagtacccttggggtgttgtacaagtggaaaatgaaaaccactgtgactttgtaaagctgcgggaaatgctcatttgtacaaatatggaggacctgcgagagcagacccataccaggcactatgagctttacaggcgctgcaaactggaggaaatgggctttacagatgtgggcccagaaaacaagccagtcagtgttcaagagacctatgaagccaaaagacatgagttccatggtgaacgtcagaggaaggaagaagaaatgaaacagatgtttgtgcagcgagtaaaggagaaagaagccatattgaaagaagctgagagagagctacaggccaaatttgagcaccttaagagacttcaccaagaagagagaatgaagcttgaagaaaagagaagacttttggaagaagaaataattgctttctctaaaaagaaagctacctccgagatatttcacagccagtcctttctggcaacaggcagcaacctgaggaaggacaaggaccgtaagaagtaagaggcccagccaccctccctggcagccctgcccacacttgtcacattgccctgtcggatcttcctagcgcttcttacttctgcttccttatgctttgtcttccttctccaactaaatgtcagctcctggagaggagagaccttgtccctcttgttcactgctgtttccccagcatccagaacagcacctggcacatgttatgtgttcagtatttgccaaaatgaatgaatgaacaaaataaaaa

SEQ ID NO: 286639 - DNA, 1353 bp, Artificial Sequence
  derived and/or modified sequence
atggccagcagcgaggtggccagacacctgctgttccagagccacatggccaccaagaccacctgcatgagcagccagggcagcgacgacgagcagatcaagagagagaacatcagaagcctgaccatgagcggccacgtgggcttcgagagcctgcccgaccagctggtgaacagaagcatccagcagggcttctgcttcaacatcctgtgcgtgggcgagaccggcatcggcaagagcaccctgatcgacaccctgttcaacaccaacttcgaggactacgagagcagccacttctgccccaacgtgaagctgaaggcccagacctacgagctgcaggagagcaacgtgcagctgaagctgaccatcgtgaacaccgtgggcttcggcgaccagatcaacaaggaggagagctaccagcccatcgtggactacatcgacgcccagttcgaggcctacctgcaggaggagctgaagatcaagagaagcctgttcacctaccacgacagcagaatccacgtgtgcctgtacttcatcagccccaccggccacagcctgaagaccctggacctgctgaccatgaagaacctggacagcaaggtgaacatcatccccgtgatcgccaaggccgacaccgtgagcaagaccgagctgcagaagttcaagatcaagctgatgagcgagctggtgagcaacggcgtgcagatctaccagttccccaccgacgacgacaccatcgccaaggtgaacgccgccatgaacggccagctgcccttcgccgtggtgggcagcatggacgaggtgaaggtgggcaacaagatggtgaaggccagacagtacccctggggcgtggtgcaggtggagaacgagaaccactgcgacttcgtgaagctgagagagatgctgatctgcaccaacatggaggacctgagagagcagacccacaccagacactacgagctgtacagaagatgcaagctggaggagatgggcttcaccgacgtgggccccgagaacaagcccgtgagcgtgcaggagacctacgaggccaagagacacgagttccacggcgagagacagagaaaggaggaggagatgaagcagatgttcgtgcagagagtgaaggagaaggaggccatcctgaaggaggccgagagagagctgcaggccaagttcgagcacctgaagagactgcaccaggaggagagaatgaagctggaggagaagagaagactgctggaggaggagatcatcgccttcagcaagaagaaggccaccagcgagatcttccacagccagagcttcctggccaccggcagcaacctgagaaaggacaaggacagaaagaagtag

SEQ ID NO: 286640 - DNA, 1422 bp, Artificial Sequence
  derived and/or modified sequence
atggccaccaagaccacctgcatgagcagccagggcagcgacgacgagcagatcaagagagagaacatcagaagcctgaccatgagcggccacgtgggcttcgagagcctgcccgaccagctggtgaacagaagcatccagcagggcttctgcttcaacatcctgtgcgtgggcgagaccggcatcggcaagagcaccctgatcgacaccctgttcaacaccaacttcgaggactacgagagcagccacttctgccccaacgtgaagctgaaggcccagacctacgagctgcaggagagcaacgtgcagctgaagctgaccatcgtgaacaccgtgggcttcggcgaccagatcaacaaggaggagagctaccagcccatcgtggactacatcgacgcccagttcgaggcctacctgcaggaggagctgaagatcaagagaagcctgttcacctaccacgacagcagaatccacgtgtgcctgtacttcatcagccccaccggccacagcctgaagaccctggacctgctgaccatgaagaacctggacagcaaggtgaacatcatccccgtgatcgccaaggccgacaccgtgagcaagaccgagctgcagaagttcaagatcaagctgatgagcgagctggtgagcaacggcgtgcagatctaccagttccccaccgacgacgacaccatcgccaaggtgaacgccgccatgaacggccagctgcccttcgccgtggtgggcagcatggacgaggtgaaggtgggcaacaagatggtgaaggccagacagtacccctggggcgtggtgcaggtggagaacgagaaccactgcgacttcgtgaagctgagagagatgctgatctgcaccaacatggaggacctgagagagcagacccacaccagacactacgagctgtacagaagatgcaagctggaggagatgggcttcaccgacgtgggccccgagaacaagcccgtgagcgtgcaggagacctacgaggccaagagacacgagttccacggcgagagacagagaaaggaggaggagatgaagcagatgttcgtgcagagagtgaaggagaaggaggccatcctgaaggaggccgagagagagctgcaggccaagttcgagcacctgaagagactgcaccaggaggagagaatgaagctggaggagaagagaagactgctggaggaggagatcatcgccttcagcaagaagaaggccaccagcgagatcttccacagccagagcttcctggccaccggcagcaacctgagaaaggacaaggacagaaagaaggagcccggctgcagattcgagctgctgtgcatcgacgtgagagcctgcgagaccaacggcggcagaaaggacgccgagaagggcagagagggccacagcgccagaggccagccctag

SEQ ID NO: 286641 - protein, 475 aa, Artificial Sequence
  derived and/or modified sequence
MWRLWGDLWLLGMLMVCFHSSTEQKMAEYTMVSQEPVKWQENATPVTEQSIATAISWVEKLTVELTVSEAGRLDALLEAGRDKTIESIYYFVVGDVPEESKELLLQRALEIPCPVYTVSFNARGEGTIAFLKDLSAKTHSRFHAFAERTECVEFPAFSTKDGDNVMTWNSRKLKGKLPPGAGVREDVFLVWQEMEEACSTLAQIQRLVAEPPKPDVATVDCESETTSVEIASNPEDTWDSKTWLQKYGLKAQKLSLYDVLADCSFRHADGVVDIKAKPENESVQTSAETNKKTVHAKYCSRFVHAPWKDGSLVHVNITKEKCKWYSERIHTALARIRRRIKWLQDGSQSLFGRLHNDCIYILIDTSHSMKSKLDLVKDKIIQFIQEQLKYKSKFNFVKFDGQAVAWREQLAEVNEDNLEQAQSWIRDIKIGSSTNTLSALKTAFADKETQAIYLLTDGRPDQQPFKEGVSVLSHR

SEQ ID NO: 286642 - DNA, 1428 bp, Artificial Sequence
  derived and/or modified sequence
atgtggagactgtggggcgacctgtggctgctgggcatgctgatggtgtgcttccacagcagcaccgagcagaagatggccgagtacaccatggtgagccaggagcccgtgaagtggcaggagaacgccacccccgtgaccgagcagagcatcgccaccgccatcagctgggtggagaagctgaccgtggagctgaccgtgagcgaggccggcagactggacgccctgctggaggccggcagagacaagaccatcgagagcatctactacttcgtggtgggcgacgtgcccgaggagagcaaggagctgctgctgcagagagccctggagatcccctgccccgtgtacaccgtgagcttcaacgccagaggcgagggcaccatcgccttcctgaaggacctgagcgccaagacccacagcagattccacgccttcgccgagagaaccgagtgcgtggagttccccgccttcagcaccaaggacggcgacaacgtgatgacctggaacagcagaaagctgaagggcaagctgccccccggcgccggcgtgagagaggacgtgttcctggtgtggcaggagatggaggaggcctgcagcaccctggcccagatccagagactggtggccgagccccccaagcccgacgtggccaccgtggactgcgagagcgagaccaccagcgtggagatcgccagcaaccccgaggacacctgggacagcaagacctggctgcagaagtacggcctgaaggcccagaagctgagcctgtacgacgtgctggccgactgcagcttcagacacgccgacggcgtggtggacatcaaggccaagcccgagaacgagagcgtgcagaccagcgccgagaccaacaagaagaccgtgcacgccaagtactgcagcagattcgtgcacgccccctggaaggacggcagcctggtgcacgtgaacatcaccaaggagaagtgcaagtggtacagcgagagaatccacaccgccctggccagaatcagaagaagaatcaagtggctgcaggacggcagccagagcctgttcggcagactgcacaacgactgcatctacatcctgatcgacaccagccacagcatgaagagcaagctggacctggtgaaggacaagatcatccagttcatccaggagcagctgaagtacaagagcaagttcaacttcgtgaagttcgacggccaggccgtggcctggagagagcagctggccgaggtgaacgaggacaacctggagcaggcccagagctggatcagagacatcaagatcggcagcagcaccaacaccctgagcgccctgaagaccgccttcgccgacaaggagacccaggccatctacctgctgaccgacggcagacccgaccagcagcccttcaaggagggcgtgagcgtgctgagccacagatag

SEQ ID NO: 286643 - DNA, 1428 bp, Artificial Sequence
  derived and/or modified sequence
atgtggagattgtggggcgacctgtggctgcttgggatgcttatggtctgctttcattcttccactgagcagaagatggcagaatatacgatggtcagccaggagcccgtcaaatggcaggagaacgccactcccgtgaccgagcagtccattgccaccgccatttcctgggtggagaaactgactgtggagctgactgtaagtgaggcaggcaggttggatgcactgcttgaggcagggcgagataagaccatcgaaagcatctattactttgtggtcggtgatgtgcccgaagagtccaaagagttgctcttgcagcgggccttggagattccttgccctgtctatactgtgtcgttcaacgctagaggagaaggcaccattgccttccttaaagacttgtccgccaaaactcattcccggttccacgctttcgctgaacgaactgagtgcgtcgagtttcccgccttctccacaaaagacggcgataatgtgatgacttggaacagccgtaaactcaagggcaagctaccccctggtgctggcgtacgcgaggatgtctttcttgtctggcaggaaatggaggaggcgtgtagtacactcgctcaaattcagaggttggtcgctgagccccctaaacctgatgtagcaacagttgactgcgaatcagagactacgtccgttgagatagcctccaatcctgaggatacatgggactctaaaacatggttgcaaaaatacgggctgaaagcacagaaactcagcctgtacgatgtcctagccgactgcagcttcagacacgctgacggagtggtagacataaaagcaaagcccgagaatgagagtgtgcaaacaagtgctgagaccaataaaaagacagtacacgccaagtactgctcccgctttgttcatgccccgtggaaggatgggagtttagtacacgtgaatatcactaaggagaagtgcaagtggtacagtgagagaattcatacagctctcgcccgcattcggcggcgaataaagtggttacaggacggcagccagagcctgttcggccgcctccacaacgactgtatatatatcctgattgacaccagccactcaatgaaatctaaactggacctcgtgaaggacaagattattcagttcattcaggagcaactgaaatacaagtctaagttcaatttcgtaaagttcgacgggcaggctgtggcgtggcgtgagcagttggcggaagtgaatgaagataacctggagcaggcccagtcttggattagggatattaaaatcgggtctagcaccaatacgctgtctgccctcaaaaccgcgtttgctgacaaggagactcaggctatctatctcctgactgatgggagacctgaccagcagcccttcaaagagggggtcagcgtgttaagccatcgctag

SEQ ID NO: 286644 - DNA, 1428 bp, Artificial Sequence
  derived and/or modified sequence
atgtggaggctgtggggagacctgtggctgctgggcatgctgatggtgtgcttccacagcagcacagagcagaagatggccgagtacaccatggtgtcccaggagcctgtgaagtggcaggagaatgccacccctgtgacagagcagagcatcgccacagccatctcctgggtggagaagctgactgtggagctgactgtgtctgaggccggccgcctggatgccctgctggaggccggccgggacaagaccatcgagagcatctactactttgtggtgggagatgtgcctgaggagagcaaggagctgctgctgcagagggccctggagatcccctgccctgtgtacacagtgtccttcaatgcccggggggagggcaccatcgccttcctgaaggacctgagcgccaagacccacagccgcttccacgcctttgctgagaggacagaatgtgtggagttccctgccttcagcaccaaggatggagacaacgtgatgacctggaacagcaggaagctgaagggcaagctgcccccaggagctggggtgagagaagatgtgttcctggtgtggcaggagatggaggaggcctgcagcaccctggcccagatccagaggctggtggccgagccccccaagccagatgtggccaccgtggactgtgagagcgagaccacctctgtggagatcgccagcaaccctgaggacacctgggacagcaagacctggctgcagaagtatggcctgaaggcccagaagctgagcctgtatgatgtgctggccgactgcagcttcagacatgctgatggagtggtggacatcaaggccaagccagaaaatgaatctgtgcagaccagcgctgagaccaacaagaagacagtgcacgccaagtactgcagcagatttgtgcacgccccctggaaggatggcagcctggtgcacgtgaacatcaccaaggagaagtgcaagtggtacagcgagcgcatccacacagccctggcccgcatcagaagacgcatcaagtggctgcaggacggcagccagagcctgtttggccgcctgcacaatgactgcatctacatcctgattgacaccagccacagcatgaagagcaagctggacctggtgaaggacaagatcatccagttcatccaggagcagctgaagtacaagagcaagttcaactttgtgaagtttgatggccaggccgtggcctggagggagcagctggccgaggtgaatgaagacaacctggagcaggcccagagctggatccgggacatcaagattggcagcagcaccaacaccctgagcgccctgaagacagcctttgctgacaaggagacccaggccatctacctgctgacagatggccgcccagaccagcagcccttcaaggagggcgtgtctgtgctgagccacaggtag

SEQ ID NO: 286645 - DNA, 1428 bp, Artificial Sequence
  derived and/or modified sequence
atgtggcggctgtggggcgacctgtggctgctgggcatgctgatggtttgttttcattcgtctacggagcaaaaaatggctgaatacacaatggtttctcaggaacccgtgaaatggcaggagaatgcaacacccgttaccgagcagtctatagccaccgccattagctgggtggagaagctgacagtggagttaaccgtctccgaggcaggccgcctcgacgccctcctggaagcgggccgggacaaaactattgaaagcatctactacttcgtagtgggagatgtgcctgaagagtcaaaggagctgctgctgcaacgcgcactggaaatcccttgccccgtttacactgtgtccttcaacgctagaggggagggaacaattgcatttttgaaggacctgtcagcaaaaacacactcccggttccatgccttcgctgaaagaacagaatgtgtggagtttcccgctttttccactaaggatggtgacaacgtcatgacatggaattccaggaagctcaaaggtaaattgccccctggtgcaggggtacgagaagacgtgttcctcgtctggcaggagatggaagaagcctgcagcaccctcgctcagatacagcgtcttgtggccgaaccgccaaaacccgatgtagctacagtggattgtgagagtgaaactacttcagtcgagatcgccagcaaccccgaggatacctgggattcaaagacatggttacagaagtacggactgaaggcgcaaaagctctctctctacgatgtgctggcggattgcagctttcgacacgctgacggagtggtggacatcaaggccaagccagaaaatgaatctgtccagacttccgccgagaccaataagaaaacggttcatgcgaagtactgctctcggttcgtgcatgctccatggaaggacggatccctcgtgcatgtgaatatcaccaaggaaaagtgtaaatggtattccgagagaatccacacggcgctggctcgtatcagacggcggataaaatggctgcaggacgggagccagtcattattcggtcgcctccataatgactgtatctacatcctgatcgacacaagccattcaatgaagtctaaactggatctcgtaaaggataaaatcatacagtttatacaagaacagctcaagtacaaatccaaatttaactttgttaagttcgatggccaggccgtggcctggcgagagcagctagctgaagttaacgaggacaacttggagcaggctcaaagctggatacgggacatcaaaattggatcctctacgaacacgctttctgccctgaaaacggcgtttgctgataaagagacccaagctatttacttgctgaccgatggacgtcctgatcaacagccttttaaagaaggggtttcggtcttgagccaccgctag

SEQ ID NO: 286646 - DNA, 1428 bp, Artificial Sequence
  derived and/or modified sequence
atgtggcggctctggggggatttgtggctgttgggcatgctaatggtgtgctttcattcaagcacagagcagaaaatggccgagtacaccatggtaagtcaggaaccggtgaagtggcaggagaatgccacgccagtgactgagcagtcaattgctaccgcgatctcatgggtggagaagctgaccgtcgaactcactgtttcggaggctggcagattggacgctctcctggaagccggtagagataagaccatcgagtctatctactacttcgtagtcggtgacgtgcccgaggaatctaaagagttgcttctgcagcgggcattggaaatcccctgcccagtgtatacagtttcatttaacgccagaggcgagggtactattgcctttcttaaagatctctcagctaagacacattcccgatttcacgcgttcgcagagcggaccgagtgcgttgagtttcccgctttttcaaccaaggacggggataatgtaatgacgtggaacagcagaaagcttaagggtaagttaccacccggagcgggagtccgcgaggatgtgttcctcgtgtggcaagaaatggaggaggcctgctccacactggcacagattcaacgcctcgtcgcagagccgccaaaacccgatgtcgctacagtcgattgtgaatcggagactaccagcgtcgaaatagctagtaatcctgaggacacttgggactccaagacatggctgcagaaatacggtctgaaagcacagaagctgagtctatatgacgtcctagccgactgctcgttccgccacgccgacggcgttgtagacattaaagccaagcccgagaacgaaagcgtgcaaaccagcgccgagacaaacaagaagacagtgcatgccaagtattgttccagattcgtccatgcgccatggaaagatggtagtctggtacacgtaaatatcactaaagaaaagtgcaagtggtactcagaacggatacacaccgcacttgccaggatcaggcgaaggatcaagtggctgcaggacgggtcccagagtctgtttgggagacttcacaacgactgtatctacatcttaatagatacgtcccacagtatgaagagtaaactagacctcgtgaaggataagatcatccagttcatccaggaacaactcaaatacaaaagcaagtttaactttgtgaaatttgatggtcaagccgtggcctggagagagcaattagctgaggtgaatgaggacaatctcgagcaggcccagtcctggatcagagacatcaagatcgggagttcaaccaacacccttagtgccctgaaaaccgcatttgccgataaggagacacaggcaatctatctactcaccgacggcagacccgaccaacaacctttcaaggagggagttagcgtcctgtcgcatagatag

SEQ ID NO: 286647 - DNA, 1927 bp, Artificial Sequence
  derived and/or modified sequence
ggaatcgctgccttatccaccagcgggatgcttacctcgcccgccctctcgggtcaggcgggcccgggaggatgggagggtggctgctgagcgggagccgccacgtcttccacccgacatattgcctagagtttgctgtgacttagatcttgattcagagatggagaaatcaggcccatcttctaccatctctgagcagcagctgcagaggcaagagggatggattaacaccaaaacagacttggctgagcagagtctcatttcatctgagaaatggcttcaactgcatgggcttaagagcaacaaattgaccttgaaacagattttgtcacagatcggattcccacattgtgaagattatgtggcgtctctggggagacctgtggcttctcggtatgctgatggtctgtttccacagctctacagagcagaagatggcagagtatacaatggtttctcaagagcctgtgaagtggcaggaaaatgctactcctgtgaccgaacagtccatagctactgccatcagttgggttgagaaactgacggttgagctgactgtgagcgaggctggccgcctggatgctctgctggaagccgggagagacaagactattgaatccatttactactttgtggtgggggatgttcctgaagaatccaaggagcttctcctccagagggccttggagatcccgtgtccagtctacacagtgtccttcaacgccagaggagaaggcactatagcttttctaaaggatctgagtgccaagacccacagcagattccacgcatttgccgagagaacagagtgtgtagaatttcctgcattctccacaaaggatggtgacaatgtgatgacttggaattcaaggaaactgaaaggaaaactccctccaggagctggagtcagagaggacgtgtttctcgtttggcaagagatggaggaagcctgcagcacgctggcccagatccagaggctggtggccgagcctcccaagcccgacgtggccactgtggactgcgagtcagaaacaacctctgttgagattgcatcgaatccagaagacacctgggactctaagacatggctgcagaaatatggcttgaaggcccagaagctatccttgtatgatgtgcttgccgactgctctttccgccacgctgatggggttgtggatataaaagccaaaccggagaatgagtccgtgcagaccagtgcggagacgaacaagaagacagtccatgcaaaatattgcagcaggtttgtccatgctccctggaaggatgggagcttggtccacgtcaacattaccaaagagaagtgcaagtggtacagtgagagaatccacacagccctggcccggatccgaaggaggattaaatggctacaggatgggagtcaaagcctctttggaagattgcataatgattgcatctacattctcattgacacgtctcactcaatgaagagcaaactggacttggtgaaggacaagatcattcagttcatacaggaacagctgaaatataaaagtaagtttaactttgtgaagtttgatggtcaagcagttgcttggcgggaacaacttgctgaagtcaatgaagataatttggaacaggctcagtcctggattagagacataaagattggaagctccacaaacaccctgagtgccctgaaaactgcttttgctgataaagaaacacaggcaatctaccttctgaccgatgggagacctgatcagcagccgtttaaggagggagtatcagttctgagccacagatgaggaaactcacattagacaggacatgccctaggccattcagatgggcagtgctggatgagcttcaagcccaagtctctcgctctggagctgtttccttcattccatacagctgaagacagcatgagtgggagagactgtca

SEQ ID NO: 286648 - protein, 128 aa, Artificial Sequence
  derived and/or modified sequence
MGNLEITSIEHNRDLSFLRSVREVTGYVLVALNQFRYLPLENLRIIRGTKLYEDRYALAIFLNYRKDGNFGLQELGLKNLTEILNGGVYVDQNKFLCYADTIHWQDIVRNPWPSNLTLVSTNGSSGCG

SEQ ID NO: 286649 - DNA, 1137 bp, Artificial Sequence
  derived and/or modified sequence
atggaggtgaagcccccccccggcagaccccagcccgacagcggcagaagaagaagaagaagaggcgaggagggccacgaccccaaggagcccgagcagctgagaaagctgttcatcggcggcctgagcttcgagaccaccgacgacagcctgagagagcacttcgagaagtggggcaccctgaccgactgcgtggtgatgagagacccccagaccaagagaagcagaggcttcggcttcgtgacctacagctgcgtggaggaggtggacgccgccatgtgcgccagaccccacaaggtggacggcagagtggtggagcccaagagagccgtgagcagagaggacagcgtgaagcccggcgcccacctgaccgtgaagaagatcttcgtgggcggcatcaaggaggacaccgaggagtacaacctgagagactacttcgagaagtacggcaagatcgagaccatcgaggtgatggaggacagacagagcggcaagaagagaggcttcgccttcgtgaccttcgacgaccacgacaccgtggacaagatcgtggtgcagaagtaccacaccatcaacggccacaactgcgaggtgaagaaggccctgagcaagcaggagatgcagagcgccggcagccagagaggcagaggcggcggcagcggcaacttcatgggcagaggcggcaacttcggcggcggcggcggcaacttcggcagaggcggcaacttcggcggcagaggcggctacggcggcggcggcggcggcagcagaggcagctacggcggcggcgacggcggctacaacggcttcggcggcgacggcggcaactacggcggcggccccggctacagcagcagaggcggctacggcggcggcggccccggctacggcaaccagggcggcggctacggcggcggcggcggctacgacggctacaacgagggcggcaacttcggcggcggcaactacggcggcggcggcaactacaacgacttcggcaactacagcggccagcagcagagcaactacggccccatgaagggcggcagcttcggcggcagaagcagcggcagcccctacggcggcggctacggcagcggcggcggcagcggcggctacggcagcagaagattctag

SEQ ID NO: 286650 - DNA, 1137 bp, Artificial Sequence
  derived and/or modified sequence
atggaggtcaagccaccacccgggagacctcaaccagactccgggcgacgcaggcgccgacgtggagaagagggtcatgatccaaaagaaccagagcagttgcgtaaactgttcatcgggggactgagtttcgagaccaccgatgactccctacgggaacattttgaaaagtgggggactctaactgattgtgtggttatgcgagacccgcagacgaagaggtcgagaggctttgggttcgtcacctacagctgtgtggaggaagttgacgccgccatgtgcgcacgaccccacaaggttgacggcagggtggtcgagccaaaacgagcggtgtctagagaggactccgttaaaccgggggcccaccttactgtaaaaaagatctttgttggaggcataaaggaagataccgaagagtataatctcagggattactttgaaaagtacggtaaaatcgaaacgattgaagtgatggaggatagacagagtggaaaaaagagagggttcgctttcgttacgttcgacgatcacgataccgtcgataaaattgtggttcagaagtaccacaccataaacggtcacaactgtgaggtaaagaaagccctgtccaagcaagaaatgcagtccgctggcagccaaagaggccgtgggggcggttccggtaatttcatgggaaggggcgggaatttcggaggcgggggcggaaactttggtagaggcgggaatttcggggggaggggcggctacggaggtggtgggggcgggagtagaggtagctacggagggggggacggcgggtacaatggctttggcggagacggaggcaactatggaggggggccgggctattctagcaggggcggttacggcggaggcggcccaggctacggtaatcaaggcgggggctacggcggcggggggggttacgatgggtacaacgagggcggcaattttggcggaggcaattacggaggcggcgggaactacaatgacttcggcaactactcaggccaacagcaatccaattacgggcctatgaaaggaggatcttttggcggtagaagttctgggagcccctacggggggggatatggaagtggtggaggttccggcgggtatggcagccggcgcttctag

SEQ ID NO: 286651 - DNA, 1137 bp, Artificial Sequence
  derived and/or modified sequence
atggaggtcaaacccccccctggacgcccccagcccgactcaggacggcggcgccgacgacgcggtgaagaaggacacgacccaaaagagccagagcagctgcggaagctgttcatcggtggtctgagttttgagactacagacgacagcctgcgggaacattttgagaagtggggcactcttactgactgcgtggtgatgcgggatcctcagaccaagaggtccagaggcttcggtttcgtgacatattcatgcgtggaggaggtggacgctgccatgtgtgctcgcccgcacaaggtagacggccgcgtggtcgaacctaaaagagctgtgtccagagaagattccgtaaagccaggtgcacatctcacagtcaaaaaaatattcgtcgggggtattaaagaagacactgaagagtacaatctccgggattacttcgagaaatacggcaaaattgaaaccatcgaggtgatggaggacaggcagtcaggcaaaaaacgcggctttgccttcgttacttttgatgatcatgacaccgtcgataagatcgtagtgcagaagtaccacacaatcaatgggcataattgtgaggtgaagaaggctctgagcaagcaggagatgcagtccgcaggctcccagcgcggtcgagggggaggttccggcaattttatgggaagaggtggaaactttggggggggcgggggaaatttcgggcgggggggcaatttcggaggccggggcggctatggcggcggaggcggtggatctcggggctcttacgggggtggcgacggggggtataatggattcggcggagatggtgggaattatggaggcggccccggttactcttctcgtggaggttacggaggcggagggcccggctatggcaaccagggaggcggttatggcgggggcggcggttatgatggttacaatgaaggcgggaattttggcggaggcaattacggtggtgggggcaactacaacgacttcggtaactactcaggacagcagcagagcaactacggcccaatgaagggtgggagctttggagggcgctcaagtggctcaccttatggggggggctatggctctggcggcgggagcggcggatatggctctagaagattctag

SEQ ID NO: 286652 - DNA, 1137 bp, Artificial Sequence
  derived and/or modified sequence
atggaggtgaagcccccacctggccggccccagcctgacagcggcagaagaagaagaagaagaggagaggagggccatgaccccaaggagcctgagcagctgaggaagctgttcatcggcggcctgagctttgagaccacagatgacagcctgcgggagcactttgagaagtggggcaccctgacagactgtgtggtgatgagggacccccagaccaagaggagccggggcttcggctttgtgacctacagctgtgtggaggaggtggatgctgccatgtgtgcccggccccacaaggtggatggccgggtggtggagcccaagagagctgtgtcccgggaggacagcgtgaagccaggggcccacctgactgtgaagaagatctttgtgggcggcatcaaggaggacacagaggagtacaacctgcgggactactttgagaagtatggcaagattgagaccatcgaggtgatggaggaccggcagagcggcaagaagaggggctttgcctttgtgacctttgatgaccatgacacagtggacaagatcgtggtgcagaagtaccacaccatcaatggccacaactgtgaggtgaagaaggccctgagcaagcaggagatgcagagcgctggcagccagaggggccggggcggcggcagcggcaacttcatgggccggggcggcaactttggaggcggcggcggcaactttggccggggcggcaactttggaggccggggcggctatggaggcggcggcggcggcagccggggcagctatggaggaggagatggcggctacaacggctttggaggagatggcggcaactatggaggcggccctggctacagcagcagaggaggctatggaggcggcggccctggctacggcaaccagggcggcggctatggaggcggcggcggctatgatggctacaatgaaggaggcaactttggaggcggcaactatggaggcggcggcaactacaatgactttggaaactacagcggccagcagcagagcaactacggccccatgaagggcggcagctttggaggccgcagcagcggcagcccctacggcggcggctacggcagcggcggcggcagcggcggctacggcagccgccgcttctag

SEQ ID NO: 286653 - DNA, 2067 bp, Artificial Sequence
  derived and/or modified sequence
cccctgaaagctggcgaggcgcgcgcgctcccgcggcacgccgcgcctccgccctccgcccgccaacccgctggtccagtccctcttcgcgcccgcttggctccgcccccttcccaattcgctcctcccccaacagactggcggcgcgcggaaaacgcgtcacgtgacgactggccccgcctcttcctctcggtcccatattgaactcgagttggaagaggcgagtccggtctcaaaatggaggtaaaaccgccgcccggtcgcccccagcccgactccggccgtcgccgtcgccgccggggggaggagggccatgatccaaaggaaccagagcagttgagaaaactgtttattggtggtctgagctttgaaactacagatgatagtttacgagaacattttgagaaatggggcacactcacagattgtgtggtaatgagagacccccaaacaaaacgttccaggggctttggttttgtgacttattcttgtgttgaagaggtggatgcagcaatgtgtgctcgaccacacaaggttgatgggcgtgtagtggaaccaaagagagctgtttctagagaggattctgtaaagcctggtgcccatctaacagtgaagaaaatttttgttggtggtattaaagaagatacagaagaatataatttgagagactactttgaaaagtatggcaagattgaaaccatagaagttatggaagacaggcagagtggaaaaaagagaggatttgcttttgtaacttttgatgatcatgatacagttgataaaattgttgttcagaaataccacactattaatgggcataattgtgaagtgaaaaaggccctttctaaacaagagatgcagtctgctggatcacagagaggtcgtggaggtggatctggcaattttatgggtcgcggagggaactttggaggtggtggaggtaattttggccgtggtggaaactttggtggaagaggaggctatggtggtggaggtggtggcagcagaggtagttatggaggaggtgatggtggatataatggatttggaggtgatggtggcaactatggcggtggtcctggttatagtagtagagggggctatggtggtggtggaccaggatatggaaaccaaggtggtggatatggtggaggtggaggatatgatggttacaatgaaggaggaaattttggcggtggtaactatggtggtggtgggaactataatgattttggaaattatagtggacaacagcaatcaaattatggacccatgaaagggggcagttttggtggaagaagctcgggcagtccctatggtggtggttatggatctggtggtggaagtggtggatatggtagcagaaggttctaaaaacagcagaaaagggctacagttcttagcaggagagagagcgaggagttgtcaggaaagctgcaggttactttgagacagtcgtcccaaatgcattagaggaactgtaaaaatctgccacagaaggaacgatgatccatagtcagaaaagttactgcagcttaaacaggaaacccttcttgttcaggactgtcatagccacagtttgcaaaaagtgcagctattgattaatgcaatgtagtgtcaattagatgtacattcctgaggtcttttatctgttgtagctttgtctttttctttttcttttcattacatcaggtatattgccctgtaaattgtggtagtggtaccaggaataaaaaattaaggaatttttaacttttcaatatttgtgtagttcagtttttctacattttagtacagaaactttaacaaaatgcagtttcgaaggtgtttccttgtgagttaacaagtaaagaagatcattgttaattactattttgtatgaattttgctaaagttaactgtaaagaaacacctgctgacttgcagtttaaggggaatctattctccccatttccaaaccatgatatgaatgggcgctgacatgtggagagaatagataatttgtgtgtttgcaatgtgtgttttagataaataggattgggtatttaaattagcatttgtgaattt

SEQ ID NO: 286654 - DNA, 1137 bp, Artificial Sequence
  derived and/or modified sequence
atggaggtgaagcccccccccggccggccccagcccgacagcggccggcgccgtcggcggagaggggaggaaggtcacgatccaaaggaacctgagcagttgagaaaactgttcataggtggcctctcgttcgaaacaacggacgactcgctgcgggagcactttgaaaaatgggggaccctcacagattgcgtggtgatgcgggatccccagacaaagcgcagcagaggcttcggattcgttacttatagctgtgtcgaggaagtggatgccgctatgtgcgcccgccctcacaaagtcgacggacgggtggtggagccaaagcgggcagtttcccgtgaagattccgtaaaacctggcgctcatcttactgtcaagaagatcttcgttggaggtatcaaggaggataccgaggagtacaacctgcgcgactacttcgagaagtacggaaaaatagaaaccatcgaggtcatggaggatcggcagagcggaaaaaagaggggcttcgctttcgtgactttcgacgatcatgacacagttgataagattgtcgtgcagaaatatcataccattaacggacataattgcgaggtcaagaaggccttgtcaaaacaggagatgcagtcagcaggctcccagagggggagaggaggaggatctgggaatttcatgggtagaggtggcaatttcggaggtggaggagggaattttgggaggggaggcaatttcgggggcagaggcggctatggtgggggaggggggggtagtagagggtcctacggagggggggacggggggtacaatggatttggcggagacggaggaaattacggcgggggccccgggtacagcagccgaggtggctatggcgggggaggacctggttatgggaatcaaggcggaggctatgggggaggcggtggatacgacgggtataacgaagggggtaattttgggggaggtaactatggtggtggaggcaattacaacgactttgggaactactcggggcagcaacagagcaattatggccccatgaaagggggcagcttcggaggcagaagcagtggatccccctacggcggggggtatgggtcaggcgggggatctggcggctacgggtcgagacggttctag

SEQ ID NO: 286655 - DNA, 1137 bp, Artificial Sequence
  derived and/or modified sequence
atggaggtgaagcccccccccggccggccccagcccgacagcggccgacgcaggagacggcgcggcgaggaaggtcacgatcctaaagaacccgaacagttgagaaagctgttcattggcggactgtcgtttgaaactacggatgattcactgagggagcactttgaaaaatggggaactctcaccgattgtgttgtgatgcgcgatccccagacaaaaagatcacgtggatttggcttcgtaacttactcttgcgtcgaggaggtcgatgccgcgatgtgtgcgaggccccacaaggtggacgggcgagtcgtcgaacctaagagggctgttagccgggaggatagcgtaaaaccaggtgcccacttgaccgtcaaaaagatctttgtagggggcatcaaagaggacacggaagagtataacctccgagattattttgaaaagtacggcaagatcgagacgatcgaggtgatggaggaccgacagtcgggcaagaagcgcggcttcgcctttgtgactttcgacgaccatgacaccgtcgataaaatcgtcgttcagaaatatcacacaattaatggtcataactgcgaggtgaaaaaagcacttagcaagcaagaaatgcagtcagcagggtcacagcgcggacgtggagggggctcaggcaatttcatgggcagaggtgggaactttggtggtggaggaggtaactttggacggggcgggaattttggagggcgggggggatatggcggtggagggggaggcagtcgagggtcatatggtgggggcgacgggggatacaacggattcgggggagacggaggcaactacgggggaggacctggctacagtagtcgtggtggttacggcggtgggggccccggctacgggaaccaaggcggaggatacggcggcggcggcgggtatgatggctataacgaaggaggcaactttggaggaggaaattacggagggggtggtaactataacgatttcggcaattattcaggtcagcagcagtccaactacgggccaatgaaaggtgggagcttcggcgggaggagttccgggagcccgtacggcgggggatacgggagtggtggtggtagcgggggctatgggtcgcgtaggttttag

SEQ ID NO: 286656 - DNA, 1137 bp, Artificial Sequence
  derived and/or modified sequence
atggaggtgaagccaccccctgggaggccacagcctgactcaggcaggcggaggagacggcgtggtgaggagggtcatgacccaaaagaacccgagcaactgagaaagctctttattggcggactaagcttcgaaaccaccgatgattctctgagagagcacttcgagaagtggggcacactcacagactgcgtggttatgcgagacccacagactaaaaggagccgtggatttgggttcgtgacctactcctgcgtcgaggaagtggatgctgctatgtgtgccagaccccacaaagtagatggcagagtggttgaaccgaagagggccgtgtctagagaggactcagtcaaacccggagctcatctgacagtgaaaaagattttcgtgggtggtatcaaggaagatactgaggaatacaatcttcgagactattttgagaagtatggcaagatagaaaccattgaggtgatggaagacagacagagcggcaaaaagagagggtttgccttcgtgacattcgacgatcacgataccgtggataagatcgttgtgcagaaatatcacactattaacggccacaattgtgaagtgaagaaagccttgtcaaagcaggagatgcagagtgctggttcccagaggggccgaggtgggggaagcggcaacttcatgggtcgcggtgggaattttggcggtggtggtgggaatttcggcagaggaggtaactttggcggtcggggaggctatgggggagggggaggcggatctaggggttcctatggcggaggagatggcggatataacgggtttgggggagacggtggcaactacggaggcggaccaggatatagtagccggggaggctacggcggtggcggacccggatatgggaaccagggcggagggtacggtggagggggtgggtatgacggctataatgaggggggtaattttggcggtggaaattacggcggaggtggcaactataatgacttcggaaactatagtgggcagcagcaaagcaactacgggcctatgaaaggcggaagtttcggaggacggagctcgggctccccttacggaggcggatacggctctgggggtggctcgggaggttatgggagccgcagattctag

SEQ ID NO: 286657 - DNA, 1137 bp, Artificial Sequence
  derived and/or modified sequence
atggaagttaagccccctccagggcgacctcaaccagactccggccgtcgcaggcggagacgtggtgaggaaggacatgatcctaaagagcccgaacaactgcgaaagctcttcatcggaggactctcttttgagactaccgatgacagcctcagggaacatttcgagaagtgggggaccctgacggattgtgtcgtgatgcgtgacccccaaacaaagagatcgagaggtttcggtttcgtgacctactcctgtgtggaggaagtggatgctgcaatgtgtgccagaccccataaggtagacggcagagttgtagaacccaagcgagctgtgtccagggaggattcagtcaagcccggtgcccacctcactgtaaagaaaatttttgtcggagggatcaaagaggacacagaagagtataacttgcgtgattactttgaaaagtacggcaaaatagaaacgattgaggtgatggaagacagacagtctggcaagaagcggggattcgcatttgtgacctttgatgaccacgacacggtagacaagatagtcgtgcagaaataccacacaataaatggccacaactgcgaagttaagaaagccttgtccaagcaggagatgcagagcgccggatcacagcggggaaggggagggggatctggaaactttatgggtagaggtggcaattttggaggaggagggggaaacttcgggagaggtggcaatttcgggggaagggggggttacggcggtgggggaggcggaagcagaggatcgtacggaggcggagacggaggttacaatggcttcggcggtgatggcggaaattatggcggaggccctggctattcctcaagggggggatacggcggaggcggaccaggctatggcaaccagggcggaggctatggcggtggcggtgggtatgatggctataacgaaggcggaaatttcggtggtggaaactacggtgggggaggaaattacaacgatttcgggaattattccggccagcagcaatctaattacggccctatgaagggcggatcctttgggggacgaagctccggatcgccttacgggggaggctacggcagcggcggaggatccggaggatatggaagccgcagattttag

SEQ ID NO: 286658 - DNA, 1731 bp, Artificial Sequence
  derived and/or modified sequence
agttggaagaggcgagtccggtctcaaaatggaggtaaaaccgccgcccggtcgcccccagcccgactccggccgtcgccgtcgccgccggggggaggagggccatgatccaaaggaaccagagcagttgagaaaactgtttattggtggtctgagctttgaaactacagatgatagtttacgagaacattttgagaaatggggcacactcacagattgtgtggtaatgagagacccccaaacaaaacgttccaggggctttggttttgtgacttattcttgtgttgaagaggtggatgcagcaatgtgtgctcgaccacacaaggttgatgggcgtgtagtggaaccaaagagagctgtttctagagaggattctgtaaagcctggtgcccatctaacagtgaagaaaatttttgttggtggtattaaagaagatacagaagaatataatttgagagactactttgaaaagtatggcaagattgaaaccatagaagttatggaagacaggcagagtggaaaaaagagaggatttgcttttgtaacttttgatgatcatgatacagttgataaaattgttgttcagaaataccacactattaatgggcataattgtgaagtgaaaaaggccctttctaaacaagagatgcagtctgctggatcacagagaggtcgtggaggtggatctggcaattttatgggtcgcggagggaactttggaggtggtggaggtaattttggccgtggtggaaactttggtggaagaggaggctatggtggtggaggtggtggcagcagaggtagttatggaggaggtgatggtggatataatggatttggaggtgatggtggcaactatggcggtggtcctggttatagtagtagagggggctatggtggtggtggaccaggatatggaaaccaaggtggtggatatggtggaggtggaggatatgatggttacaatgaaggaggaaattttggcggtggtaactatggtggtggtgggaactataatgattttggaaattatagtggacaacagcaatcaaattatggacccatgaaagggggcagttttggtggaagaagctcgggcagtccctatggtggtggttatggatctggtggtggaagtggtggatatggtagcagaaggttctaaaaacagcagaaaagggtaggtatctttaaatttttattatgatgataaaagaatatgtggaactgttcactgagtgtaataatttttttatcctgtattattcaacaggctacagttcttagcaggagagagagcgaggagttgtcaggaaagctgcaggttactttgagacagtcgtcccaaatgcattagaggaactgtaaaaatctgccacagaaggaacgatgatccatagtcagaaaagttactgcagcttaaacaggaaacccttcttgttcaggactgtcatagccacagtttgcaaaaagtgcagctattgattaatgcaatgtagtgtcaattagatgtacattcctgaggtcttttatctgttgtagctttgtctttttctttttcttttcattacatcaggtatattgccctgtaaattgtggtagtggtaccaggaataaaaaattaaggaatttttaacttttcaatatttgtgtagttcagtttttctacattttagtacagaaactttaacaaaatgcagtttcgaaggtgtttccttgtgagttaacaag

SEQ ID NO: 286659 - protein, 1255 aa, Artificial Sequence
  derived and/or modified sequence
MLQNCSDKNFDDEDSVDGNRPSSASSTSSKAPPSSRRNVGMGTTRRLGSSTLGSKSSAAKEGAGAVDEEDFIKAFDDVPVVQIYSSRDLEESINKIREILSDDKHDWEQRVNALKKIRSLLLAGAAEYDNFFQHLRLLDGAFKLSAKDLRSQVVREACITLGHLSSVLGNKFDHGAEAIMPTIFNLIPNSAKIMATSGVVAVRLIIRHTHIPRLIPVITSNCTSKSVAVRRRCFEFLDLLLQEWQTHSLERHISVLAETIKKGIHDADSEARIEARKCYWGFHSHFSREAEHLYHTLESSYQKALQSHLKNSDSIVSLPQSDRSSSSSQESLNRPLSAKRSPTGSTTSRASTVSTKSVSTTGSLQRSRSDIDVNAAASAKSKVSSSSGTTPFSSAAALPPGSYASLGRIRTRRQSSGSATNVASTPDNRGRSRAKVVSQSQRSRSANPAGAGSRSSSPGKLLGSGYGGLTGGSSRGPPVTPSSEKRSKIPRSQGCSRETSPNRIGLDRFGLGQPGRIPGSVNAMRVLSTSTDLEAAVADALKKPVRRRYEPYGMYSDDDANSDASSVCSERSYGSRNGGIPHYLRQTEDVAEVLNHCASSNWSERKEGLLGLQNLLKSQRTLSRVELKRLCEIFTRMFADPHSKIADSEAECEDKEGNLFPSEVSCTRVFSMFLETLVDFIIIHKDDLQDWLFVLLTQLLKKMGADLLGSVQAKVQKALDVTRDSFPFDQQFNILMRFIVDQTQTPNLKVKVAILKYIESLARQMDPTDFVNSSETRLAVSRIITWTTEPKSSDVRKAAQIVLISLFELNTPEFTMLLGALPKTFQDGATKLLHNHLKNSSNTSVGSPSNTIGRTPSRHTSSRTSPLTSPTNCSHGGLSPSMLDYDTENLNSEEIYSSLRGVTEAIEKFSFRSQEDLNEPIKRDGKKECDIVSRDGGAASPATEGRGGSEVEGGRTALDNKTSLLNTQPPRAFPGPRARDYNPYPYSDAINTYDKTALKEAVFDDDMEQLRDVPIDHSDLVADLLKELSNHNERVEERKGALLELLKITREDSLGVWEEHFKTILLLLLETLGDKDHSIRALALRVLREILRNQPARFKNYAELTIMKTLEAHKDSHKEVVRAAEEAASTLASSIHPEQCIKVLCPIIQTADYPINLAAIKMQTKVVERIAKESLLQLLVDIIPGLLQGYDNTESSVRKASVFCLVAIYSVIGEDLKPHLAQLTGSKMKLLNLYIKRAQTTNSNSSSSSDVSTHS

SEQ ID NO: 286660 - DNA, 3768 bp, Artificial Sequence
  derived and/or modified sequence
atgcttcagaattgttctgacaagaactttgatgatgaggattcagtggacggaaaccgtccatcttccgctagctctacctctagcaaggcccccccctcaagtcggcggaacgtcgggatgggcacgaccaggaggctgggctcttctaccttgggctccaaatcatcagcagctaaggagggagcaggcgcagtcgacgaggaggacttcatcaaggcttttgacgatgtgcccgtggtacagatctactcttcccgtgacctggaggaatctatcaacaagatccgcgagattctttccgacgataaacacgattgggaacagcgcgtaaacgcactgaagaagatcaggagtctgctactggcaggcgcagccgagtatgataactttttccagcacctgcggttactggatggagcattcaaactaagtgccaaggaccttagaagccaggtagttcgtgaggcgtgtatcactctcgggcatctctccagcgtgcttggaaacaagtttgatcatggggccgaggcaataatgcctacaatcttcaacctgatccctaatagtgctaagatcatggctacatcgggcgtggtggctgtccggctaatcatcagacacactcacataccgagacttattccagtcataacctcaaactgcacatcaaagtctgtggctgttagacgacgttgctttgagttccttgacttgctcctccaggaatggcagacccacagcctggagcgccatattagtgtgcttgccgaaaccatcaagaaaggtattcatgatgccgactccgaagctagaattgaagcgcgaaaatgttactggggatttcattcccatttttcacgtgaggctgagcatctgtaccacactctcgagtcttcttaccagaaagctctccaaagtcatctgaagaattccgacagcatcgtctctctgccgcagtccgacaggagtagcagttcatcacaagaatctctaaatagacctttatcggcaaagcgctcacctacaggcagcacgacaagccgggcatccactgtcagtacaaagagtgtcagcaccaccggcagccttcagcggagcaggagtgacatcgacgtgaacgccgccgcctcagctaagtcaaaggtgtcttctagcagtggaacgactccattctcaagcgctgccgccctgccacctggatcatatgccagtcttggcagaatccgaactaggcgccagagtagcgggagcgcgactaacgtagcaagcacacctgacaatcgcggccgcagtagagcgaaagtggtctctcagagtcagcgatcacggtctgccaatccagctggagctggctccaggagctcatctcccgggaaattacttgggtctgggtacggcggcctgaccggtgggtcttccaggggcccacccgtaactccctcttctgagaagaggtccaagatcccccgctcgcaaggttgttccagggaaacatcccctaatcgaataggcctcgacagattcggcttgggacagccaggccgcattccaggctccgtcaacgctatgagagtgcttagcacatcaaccgaccttgaggccgccgtggctgatgccctgaagaagccggtgagaaggcgctatgagccgtatggcatgtattcagacgacgacgccaacagcgacgcaagtagcgtgtgcagcgagcgtagttacgggtcgcgaaacgggggaatcccacattacttgcggcaaacagaggacgtggccgaggtgctaaaccactgcgcctcctctaactggagtgagagaaaggaaggccttctggggctgcagaacctgctgaagagccagcggaccctttctagggtggaactaaagcgcctgtgcgaaatttttacccgcatgtttgccgatccccattcaaaaatcgctgactctgaggcggaatgcgaggataaggaggggaacctgtttccaagcgaagtgagttgtacacgagtgttctccatgttcctcgagaccctcgtggacttcatcattatccacaaagatgaccttcaggactggctgtttgtactgttaacacagttattaaaaaagatgggcgctgacctcctcggcagcgtgcaggccaaagtgcaaaaagcccttgacgtgaccagggacagttttcctttcgaccagcaattcaacatcctcatgagattcattgtggaccaaacacagactcccaatctgaaagtcaaggtggctattctgaaatatatagaatctctggcaagacagatggaccctacggactttgtgaactcgtcagagacaagactcgccgtgtcgaggattattacatggacgaccgagcctaagagcagcgacgtgaggaaagccgcccagattgtactgatcagtctgttcgaattaaatacacccgagtttaccatgttattgggggcgctgccaaagacttttcaagatggcgcaactaagctgctgcacaatcaccttaagaactccagcaacacttctgttgggtcaccttccaatactataggccgtaccccgtccaggcacacgtcttccaggacgagtcccctgacatcccccaccaattgttcgcacggcgggctgagtccttctatgctcgactacgacaccgaaaacctaaactccgaggagatatactcctcgctacgcggcgtcacagaggcaattgagaaattcagctttagatctcaggaggacctcaacgaacctatcaagcgggatggcaagaaggagtgtgacatcgtgtcgcgagatggaggagcagcttcccccgcgacggaaggaaggggaggaagcgaggtggaaggaggccggacagccctggataacaagacaagcctgctcaacactcaaccccctcgggcgttcccaggccctagagctagagattacaatccttatccctacagcgacgctattaatacttatgataaaacagcactaaaggaggctgttttcgatgacgatatggaacagctgcgggatgtgcctattgaccactctgacttagtggccgatctcttaaaggagctgagcaatcacaacgaaagggtcgaagagagaaaaggcgccctcctcgagctgctgaagattactagggaagattcattgggcgtctgggaagagcactttaagaccatcctgctcctgttacttgaaacactaggagataaagatcattccatcagagccctggctttacgcgtgcttcgagagattctacggaaccaaccagcgagattcaagaactacgcggagttgaccattatgaaaaccctcgaggcccacaaggactcccacaaggaggtggtccgagcggctgaggaggcagcaagcaccctggcctcgagcattcaccccgagcagtgtattaaagtgctttgtcctatcatacaaaccgcggactacccaatcaatctggcggccattaaaatgcaaactaaggtggtggagcggatcgctaaggaaagccttttacagctgctcgtcgacataatccccgggctgctgcagggatatgataatactgagagtagcgtgaggaaggccagtgtgttctgtttggtggctatatattccgttattggcgaagacctgaagcctcatctggcccagcttacagggtccaaaatgaaactgctaaatctctacatcaagcgagcccagaccaccaactcgaacagcagtagcagcagtgacgtttccactcactcatag

SEQ ID NO: 286661 - DNA, 3768 bp, Artificial Sequence
  derived and/or modified sequence
atgctgcagaactgcagcgacaagaactttgatgatgaagattctgtggatggcaaccggcccagcagcgccagcagcaccagcagcaaggccccacccagcagcagaagaaatgtgggcatgggcaccacccggcggctgggcagcagcaccctgggcagcaagagcagcgctgccaaggagggcgctggagctgtggatgaggaggacttcatcaaggcctttgatgatgtgcctgtggtgcagatctacagcagccgggacctggaggagagcatcaacaagatccgggagatcctgagtgatgacaagcatgactgggagcagagggtgaatgccctgaagaagatccgcagcctgctgctggccggggctgctgaatatgacaacttcttccagcacctgcggctgctggatggagccttcaagctgagcgccaaggacctgcggagccaggtggtgcgggaggcctgcatcaccctgggccacctgagctctgtgctgggcaacaagtttgaccacggggctgaggccatcatgcccaccatcttcaacctgatccccaacagcgccaagatcatggccaccagcggcgtggtggccgtgcggctcatcatccgccacacccacatccccaggctcatccctgtgatcaccagcaactgcaccagcaagtctgtggccgtgagaagacgctgctttgagttcctggacctgctgctgcaggagtggcagacccacagcctggagcggcacatctctgtgctggccgagaccatcaagaagggcatccatgatgctgacagcgaggccagaattgaggccaggaagtgctactggggcttccacagccacttcagccgggaggccgagcacctgtaccacaccctggagagcagctaccagaaggccctgcagagccacctgaagaacagcgacagcatcgtgtccctgccccagagcgacaggagcagcagcagcagccaggagagcctgaaccggcccctgagcgccaagaggagccccaccggcagcaccaccagccgggccagcacagtgtccaccaagtctgtgtccaccaccggcagcctgcagaggagcagaagtgacattgatgtgaatgctgctgccagcgccaagagcaaggtgagcagcagcagcggcaccacccccttcagcagcgctgctgccctgcccccaggcagctatgccagcctgggccgcatccgcacccggcggcagagcagcggcagcgccaccaacgtggccagcaccccagacaacagaggccgcagccgggccaaggtggtgtcccagagccagaggagccgcagcgccaacccagctggagctggcagccgcagcagcagccctgggaagctgctgggcagcggctacggcggcctgaccggcggcagcagccggggcccccctgtgacccccagcagcgagaagaggagcaagatccccaggagccagggctgcagccgggagaccagccccaaccgcatcggcctggacagatttggcctgggccagcccggccgcatccctggctctgtgaatgccatgagggtgctgagcaccagcacagacctggaggccgctgtggctgatgccctgaagaagcctgtgagaagaagatatgagccctacggcatgtacagtgatgatgatgccaacagtgatgccagctctgtgtgcagcgagaggagctatggcagcagaaatggaggcatcccccactacctgcggcagacagaagatgtggccgaggtgctgaaccactgtgccagcagcaactggagcgagaggaaggagggcctgctgggcctgcagaacctgctgaagagccagaggaccctgagccgggtggagctgaagaggctgtgtgagatcttcaccaggatgtttgctgacccccacagcaagattgctgacagcgaggctgaatgtgaggacaaggagggcaacctcttccccagcgaggtgtcctgcaccagggtcttctccatgttcctggagaccctggtggacttcatcatcatccacaaggatgacctgcaggactggctgtttgtgctgctgacccagctgctgaagaagatgggcgctgacctgctgggctctgtgcaggccaaggtgcagaaggccctggatgtgacccgggacagcttcccctttgaccagcagttcaacatcctgatgaggttcatcgtggaccagacccagacccccaacctgaaggtgaaggtggccatcctgaagtacatcgagagcctggcccggcagatggaccccacagactttgtgaacagcagcgagacccggctggccgtgagccgcatcatcacctggaccacagagcccaagagcagtgatgtgaggaaggccgcccagatcgtgctgatcagcctgtttgagctgaacaccccagagttcaccatgctgctgggcgccctgcccaagaccttccaggatggagccaccaagctgctgcacaaccacctgaagaacagcagcaacacctctgtgggcagccccagcaacaccatcggccgcacccccagccgccacaccagcagcaggaccagccccctgaccagccccaccaactgcagccatggaggcctgagccccagcatgctggactatgacacagagaacctgaacagcgaggagatctacagcagcctgcggggcgtgacagaggccatcgagaagttctccttccgcagccaggaggacctgaatgagcccatcaagagagatggcaagaaggaatgtgacatcgtgtccagagatggaggagctgccagccctgccacagagggccggggcggcagcgaggtggagggcggccgcacagccctggacaacaagaccagcctgctgaacacccagcccccccgggccttccctggcccccgggcccgggactacaacccctacccctacagtgatgccatcaacacctatgacaagacagccctgaaggaggccgtgtttgatgatgacatggagcagctgagagatgtgcccatcgaccacagcgacctggtggccgacctgctgaaggagctgagcaaccacaatgaaagagtggaggagaggaaaggagccctgctggagctgctgaagatcacccgggaggacagcctgggcgtgtgggaggagcacttcaagaccatcctgctgctgctgctggagaccctgggggacaaggaccacagcatccgggccctggccctgcgggtgctgcgggagatcctgaggaaccagcctgcccgcttcaagaactatgcagagctgaccatcatgaagaccctggaggcccacaaggacagccacaaggaggtggtgcgggctgctgaggaggccgccagcaccctggccagcagcatccaccctgagcagtgcatcaaggtgctgtgccccatcatccagacagctgactaccccatcaacctggccgccatcaagatgcagaccaaggtggtggagcgcatcgccaaggagagcctgctgcagctgctggtggacatcatccctggcctgctgcagggctatgacaacacagagagctctgtgaggaaggcctctgtgttctgcctggtggccatctacagcgtcatcggggaggacctgaagccccacctggcccagctgaccggcagcaagatgaagctgctgaacctgtacatcaagagggcccagaccaccaacagcaacagcagcagcagcagtgatgtgtccacccacagctag

SEQ ID NO: 286662 - DNA, 3768 bp, Artificial Sequence
  derived and/or modified sequence
atgctgcagaactgcagcgacaagaacttcgacgacgaggacagcgtggatggtaataggccgtcgtcagcgagttcaactagtagcaaagcgccgccttccagccgaaggaatgtgggcatgggcacaacacggagactcggctcctccaccctggggagtaaatctagtgccgccaaagagggggcgggtgcggtagacgaagaggactttatcaaggccttcgacgatgttcccgtggttcagatttactcctcgcgggacctggaagagtcgattaacaagattagggagatcttatccgacgataaacatgactgggagcagagggtaaatgctctcaaaaagattcgcagcctactgcttgctggcgcagcagaatatgataacttcttccaacacttgcgcttgttggacggggcctttaaactgagcgcaaaggatctacgcagccaagtcgtacgggaagcttgtattaccctggggcatctcagctccgtgttggggaacaaattcgaccacggcgccgaagcaattatgcccacaatctttaacctgattccaaactctgcaaagatcatggcgaccagcggggttgtggccgttaggctaatcatacgtcacacgcacattccacggctaatcccagttatcacgagcaactgcacatccaagtcggtggccgttcggcggaggtgctttgaatttctcgacttgctcctccaagaatggcagacccacagtctggagcgccacataagcgtgctcgcagagaccattaaaaaaggaatccatgatgccgactcagaggcccgaatcgaggcaaggaaatgctactggggcttccactcccatttttctcgggaagcagagcatctttatcacactctggaaagttcctaccagaaagctctccagagccacttaaagaatagcgactctattgtgtcacttcctcaaagcgacagatcgtcatcatcctcccaagagtctttgaacaggcccttgagcgctaagcggtctcctaccggcagtaccacctctcgggcttcgactgtttctaccaaaagcgtgtccaccactgggtccctgcagcgctccaggtcagacatcgacgtcaatgccgctgctagcgccaaatccaaagtgtcatcatccagcggaactacccctttctcatccgctgccgcactgccgccggggtcctatgcttccctcggtcggatccgaacaaggcggcagtcgagcggctccgccaccaacgtcgcttccacgccggacaatcgtggacgatctcgggcgaaagtggtatctcaatcccagaggtctcggtccgctaaccccgccggagccggaagcagatcctctagtccgggtaaacttctcgggtccggttacgggggcctcactggtggtagcagccgcggccctccagtaacaccaagcagtgaaaagcgctctaaaattcccaggtcccaaggctgcagtcgtgaaacatcacccaaccgaatcgggctggaccgctttggacttggtcagccaggacgtattcccggctccgtgaacgccatgagggtacttagtaccagcacggacttggaggccgcagtggcggacgcgctgaagaaaccggtgaggcgcagatacgagccatacggaatgtactctgacgatgacgctaactcagatgccagcagcgtgtgcagcgaaaggtcttatgggtccaggaatggggggattccccattacctgcggcagacagaagatgtcgcagaagtgctgaaccactgcgcatcatcaaattggtcagagcggaaagagggcctgctgggtcttcagaatttgctgaaaagtcagcgcacactaagccgggtggagctaaaacgcctctgcgaaattttcacaagaatgtttgctgacccccactctaagatcgctgattccgaggctgagtgtgaagacaaggaggggaacttattcccatccgaggtttcttgcacgcgagtgttctcgatgtttcttgaaacattggtggactttataatcatccataaggatgacctccaggattggcttttcgtgctgttgacccaacttcttaagaagatgggtgctgatttactgggatctgtccaggcaaaagtccagaaggccctcgatgtcacaagggattccttcccatttgatcagcagtttaacattctgatgagatttatcgtcgatcagactcagacaccaaatttaaaagtgaaggtggccatcctgaaatatatcgaaagcttggctcgtcagatggaccctaccgatttcgtgaattccagtgagacgcggttggccgtgagccgaatcatcacttggaccaccgaacccaagtctagtgacgttcgcaaggcagcccagattgtcctgatttccctgtttgagctgaacacccctgagttcacaatgctgctgggagcacttcctaagacctttcaagacggcgccacaaaactcctgcacaatcacctgaaaaatagctcaaatacctccgtgggttcaccctcaaacactataggccggactccgtcaagacacacttcatccaggaccagccctttgacctccccgactaattgctcacatggaggtctgtccccatccatgctcgactatgatactgaaaacctgaacagtgaggagatctattccagtcttcgcggggtgacagaagcaattgagaaattttccttcaggtcccaagaggatcttaatgaacccattaagagagatggcaagaaggagtgtgacattgtgagtcgagatggaggggcagcctcccctgcgacagaggggcgcggtggaagcgaggttgaaggaggccggactgctctcgacaacaagacatcactccttaatacgcaaccacctcgggcttttcctgggcctagagcccgagactataatccgtacccgtactccgacgctatcaacacttatgataaaaccgccctgaaagaggcagtcttcgacgatgacatggagcagctgagggacgtgcccattgatcacagtgacttagtggccgatcttcttaaagaactgagcaaccacaacgagagagtggaggaacggaagggtgccctgctggagctgctaaaaattactcgagaggacagcctgggcgtgtgggaggagcactttaagaccatcctgctgttgcttcttgagacgcttggtgataaggatcattccatccgggcacttgcactgagagtgttgcgtgagatactgaggaatcagcctgctcgtttcaaaaactacgcggagttgacaattatgaagaccctggaggctcacaaagattctcacaaagaggttgtgagggccgctgaggaagcagccagtaccctcgccagttctatccatcccgagcagtgtatcaaagtcctttgtcctatcatccagaccgcagactatccgataaacctggccgcaataaaaatgcagaccaaggtggtcgaacgcatcgccaaggaaagcctcctccaacttttagttgatattattccagggctgctccaagggtatgacaatacagaatcttcagtcagaaaagccagcgtgttttgtctagttgcaatttatagcgtgatcggtgaggacctgaagccacacctagctcaactgaccggatcaaaaatgaagctgctaaatttatatatcaaaagagcccagactacaaattcaaatagctcctcttctagcgacgtctcaacccattcctag

SEQ ID NO: 286663 - DNA, 3768 bp, Artificial Sequence
  derived and/or modified sequence
atgctgcaaaactgtagcgataaaaactttgacgatgaggattccgtggatgggaaccgaccgtcttcagcaagctccacatctagcaaagccccaccttcctcccgaaggaatgttgggatgggaactaccaggagattgggcagtagcacactgggttcaaaatcgagtgctgctaaggaaggagccggtgcagtggacgaggaggactttatcaaagcgtttgatgacgttccagtcgtacagatctattcaagccgcgatttagaggaaagcatcaataagattcgcgaaattctcagcgacgataagcacgactgggaacagcgtgtaaacgcccttaagaaaatacggtctctcctgctggctggtgccgctgagtacgacaatttcttccagcacttgcgtctcttagatggggctttcaaactttctgctaaggatctcaggagtcaagtggtacgggaggcgtgtatcacccttggccacctgtcctctgtgttaggaaataagtttgatcacggagcagaggccatcatgcccacaatatttaatctgatccccaattctgccaagatcatggctacctccggtgtcgtcgctgtgagactaattatccggcacacacacatccccaggctcattccagtcattacctcaaactgtacatcaaagtctgttgctgtcagacggagatgcttcgaatttctagacctgctcctgcaggagtggcaaacacattcccttgagaggcacataagcgtgcttgcggagactataaagaagggcatacacgatgccgattctgaggcccgtatcgaagccaggaaatgttactggggctttcacagtcattttagtcgagaggctgagcacctgtaccacaccttagagtctagttaccagaaagcactccagtctcatctcaagaatagcgacagcatcgtgtcgcttccccagagcgacagatcttcctcttcaagccaggaatctctcaaccgaccactgtcggctaaacggtcccctacggggtcaactaccagtagagcctctaccgtgtcgacaaaatctgtctcaacaaccgggagcctccagaggtcccgctccgacattgatgtgaatgccgctgcatcggccaaaagcaaagtgagctctagttctggcaccaccccctttagctcggcagcagcactgccaccagggtcgtatgcttcactgggcaggatccggactcggaggcagagcagtggtagcgcgacaaatgtcgcatccacccctgacaacaggggtcgctcacgggctaaagtagtgtcccagagtcagcgatcccgatcagctaatcccgcaggagctggttccagatccagctctcctggcaagctgctgggctccggctacggcggactgaccggcggttcatctagaggacccccagtgaccccttctagcgaaaaacgatcaaagatcccacgcagtcagggttgctcacgagagacttctcccaaccggattggcctggacaggtttggattaggacagcccggaagaattccaggtagtgtcaatgctatgcgcgttctgagcacatcaactgatctagaggccgctgtggcagacgcactcaaaaagccagtgcgaaggcgttatgaaccctacggaatgtattctgatgatgacgcgaactccgatgccagctccgtatgttctgaaaggagctacggttcacgtaatggcggaattccccactacctgcgtcagaccgaggatgtggctgaggtgttaaatcactgcgcctccagcaactggagcgaaaggaaagaagggctgctggggctacaaaatctgttgaagtcgcagaggaccttgtctagagttgaactgaaacggctctgtgagattttcacacggatgtttgctgatccacatagtaagattgctgacagcgaagcggagtgcgaagacaaagaagggaatctgttccctagcgaggtttcatgcacccgtgtgttcagcatgtttctcgaaaccctggtcgactttattatcatccacaaggacgatttgcaggactggctatttgtgcttctcacacagctgctgaagaaaatgggagctgacctgctgggatctgtgcaggccaaggtacagaaagcccttgatgtcaccagggattcttttccttttgaccaacagtttaacattctgatgaggtttatcgtggaccagactcagactccaaacttaaaggttaaggtagcaattttgaagtacatcgaatctcttgccaggcagatggaccccaccgatttcgtgaattcctcagagacccggttggctgtctcacggattattacatggactacagaacccaaatcttccgatgttcggaaggctgctcagatcgtgctgataagcctattcgaactaaacacccctgagttcacaatgttgctgggtgcactgcctaagacattccaggacggggcaactaagttattacacaaccacctaaaaaactcgtccaacacctcagtgggttcacccagcaatacaatcgggagaaccccatctagacacacctcctcgaggacgtccccgcttaccagtcccacaaactgctcccacggcggactgagcccgtccatgctggactatgacacagaaaacttgaactccgaagagatctattcaagcctcagaggcgtcacggaggccattgagaagttcagcttcaggtcacaagaagacctgaatgagcctatcaaaagggacggaaaaaaggagtgcgatatagtctcccgagatggtggcgcagctagtccagccactgaaggacgaggaggctctgaagtagagggaggtagaaccgctctagataacaagacaagtctcttaaatactcaacctccgagagcctttcccggacctcgggctcgcgattataacccgtacccatactctgacgcgatcaacacttatgataagacagctctcaaggaggccgtgttcgacgacgacatggagcagcttcgggacgtgcctatcgatcattccgacctcgtggccgacttgctgaaagagcttagtaatcacaacgaaagagtggaagaacgaaaaggagccctcctggagcttctgaaaataacacgcgaagacagtctgggcgtgtgggaggagcattttaagacaattctgctgttactgctcgagacactgggagacaaggatcattcgattagagctctggcactgagagtgctgcgggaaatcttacggaatcagccagcaagatttaagaattatgcggaactaactataatgaaaaccctcgaggctcacaaggactctcacaaagaagtggtgcgtgcggcagaggaagccgctagcactctcgccagctccatccaccccgagcagtgcatcaaagtgttgtgtcctattatacaaacagctgactatcctattaatctggcggcaattaaaatgcagaccaaggtggtcgagcgcattgcaaaggaaagcttgctgcaacttctcgtagatattattcctgggctgttacagggctatgacaacaccgagtcatcagtgcgcaaggctagtgtcttttgcttggtagcgatctattcagttatcggggaggatctaaaaccacatttagcccagctgactggcagcaaaatgaaactgctcaacttatatattaagcgtgcacagacaactaactccaacagcagctcctcctctgatgtgagcacccactcctag

SEQ ID NO: 286664 - DNA, 6851 bp, Artificial Sequence
  derived and/or modified sequence
atgttgcagaattgttcagataaaaatttcgacgatgaagattctgtggatggtaacagaccttcctctgctagttctacatcatccaaggctccaccaagttctcggagaaacgttggaatgggaaccacccgccggcttggttcatccacccttggatccaagtcttcagctgcaaaagaaggagctggtgctgttgatgaagaggattttattaaagcatttgatgatgtacctgtagtacagatttattccagccgagaccttgaggaatccataaacaaaattagggaaatattatctgatgacaagcatgattgggagcagagagtaaatgctctaaaaaagattagatctttacttttggctggtgctgctgagtatgataacttctttcaacatttgcgtcttttggatggagcctttaaactctctgctaaggacctgcggtctcaggtagtgcgggaggcttgtatcacgttggggcatctgtcatcagttctggggaataagtttgaccatggagctgaagccattatgccaactatctttaatttaattccaaacagtgccaaaattatggccacatctggtgttgtagctgttaggttaattattcggcacacacacatccctaggttaatacctgtcataacaagcaactgtacctctaagtctgtcgcagttagaaggcgctgttttgaatttttagatttgcttttacaagaatggcagacacattcactagaacgacacatatcagtattagctgaaacaataaagaagggaatacatgatgctgattccgaagcaagaatagaagccagaaaatgttactggggtttccacagtcacttcagcagagaagcagagcacttgtaccacaccttggagtcctcctaccagaaagccctgcagtcccacctgaagaactcagacagcatagtgtctctgcctcagtcagaccgctcatcttccagctctcaagagagtctaaatcgtccgctgtctgccaaaagaagtcctactggaagtaccacatctagagcttctacagttagtaccaaatctgtgtcaacgactgggtccctccagcgatctcgaagtgatattgatgtgaacgcagcagccagtgccaaatccaaagtctcctcatcttcgggcacgacgcctttcagctctgcagcagctttgcctccagggtcatacgcatccttaggtcggatccgcacaagacggcaaagctctgggagtgccaccaacgtcgcctctacacctgataaccggggccgcagtcgcgctaaagtggtttcacagtcccagcgatccagatctgctaatcctgctggtgctggcagccggtcaagttccccaggaaaattgttgggaagtggttatggtggacttactgggggctcctcacgaggcccacctgtgacaccgtcttcagaaaagcgaagcaagattcccaggagccagggatgtagccgggaaacaagtccaaaccgaataggattagatcggtttgggcttggccagccaggaagaatacctggttctgtgaatgccatgagagttctgagcacaagtacagatcttgaagctgctgttgctgatgctttgaagaagcctgtgaggaggagatatgagccgtatgggatgtattctgacgatgatgccaacagtgatgcctcaagtgtttgctctgagcgctcatatggctccaggaatggtggcattccccattatctgcggcagactgaggatgtagcagaagttctcaaccactgtgctagttcaaactggtcagaaaggaaagaagggcttctgggcctgcagaacttactgaagagccaaagaacactgagtcgagttgaactgaaaaggttgtgtgagatcttcactcggatgtttgctgaccctcatagcaagattgctgattcagaagcagaatgtgaggataaagaaggaaatttgtttccatcagaagtctcttgtacaagagttttcagtatgtttttggagactcttgtggattttataataattcataaggatgatttacaagactggctttttgttcttctcacacaattacttaagaaaatgggagcagatttacttggatctgtgcaagcaaaagttcaaaaggctctagatgtcacaagggactcctttccatttgatcaacaatttaacattttgatgagatttattgtggatcaaactcaaactccaaacctcaaggtcaaagttgcaatcctgaaatacattgagtctctggccagacagatggatccaacagattttgtaaactctagtgagacaaggcttgctgtttctagaatcataacctggacaacagaaccaaagagttcagacgtgagaaaggcagcacagattgtgctaatctctctgtttgaattgaatactcctgaatttaccatgttacttggtgccttgccaaaaacattccaggatggtgccaccaaactcctgcacaaccacctcaagaattccagtaacaccagtgtgggctctccaagcaatacgattggccggacgccctcccgacacaccagcagcaggaccagccccctgacctcacccaccaactgttcccatgggggtctgtctccaagcatgctggactatgatacagagaacctgaactctgaagaaatctatagttctctacgtggagttacagaagccattgaaaagtttagttttcgaagccaagaagatctgaatgagccaattaaacgagatggcaaaaaggagtgtgatattgtgtcccgcgatgggggcgctgcctcccctgccactgagggccgggggggtagtgaagtagaaggaggccggacagctctggataacaagacctcactactcaacacccagcctccgcgcgccttcccggggccgcgggcgcgagactacaacccgtacccctactcagatgccatcaacacctacgacaagaccgccctgaaagaggctgtgttcgatgacgacatggagcagcttcgagacgtgcccatcgaccattctgacctggtggctgaccttctgaaagagctgtccaaccacaatgagcgagtggaggaacggaagggagccctgctggagctgctcaagatcacgcgggaagacagccttggtgtctgggaggagcacttcaagaccattctgctcctgctgctggagacccttggagacaaagaccattcaattcgagcactggcgttaagagttttgagggaaattctgagaaatcaaccagcaagatttaaaaactacgccgagctgacgattatgaagactctggaagcccacaaagactcccataaggaggtggtgagagcggctgaggaggctgcgtccacactggccagttccatccacccggagcagtgcatcaaggtgctctgccccatcatccagacggccgactaccccatcaaccttgctgccatcaagatgcagaccaaagtcgtcgagaggatcgcaaaggagtcattgctgcagctccttgtcgacatcatcccaggcttgctgcagggttatgacaacaccgaaagtagtgtgcgtaaggccagcgtgttttgcttagtggcaatttattccgtaatcggagaagacctgaaacctcaccttgcacagctcacagggagcaagatgaagctactaaacttatacataaagagggcccagaccaccaacagcaacagcagctcctcctccgatgtctccacgcacagctaatggcagtacctgtctcttgtgtagacctagaagcaatcggtggtgcctctcagagacctttccccacccccttcatcggctgcccagtcagtacaaggaggcccacaaatatttattacaatcagtattttggtcccttccagcttttctgtagaatcttactggtattgaatgtaaaggaagcaaggcctgtattgcagtcttcatacaaaacaaaaggaataagaacagaaaagagccatactgaaacatgtcttgtacagcctgctgagatggcgaaaccctgtgtgtggggtgcagtttttaaaaatcagagcgctctagccactacttggtagaaagtagcattttttttttcagttaataacatatttgggggtggggtggggtgttactttgtgttcttcctccttagcctattttcttgtgcgtatggtctgtgtggggcccctttcacagctgacaccacgaaaggtgatatatctttaagttgtgttctgagacctactaaaaatgggaatcaagtcttggcaagaacagtctgaagatggccttttaacaaacgctgggaattttgcttgtcatatccagactggaggccgactgccctggctttcagcgtagaattgggagtgcaccctgacagtctccttccagctctccctaatcgactccaccgacaaggtccctaccccagagcttccatgcaaaggaattcttcaagtttaaatctggacacaaaaataagataaatgtatggcatcatttagggatgcctgagatggcagttcatgaagcacagaagataaagaagaagtctttcatctttactgctgagatccttgggaacactgttgtcatgggggctctgccaagaccctcatctctgggctacacggtgattcagattgagcaccaacttgtttcctcccctcaaagttctgcctaagccgttcagttctaacatggtctcagttaatctggtaaatggcatctttaccatcttagttctgacttctcagtttaatgtgggattaagagccaagaaaagcctagagagactggatatcacaattttttttaattttataaactgaagtagttccttgaatgtctgttgatgaaatagtcactgtttaaggaaaaaagtaattatgaggtgtagcagattgcagaaaaacaggattagaaacacacttaaaaagaacacacatttagagtctctcttcctcctcagcgaaccactaggccccctttttaaaaacacctttagagcctaattactccaataaaagtaactagaggtttggagtctggttaaataaattctgagtaaaattcttaagccaaatggaaattcttaatgcaatcatgaggacttctattgtctcttactgttgtattagatcctataaattgaactgatttttccataaggaaaatgcttcttttgagattaattctaataacgtatttgctattgcagtgcagagcccactgcaactgctaggactgaaagcagaggctgggtgccagagcacgtgattcttaacatcatttccacagacccctctgccctgaccctctgcattggatgcaggaagctgggaaagactgatgttgatttggaaacatgggctgaaaatgaaggccccatagtgcataggaacagtaaagccagggtgctgacgtgtgtgtgtgtgtgtgtgtgtgtgtgtgtgtgtgtgtggtgttgtgtgtgtttgtgcgtgcaccctacacatgtgtggtacctcactgctgctgtttagggaacttgagggacgcgtttcaaggggttgggtattactgacgagctttggctcaaaatatagcaggaccaggtcttttgttgataagtactgtttgtttattaatatgtcattaatggtatttcttttttacactctacaagtgaattagggagtctcttgttgacccctttgttgcaggaatgtgcgtcgggctaggttatccatgagtttctttattcctaatgcagttagaaagacctttctccttgagctctttgactcccagaaggtaccccagtccccagtgtacttagaaaggatctcgaacattgctggacgtcctcatagtactcacaaagggctagccttgaatgtcactcgcccagtcttcagtctcctgacttagagatacaatcacgtcacaggtctcttggcctcaatctgaaaactgctgccgccgcgccgaggagactcgcatgccgccaccacctcactgggagggcgccgagcccaccgtcgccccctagaccctgacagctgcagctgccttgccttgccgccgcctccctgcagggcccctgttccaatgaaaaacagaacacaaaagagcagagcacctaagcctgtctctgcctccctgtctaccggactggccagggcccaagacccccgctgctccactgcggggctgggcgggctgactccctgcttcctccaagctgctgcctcccctgcagccagggtctgggcagggtgcagccggtcctcggggcacgcagcttccttcaagtacactgtgtgtgcttcccggacctgcggcgatgccacgggcctgccttttctatgcgcctcactagcttaccaccctgtgcaggtaatgcaactgactttgtctcatcagtctttttctttccctgccaccctttatttatcaagcgtaatgttacactttaaaggacagcaaataagaactttgtagaatcccaccaggactttgctaacaataatgtttggaaataaagaagtgctctgaaaaaatatcagccaccaaaatagttatgttggcactgtgttcacacgcatggtccccacacccccaggttgggtgggtttttttgttttttgggtttttttgggggggggggctttttcatgttacatccatatctgtatttatatcttatttgtttcactttcaagtgtatcatggcaaatgtacagatttttttgttaataatgtgctaggatttgctaaaaaagaaaaaaaaaaaacccttttgagtttgccctagaataaatgagacttaattc

SEQ ID NO: 286665 - DNA, 3768 bp, Artificial Sequence
  derived and/or modified sequence
atgctgcagaactgcagcgacaagaacttcgacgacgaggacagcgtggacggcaacagacccagcagcgccagcagcaccagcagcaaggccccccccagcagcagaagaaacgtgggcatgggcaccaccagaagactgggcagcagcaccctgggcagcaagagcagcgccgccaaggagggcgccggcgccgtggacgaggaggacttcatcaaggccttcgacgacgtgcccgtggtgcagatctacagcagcagagacctggaggagagcatcaacaagatcagagagatcctgagcgacgacaagcacgactgggagcagagagtgaacgccctgaagaagatcagaagcctgctgctggccggcgccgccgagtacgacaacttcttccagcacctgagactgctggacggcgccttcaagctgagcgccaaggacctgagaagccaggtggtgagagaggcctgcatcaccctgggccacctgagcagcgtgctgggcaacaagttcgaccacggcgccgaggccatcatgcccaccatcttcaacctgatccccaacagcgccaagatcatggccaccagcggcgtggtggccgtgagactgatcatcagacacacccacatccccagactgatccccgtgatcaccagcaactgcaccagcaagagcgtggccgtgagaagaagatgcttcgagttcctggacctgctgctgcaggagtggcagacccacagcctggagagacacatcagcgtgctggccgagaccatcaagaagggcatccacgacgccgacagcgaggccagaatcgaggccagaaagtgctactggggcttccacagccacttcagcagagaggccgagcacctgtaccacaccctggagagcagctaccagaaggccctgcagagccacctgaagaacagcgacagcatcgtgagcctgccccagagcgacagaagcagcagcagcagccaggagagcctgaacagacccctgagcgccaagagaagccccaccggcagcaccaccagcagagccagcaccgtgagcaccaagagcgtgagcaccaccggcagcctgcagagaagcagaagcgacatcgacgtgaacgccgccgccagcgccaagagcaaggtgagcagcagcagcggcaccacccccttcagcagcgccgccgccctgccccccggcagctacgccagcctgggcagaatcagaaccagaagacagagcagcggcagcgccaccaacgtggccagcacccccgacaacagaggcagaagcagagccaaggtggtgagccagagccagagaagcagaagcgccaaccccgccggcgccggcagcagaagcagcagccccggcaagctgctgggcagcggctacggcggcctgaccggcggcagcagcagaggcccccccgtgacccccagcagcgagaagagaagcaagatccccagaagccagggctgcagcagagagaccagccccaacagaatcggcctggacagattcggcctgggccagcccggcagaatccccggcagcgtgaacgccatgagagtgctgagcaccagcaccgacctggaggccgccgtggccgacgccctgaagaagcccgtgagaagaagatacgagccctacggcatgtacagcgacgacgacgccaacagcgacgccagcagcgtgtgcagcgagagaagctacggcagcagaaacggcggcatcccccactacctgagacagaccgaggacgtggccgaggtgctgaaccactgcgccagcagcaactggagcgagagaaaggagggcctgctgggcctgcagaacctgctgaagagccagagaaccctgagcagagtggagctgaagagactgtgcgagatcttcaccagaatgttcgccgacccccacagcaagatcgccgacagcgaggccgagtgcgaggacaaggagggcaacctgttccccagcgaggtgagctgcaccagagtgttcagcatgttcctggagaccctggtggacttcatcatcatccacaaggacgacctgcaggactggctgttcgtgctgctgacccagctgctgaagaagatgggcgccgacctgctgggcagcgtgcaggccaaggtgcagaaggccctggacgtgaccagagacagcttccccttcgaccagcagttcaacatcctgatgagattcatcgtggaccagacccagacccccaacctgaaggtgaaggtggccatcctgaagtacatcgagagcctggccagacagatggaccccaccgacttcgtgaacagcagcgagaccagactggccgtgagcagaatcatcacctggaccaccgagcccaagagcagcgacgtgagaaaggccgcccagatcgtgctgatcagcctgttcgagctgaacacccccgagttcaccatgctgctgggcgccctgcccaagaccttccaggacggcgccaccaagctgctgcacaaccacctgaagaacagcagcaacaccagcgtgggcagccccagcaacaccatcggcagaacccccagcagacacaccagcagcagaaccagccccctgaccagccccaccaactgcagccacggcggcctgagccccagcatgctggactacgacaccgagaacctgaacagcgaggagatctacagcagcctgagaggcgtgaccgaggccatcgagaagttcagcttcagaagccaggaggacctgaacgagcccatcaagagagacggcaagaaggagtgcgacatcgtgagcagagacggcggcgccgccagccccgccaccgagggcagaggcggcagcgaggtggagggcggcagaaccgccctggacaacaagaccagcctgctgaacacccagccccccagagccttccccggccccagagccagagactacaacccctacccctacagcgacgccatcaacacctacgacaagaccgccctgaaggaggccgtgttcgacgacgacatggagcagctgagagacgtgcccatcgaccacagcgacctggtggccgacctgctgaaggagctgagcaaccacaacgagagagtggaggagagaaagggcgccctgctggagctgctgaagatcaccagagaggacagcctgggcgtgtgggaggagcacttcaagaccatcctgctgctgctgctggagaccctgggcgacaaggaccacagcatcagagccctggccctgagagtgctgagagagatcctgagaaaccagcccgccagattcaagaactacgccgagctgaccatcatgaagaccctggaggcccacaaggacagccacaaggaggtggtgagagccgccgaggaggccgccagcaccctggccagcagcatccaccccgagcagtgcatcaaggtgctgtgccccatcatccagaccgccgactaccccatcaacctggccgccatcaagatgcagaccaaggtggtggagagaatcgccaaggagagcctgctgcagctgctggtggacatcatccccggcctgctgcagggctacgacaacaccgagagcagcgtgagaaaggccagcgtgttctgcctggtggccatctacagcgtgatcggcgaggacctgaagccccacctggcccagctgaccggcagcaagatgaagctgctgaacctgtacatcaagagagcccagaccaccaacagcaacagcagcagcagcagcgacgtgagcacccacagctag

SEQ ID NO: 286666 - DNA, 114 bp, Artificial Sequence
  derived and/or modified sequence
atgatggtgcgctgggccctgctgtgtggagaatgtcgcatcctgggccgccactgccagggcatcctgctggaggacagcatgccctggcccatccccagcgtgcagctgtag

SEQ ID NO: 286667 - protein, 57 aa, Artificial Sequence
  derived and/or modified sequence
MAHLKRLVKLHIKRHYHKKFWKLGAVIFFFIIVLVLMQREVSVQYSKEESRMERNMK

SEQ ID NO: 286668 - protein, 25 aa, Artificial Sequence
  derived and/or modified sequence
MAHLKRLVKLHIKRHYHKKFWKLGA

SEQ ID NO: 286669 - protein, 90 aa, Artificial Sequence
  derived and/or modified sequence
MAHLKRLVKLHIKRHYHKKFWKLGAVIFFFIIVLVLMQREVSVQYSKEESRMERNMKNKNKMLDLMLEAVNNIKDAMPKMQIGAPVRQNI

SEQ ID NO: 286670 - DNA, 174 bp, Artificial Sequence
  derived and/or modified sequence
atggcccacctgaagagactggtgaagctgcacatcaagagacactaccacaagaagttctggaagctgggcgccgtgatcttcttcttcatcatcgtgctggtgctgatgcagagagaggtgagcgtgcagtacagcaaggaggagagcagaatggagagaaacatgaagtag

SEQ ID NO: 286671 - DNA, 273 bp, Artificial Sequence
  derived and/or modified sequence
atggcccacctgaagagactggtgaagctgcacatcaagagacactaccacaagaagttctggaagctgggcgccgtgatcttcttcttcatcatcgtgctggtgctgatgcagagagaggtgagcgtgcagtacagcaaggaggagagcagaatggagagaaacatgaagaacaagaacaagatgctggacctgatgctggaggccgtgaacaacatcaaggacgccatgcccaagatgcagatcggcgcccccgtgagacagaacatctag

SEQ ID NO: 286672 - DNA, 174 bp, Artificial Sequence
  derived and/or modified sequence
atggcccatttaaagagattagtgaagctgcacatcaagcggcattaccataaaaaattttggaaactcggggcagttattttttttttcatcatcgtcctcgttctgatgcaaagggaagtttccgttcagtatagcaaagaagagtcccgcatggagagaaacatgaagtag

SEQ ID NO: 286673 - DNA, 273 bp, Artificial Sequence
  derived and/or modified sequence
atggctcaccttaagcgcctggtgaaactccacataaaaaggcactatcataagaagttctggaaattgggcgccgtgatcttttttttcatcattgtactcgtgctgatgcagagggaggtcagcgtccagtattctaaggaggagagtaggatggagaggaatatgaagaataaaaacaaaatgctagaccttatgcttgaggccgtaaacaatattaaggatgcgatgcccaagatgcagatcggagctccggtacgccagaacatttag

SEQ ID NO: 286674 - DNA, 174 bp, Artificial Sequence
  derived and/or modified sequence
atggcccacctgaagaggctggtgaagctgcacatcaagaggcactaccacaagaagttctggaagctgggcgctgtgatcttcttcttcatcatcgtgctggtgctgatgcagcgggaggtgtctgtgcagtacagcaaggaggagagcaggatggagaggaacatgaagtag

SEQ ID NO: 286675 - DNA, 273 bp, Artificial Sequence
  derived and/or modified sequence
atggcccacctgaagaggctggtgaagctgcacatcaagaggcactaccacaagaagttctggaagctgggcgctgtgatcttcttcttcatcatcgtgctggtgctgatgcagcgggaggtgtctgtgcagtacagcaaggaggagagcaggatggagaggaacatgaagaacaagaacaagatgctggacctgatgctggaggccgtgaacaacatcaaggatgccatgcccaagatgcagatcggggcccctgtgcggcagaacatctag

SEQ ID NO: 286676 - DNA, 174 bp, Artificial Sequence
  derived and/or modified sequence
atggcccacctgaagcggctggtgaagctgcacatcaagcggcactaccacaagaagttctggaagctcggcgcagtgatcttctttttcatcatcgtgcttgtcttgatgcagagagaagtcagcgtccaatactccaaggaggagtctaggatggagcgcaatatgaaatag

SEQ ID NO: 286677 - DNA, 273 bp, Artificial Sequence
  derived and/or modified sequence
atggcccacctgaagcggctggtgaagctgcacatcaagcggcactatcacaaaaaattctggaaactgggagccgtgatattttttttcattatcgtgctggtcttgatgcagagagaagtgtctgttcagtactctaaggaagaaagtagaatggaacgaaatatgaaaaataaaaacaagatgctcgaccttatgctagaagccgtgaacaatatcaaggacgccatgcctaaaatgcagatcggcgccccagtgcggcagaacatatag

SEQ ID NO: 286678 - DNA, 174 bp, Artificial Sequence
  derived and/or modified sequence
atggcccacctgaagagactggtgaaactgcacataaaaagacactatcataagaaattttggaagctgggggctgttatatttttctttatcattgtcctagtgctgatgcagagagaggtgtccgtgcagtatagtaaagaggaatcgaggatggagaggaacatgaaatag

SEQ ID NO: 286679 - DNA, 273 bp, Artificial Sequence
  derived and/or modified sequence
atggctcaccttaagcgcctggttaaattacacattaagcgtcattatcataagaagttctggaaactgggcgctgttatttttttctttattatcgtgctcgtgctgatgcagcgcgaggtatcagtgcaatactccaaggaagaatcccgtatggagcgcaatatgaagaacaagaataaaatgctcgatcttatgttagaggctgtgaataatatcaaagacgctatgcctaaaatgcaaatcggtgcccctgtaaggcagaacatttag

SEQ ID NO: 286680 - DNA, 559 bp, Artificial Sequence
  derived and/or modified sequence
agtgtgtcggttgcccctggagagatcccgaaaggggcgccctgggccaaggggcaggtggcgcctcgggggggagcccggtcacaccctctcgcccacggtgcccccgccagtccctatggggcggcccctgaggagctggacggagaccaaagacctggggttccttcaggagtcacaagtactattgggttggaaaatctgggagaataatagtttacttactgatgaaactgctgtattatcattcattaagctggagcagatcacagtttgagggtactaccattaaagataccttcttctcagcaaatctatgataaaaaatataagtaacagaagaagaaataactgttatttgtcaagtgacaagcttttaatgtcagaatggctcacctaaagcgactagtaaaattacacattaaaagacattaccataaaaagttctggaagcttggtgcagtaatttttttctttataatagttttggttttaatgcaaagagaagtaagtgttcaatattccaaagaggaatcaaggatggaaaggaacatgaaaa

SEQ ID NO: 286681 - DNA, 536 bp, Artificial Sequence
  derived and/or modified sequence
agctcacctgggagactccaagtggaagccgagcctcggttctgcctctccaggcaacgcgggaggcccagcgggaaggcaggaggcggcggcggaggaggagctctactgagccgcaactgtggcgacagcaaccggagtcgcagccgccgccacctgcacctggcgcctagcccacgtccagcgcctgcccggccgccgcttcccgccaccctgccctgcccacccgccaggggttccttcaggagtcacaagtactattgggttggaaaatctgggagaataatagtttacttactgatgaaactgctgtattatcattcattaagctggagcagatcacagtttgagggtactaccattaaagataccttcttctcagcaaatctatgataaaaaatataagtaacagaagaagaaataactgttatttgtcaagtgacaagcttttaatgtcagaatggctcacctaaagcgactagtaaaattacacattaaaagacattaccataaaaagttctggaagcttggtgcag

SEQ ID NO: 286682 - DNA, 540 bp, Artificial Sequence
  derived and/or modified sequence
agcagttgctgccctcccgaagtggtcctcggaggcagcgcaccccttcattttggcgaaccgaggaggaagggaggaaccgtgtgggggaaatctagaacttctggttccccaaggacccagcagactgtgttctggctacaaggtgatcactgccaccaggtactaccattaaagataccttcttctcagcaaatctatgataaaaaatataagtaacagaagaagaaataactgttatttgtcaagtgacaagcttttaatgtcagaatggctcacctaaagcgactagtaaaattacacattaaaagacattaccataaaaagttctggaagcttggtgcagtaatttttttctttataatagttttggttttaatgcaaagagaagtaagtgttcaatattccaaagaggaatcaaggatggaaaggaacatgaaaaacaaaaacaagatgttggatttaatgctagaagctgtaaacaatattaaggatgccatgccaaaaatgcaaataggagcacctgtcaggcaaaacatt

SEQ ID NO: 286683 - protein, 353 aa, Artificial Sequence
  derived and/or modified sequence
MSRSLDSARSFLERLEARGGREGAVLAGEFSKRCERYWAQEQEPLQTGLFCITLIKEKWLNEDIMLRTLKVTFQKESRSVYQLQYMSWPDRGVPSSPDHMLAMVEEARRLQGSGPEPLCVHCSAGCGRTGVLCTVDYVRQLLLTQMIPPDFSLFDVVLKMRKQRPAAVQTEEQYRFLYHTVAQMFCSTLQNASPHYQNIKENCAPLYDDALFLRTPQALLAIPRPPGGVLRSISVPGSPGHAMADTYAVVQKRGAPAGAGSGTQTGTGTGTGARSAEEAPLYSKVTPRAQRPGAHAEDARGTLPGRVPADQSPAGSGAYEDVAGGAQTGGLGFNLRIGRPKGPRDPPAEWTRV

SEQ ID NO: 286684 - protein, 82 aa, Artificial Sequence
  derived and/or modified sequence
METSASATASEKQEAKSGILEAAGFPDPGKKASPLVVAAAAAAAVAAQGVPQHLLPPFHAPLPIDMRHQEGRYHYEPHSVHG

SEQ ID NO: 286685 - protein, 219 aa, Artificial Sequence
  derived and/or modified sequence
METSASATASEKQEAKSGILEAAGFPDPGKKASPLVVAAAAAAAVAAQGVPQHLLPPFHAPLPIDMRHQEGRYHYEPHSVHGVHGVPFLQPAGDAPPEPQAGAVHLPTLRRQPGPAADDPHLTQLASGLHQQLPKQLGGQRFLRASVSGCPQPSLHLPPPHQPRGLPADSEPAEGSGVSLWTHTTPDPALTHLPGPAAHGPHLHQCHAHPAQQQQQLSE

SEQ ID NO: 286686 - DNA, 249 bp, Artificial Sequence
  derived and/or modified sequence
atggaaacaagcgcatcagcaactgccagcgagaaacaggaggctaaaagcgggattttggaagccgcaggcttccctgatccggggaagaaggcatctcctctggtggtggctgctgccgcagcagccgccgtggccgcccagggggtacctcagcatcttctccctccatttcatgcccccttgcctatcgatatgagacaccaagaaggaaggtaccactacgaacctcactcagttcatggatag

SEQ ID NO: 286687 - DNA, 660 bp, Artificial Sequence
  derived and/or modified sequence
atggaaacctccgctagcgcaaccgccagtgagaagcaggaggccaaaagtggtatcttggaggctgctgggtttcctgacccgggtaagaaggccagccccttggtggtggctgccgctgcagcggccgcagtcgctgcccaaggtgtcccccagcatttgttgcctcccttccacgcaccacttcctattgatatgcgccaccaggagggtcggtaccactacgagcctcactccgtgcatggcgtccatggggttccattcttacaacctgctggagacgccccacctgaaccacaagccggcgccgtccatttgcccacactaaggagacagcctggtccggctgctgacgaccctcatctgacccagctggccagcgggctacaccagcagctgccaaagcagctggggggtcagcgctttttgcgggcctctgtgtccggatgtccacagccatctttgcacctgcctcccccacaccagcctcggggactacctgccgattcggagccggctgaaggatcgggagtgtccttgtggactcacaccacaccagaccccgctctcactcatctgcctgggcctgcagctcacgggccccatctgcaccagtgccacgctcatccagcccagcagcagcagcagttgtctgaatag

SEQ ID NO: 286688 - DNA, 315 bp, Artificial Sequence
  derived and/or modified sequence
ggccacctgcgtgctagaggcaaacttttgtctctctcggattgccacccaggacgatgagcggctgagatggagacgtctgcctcagccactgcctccgagaagcaagaagccaaaagtgggatcctggaggccgctggcttccccgacccgggtaaaaaggcctctcctttggtggtggctgcagcggcagcagcagcggtagctgcccaaggagtgccgcagcatctcttgccaccattccatgcgcccctaccgattgacatgcgacaccaggaaggaaggtaccattacgagcctcattctgtccacggt

SEQ ID NO: 286689 - DNA, 249 bp, Artificial Sequence
  derived and/or modified sequence
atggagaccagcgccagcgccacagccagcgagaagcaggaggccaagagcggcatcctggaggccgccggcttcccagaccccgggaagaaggccagccccctggtggtggccgctgctgctgctgctgctgtggccgcccagggcgtgccccagcacctgctgccccccttccacgcccccctgcccatcgacatgaggcaccaggagggccgctaccactatgagccccacagcgtgcatggatag

SEQ ID NO: 286690 - DNA, 660 bp, Artificial Sequence
  derived and/or modified sequence
atggagaccagcgccagcgccacagccagcgagaagcaggaggccaagagcggcatcctggaggccgccggcttcccagaccccgggaagaaggccagccccctggtggtggccgctgctgctgctgctgctgtggccgcccagggcgtgccccagcacctgctgccccccttccacgcccccctgcccatcgacatgaggcaccaggagggccgctaccactatgagccccacagcgtgcatggagtgcacggcgtgcccttcctgcagcctgctggagatgcccctcctgagccccaggccggggctgtgcacctgcccaccctgcggcggcagcccggccctgctgctgatgacccccacctgacccagctggccagcggcctgcaccagcagctgcccaagcagctgggcggccagcgcttcctgcgggcctctgtgtctggctgcccccagcccagcctgcacctgcccccaccccaccagccccggggcctgcctgctgacagcgagcctgctgagggcagcggcgtgtccctgtggacccacaccaccccagaccctgccctgacccacctgcccggccctgctgcccacggcccccacctgcaccagtgccacgcccacccagcccagcagcagcagcagctgtctgagtag

SEQ ID NO: 286691 - DNA, 249 bp, Artificial Sequence
  derived and/or modified sequence
atggagaccagcgccagcgccaccgccagcgagaagcaggaggccaagagtggcatccttgaggcggccggctttcctgatccaggaaaaaaagccagccccttagtggtcgcagctgccgctgctgctgctgtggctgcccagggtgtgcctcaacacctgcttccacccttccatgcccctttgccgattgacatgagacaccaggaaggtcggtaccactatgaacctcacagcgttcacggatag

SEQ ID NO: 286692 - DNA, 660 bp, Artificial Sequence
  derived and/or modified sequence
atggagaccagcgccagcgccaccgccagcgagaagcaggaggccaaatccgggatcctggaggcagcaggtttccccgaccctggaaaaaaggcatctccacttgtggtcgccgctgctgcagcagcagcggtcgcagctcagggggtccctcagcatcttctgcccccctttcatgccccacttcccatcgacatgaggcatcaggaaggccgctatcactacgaaccacactccgtacatggcgtgcacggtgtgccctttttgcaacctgccggtgacgcccctcctgagcctcaagctggagcggtgcatctacccacgcttcgaaggcagcccggcccagctgctgatgatcctcatctaacacaactggcttctggccttcaccagcagctgccgaagcagctgggcgggcaacggtttttacgcgccagtgtgagcggatgcccacagcccagcctgcaccttcctccacctcaccagccacgcggtctaccagccgattcggaaccggccgaaggcagcggtgtgtccctctggacacacacgacccctgatcctgccctgacacacttacctggccctgccgcccacgggcctcacctgcaccaatgccatgctcacccagcccagcagcagcaacagctcagtgagtag

SEQ ID NO: 286693 - DNA, 249 bp, Artificial Sequence
  derived and/or modified sequence
atggaaacgtcggcatccgctaccgccagcgagaaacaagaagccaaatcgggcatactggaggccgctggattccccgatcctggtaagaaggcctccccgttggttgtggccgcagccgctgccgcagccgtggcagcgcagggcgtgcctcagcacttgttaccgcctttccacgctcctctgccaattgacatgcgacaccaagagggcagatatcactacgaacctcactcggtccatgggtag

SEQ ID NO: 286694 - DNA, 660 bp, Artificial Sequence
  derived and/or modified sequence
atggagacctccgctagcgcaactgcgtccgagaaacaggaggccaaaagtggcattctggaagcagccggatttcccgatcccggtaagaaagcgagccccctggtcgtggcagcagccgctgccgcagccgtggcggcacagggagttcctcagcacctcctcccaccttttcacgcccctcttcccatcgatatgaggcatcaagaaggacgctatcattatgagcctcactcagtgcatggtgtgcatggcgtgccttttcttcagcccgctggggacgcacctcccgaaccacaggccggagcagtgcacctgcctacactgagaaggcaaccaggtcctgcagcggatgatccccaccttacacagctggcctccgggcttcaccagcaattacctaaacagcttggcggtcagcggtttcttcgagcctccgtctcgggctgcccccagccctcactacatcttccaccccctcatcagcccagagggttgcctgctgactctgaacctgccgaaggatccggcgtgtctttgtggacccacaccactccagatcctgctctgacccatctgcccggtcccgctgcacacggcccacatctgcatcagtgccacgcccacccagcacagcagcaacaacaactgagtgagtag

SEQ ID NO: 286695 - DNA, 249 bp, Artificial Sequence
  derived and/or modified sequence
atggagaccagcgccagcgccaccgccagcgagaagcaggaggccaagagcggcatcctggaggccgccggcttccccgaccccggcaagaaggccagccccctggtggtggccgccgccgccgccgccgccgtggccgcccagggcgtgccccagcacctgctgccccccttccacgcccccctgcccatcgacatgagacaccaggagggcagataccactacgagccccacagcgtgcacggctag

SEQ ID NO: 286696 - DNA, 660 bp, Artificial Sequence
  derived and/or modified sequence
atggagaccagcgccagcgccaccgccagcgagaagcaggaggccaagagcggcatcctggaggccgccggcttccccgaccccggcaagaaggccagccccctggtggtggccgccgccgccgccgccgccgtggccgcccagggcgtgccccagcacctgctgccccccttccacgcccccctgcccatcgacatgagacaccaggagggcagataccactacgagccccacagcgtgcacggcgtgcacggcgtgcccttcctgcagcccgccggcgacgccccccccgagccccaggccggcgccgtgcacctgcccaccctgagaagacagcccggccccgccgccgacgacccccacctgacccagctggccagcggcctgcaccagcagctgcccaagcagctgggcggccagagattcctgagagccagcgtgagcggctgcccccagcccagcctgcacctgccccccccccaccagcccagaggcctgcccgccgacagcgagcccgccgagggcagcggcgtgagcctgtggacccacaccacccccgaccccgccctgacccacctgcccggccccgccgcccacggcccccacctgcaccagtgccacgcccaccccgcccagcagcagcagcagctgagcgagtag

SEQ ID NO: 286697 - protein, 432 aa, Artificial Sequence
  derived and/or modified sequence
MLFEQGQQALELPECTMQKAAYYENPGLFGGYGYSKTTDTYGYSTPHQPYPPPAAASSLDTDYPGSACSIQSSAPLRAPAHKGAELNGSCMRPGTGNSQGGGGGSQPPGLNSEQQPPQPPPPPPTLPPSSPTNPGGGVPAKKPKGGPNASSSSATISKQIFPWMKESRQNSKQKNSCATAGESCEDKSPPGPASKRVRTAYTSAQLVELEKEFHFNRYLCRPRRVEMANLLNLTERQIKIWFQNRRMKYKKDQKAKGILHSPASQSPERSPPLGGAAGHVAYSGQLPPVPGLAYDAPSPPAFAKSQPNMYGLAAYTAPLSSCLPQQKRYAAPEFEPHPMASNGGGFASANLQGSPVYVGGNFVESMAPASGPVFNLGHLSHPSSASVDYSCAAQIPGNHHHGPCDPHPTYTDLSAHHSSQGRLPEAPKLTHL

SEQ ID NO: 286698 - protein, 100 aa, Artificial Sequence
  derived and/or modified sequence
MLFEQGQQALELPECTMQKAAYYENPGLFGGYGYSKTTDTYGYSTPHQPYPPPAAASSLDTDYPGSACSIQSSAPLRAPAHKGAELNGSCMRPGTGNSQG

SEQ ID NO: 286699 - DNA, 2319 bp, Artificial Sequence
  derived and/or modified sequence
gcctccacagatatcaaaagaaacctgaagagcctacaaaaaaaaaagagataaagacaaaattcaagaaaacacacacatacataattgtggtcacctggagcctgggggccggcccagctctctcaggattcagcagacattggaggtggcagtgaaggatacagtggtagtcaatgttatttgagcagggtcagcaggccctggagcttcctgagtgcacaatgcagaaggctgcttactatgaaaacccaggactgtttggaggctatggctacagcaaaactacggacacttacggctacagcaccccccaccagccctacccaccccctgctgctgccagctccctggacactgactatccaggttctgcctgctccatccagagctctgcccctctgagagccccagcccacaaaggagctgaactcaatggcagctgcatgcggccgggcactgggaacagccagggtgggggtggtggcagccagcctcctggtctgaactcagagcagcagccaccacaaccccctcctccaccaccgaccctgcccccatcttcacccaccaatcctggaggtggagtgcctgccaagaagcccaaaggtgggcccaatgcttctagctcctcagccaccatcagcaagcagatcttcccctggatgaaagagtctcgacagaactccaagcagaagaacagctgtgccactgcaggagagagctgcgaggacaagagcccgccaggcccagcatccaagcgggtacgcacggcatacacgagcgcgcagctggtggaattggaaaaggaattccacttcaaccgctacttgtgccggccgcgccgcgtggagatggccaacctgctgaatctcacggaacgccagatcaagatctggttccagaaccggcgcatgaagtacaagaaggaccagaaggccaagggcatcctgcactcgccggctagccagtcccctgagcgcagcccaccgctcggcggcgccgctggccacgtggcctactccggccagctgccgccagtgcccggcctggcctacgacgcgccctcgccgcctgctttcgccaaatcacagcccaatatgtacggcctggccgcctacacggcgccactcagcagctgcctgccacaacagaagcgctacgcagcgccggagttcgagccccatcccatggcgagcaacggcggcggcttcgccagcgccaacttgcagggcagcccggtgtacgtgggcggcaacttcgtcgagtccatggcgcccgcgtccgggcctgtcttcaacctgggccacctctcgcacccgtcgtcggccagcgtggactacagttgcgccgcgcagattccaggcaaccaccaccatggaccttgcgaccctcatcccacctacacagatctctcggcccaccactcgtctcagggacgactgccggaggctcccaaactgacgcatctgtagcggccgccgccagcccgaactcgcggcaaaattacctctcttgctgtagtggtggggtagagggtggggcccgcggggcagttcgggaacccccttccccgctcttgccctgccgccgcctcccgggtctcaggcctccagcggcggaggcgcaggcgaccgggcctcccctccatgggcgtcctttgggtgactcgccataaatcagccgcaaggatccttccctgtaaatttgacagtgccacatactgcggaccaagggactccaatctggtaatggtgtcccaaaggtaagtctgagacccatcagcggcgcgccctgcagagggaccagagcttggagagtcttgggcctggcccgcgtctagcttagtttcagagaccttaatttatattctccttcctgtgccgtaaggattgcatcggactaaactatctgtatttattatttgaagcgagtcatttcgttccctgattatttatccttgtctgaatgtatttatgtgtatatttgtagatttatccagccgagcttaggaattcgcttccaggccgtgggggccacatttcacctccttagtccccctggtctgaactagttgagagagtagttttgaacagtcgtaaccgtggctggtgtttgtagttgacataaaggattaagaccgcaaattgtccttcatgggtagagtcaggaagcccggtggcgtggcacaacacactttggtcatttctcaaaaaccacagtcctcaccacagtttattgatttcaaattgtctggtactattggaacaaatatttagaataaaaaaatttcccagtcaaaaaaaaaaaaaaaaaaaa

SEQ ID NO: 286700 - DNA, 1299 bp, Artificial Sequence
  derived and/or modified sequence
atgctttttgaacaggggcagcaggctctggagctgccagaatgcacaatgcaaaaggctgcatactacgagaaccccggactgtttggagggtatggctactccaaaaccactgacacctatggctatagcactccgcaccaaccttaccctcctcctgccgccgcctcgtctctagacaccgattacccgggaagcgcctgttctattcagtcatctgcccctctgcgggcgcccgctcacaagggtgccgagctgaatggctcatgcatgagaccaggcaccggaaattctcaggggggcggtggcgggtcacagccgccaggactgaactctgagcagcaaccgccccagccgccgcctccacctcctacactgccacccagcagtcctaccaatccaggaggtggcgtgcccgccaaaaaacctaaaggcgggcccaacgccagtagttcctcagccactatatctaaacagatctttccctggatgaaggagtccaggcagaacagcaaacaaaagaattcttgtgccacagctggggaaagttgcgaggacaagtcacccccgggtccagcatccaaaagagtacgcacggcgtatacatccgcacagctagtggaactggaaaaggaattccacttcaatcgttacctctgcagacctcgtagagtagaaatggctaacctcctgaaccttaccgaacggcaaattaagatctggtttcaaaaccgaaggatgaagtacaagaaagaccagaaagcaaagggaatactgcacagcccagctagtcagagtccggaaagatccccacccttgggaggtgcagccggccacgtggcctattcaggtcagttgccccctgtccccggcctggcttacgacgcaccatcgcctccggcgtttgctaagtcacagcccaacatgtatggcttggctgcctacaccgcaccactgtccagttgcctacctcagcaaaaacgatatgcagcaccggagtttgaaccacacccaatggctagcaacggcggtggctttgcatctgccaatctgcagggaagtccggtttacgtgggtgggaattttgtggaatctatggccccggcaagcggacctgtgttcaacttgggccacttatcccatccatcctctgcatctgttgactacagctgtgctgctcaaattccgggcaaccaccatcacggaccctgtgatccccaccccacctatacagatctgtctgcgcaccactcttcccagggcaggctacccgaagcacctaagctgacccatctgtag

SEQ ID NO: 286701 - DNA, 1299 bp, Artificial Sequence
  derived and/or modified sequence
atgcttttcgaacagggacagcaagccctggagttgcccgaatgtaccatgcagaaggccgcctattacgaaaatcccggcttattcgggggctatggttactccaaaacaaccgacacatatggctacagtacacctcatcagccgtaccctcccccagctgctgcatcttctctcgatacagattatcccggcagcgcctgtagcatccagtcttcagcaccactgcgcgctcccgctcacaagggagccgaactgaacggaagttgtatgcgcccaggcactgggaactcccaaggcggcggtggtggatctcagccacctggactgaactcggaacagcaaccaccccagcctccacctcccccaccaaccctccccccaagttctccaaccaaccctggagggggcgttcccgcgaaaaaaccaaaaggcgggcccaacgctagcagctctagtgccacaatatcgaagcagatctttccatggatgaaggaaagtagacagaattcaaagcagaagaatagctgcgcgaccgccggtgagtcttgtgaggacaaatcaccgccagggcccgctagcaagcgcgtgcggacagcatatacgagcgctcagctggttgagctggagaaggagtttcacttcaaccgctatctctgtaggcctcggcgcgtagaaatggccaatctcctgaatctgacagagcggcagatcaagatatggttccaaaataggagaatgaagtacaagaaagatcagaaagccaagggaattctgcattcccccgcatcccagtcccctgagaggagcccgcctttagggggggctgccgggcatgtggcatactccggacagcttcctccagtgcccggtctggcctatgatgcccctagtcctcccgcatttgccaagagtcaacccaatatgtatggcttagctgcttacaccgccccattgagctcttgtttaccccagcagaaacgatacgcggcgcccgagttcgaaccccacccaatggctagcaatggggggggcttcgcatcagcaaacctgcaggggtctccagtctacgtgggaggaaactttgtcgagtcaatggctcctgcctctggcccagtatttaatctgggccatctcagccatccgtcctccgcttccgtggattattcatgtgccgctcaaattccaggaaaccatcaccatggtccttgtgatccccatccaacttatacagacctgtctgcacaccattccagtcaaggcaggctccccgaggctcctaagctcacccatctgtag

SEQ ID NO: 286702 - DNA, 303 bp, Artificial Sequence
  derived and/or modified sequence
atgctcttcgagcagggacaacaagctctggaactgcccgaatgcaccatgcagaaggctgcctactatgagaacccagggttgtttggaggatacgggtattcaaagactaccgatacttacggatacagcactccccaccagccttacccgcctcctgccgctgcgtcctccctcgataccgactatcctgggagcgcttgtagcatacagagttccgccccactgagagccccagctcataaaggcgcagaactgaatggttcttgcatgcgcccaggcaccggcaactcgcagggatag

SEQ ID NO: 286703 - DNA, 1299 bp, Artificial Sequence
  derived and/or modified sequence
atgctgttcgaacagggccagcaggccttagagctgcccgaatgtactatgcagaaggccgcttactacgaaaatccgggcttgttcggtgggtacggctactctaagactacggatacctacggatatagcacaccccaccaaccttatccccctccagctgcggcaagtagccttgacaccgactatcccggctccgcctgcagcatccagtccagcgcccccctcagagctcccgcccacaaaggggctgagttgaatggtagctgtatgcggcccggcaccggcaactcacagggaggcgggggcggttcgcagccccctggactcaacagcgaacagcagccacctcagccccctccaccacccccaacccttccaccctcctcccctactaatcccggcgggggcgtgcctgccaaaaagccgaaaggaggccccaacgcttcttcctcctctgctacaatctccaagcaaatttttccctggatgaaggaaagcagacaaaactcgaaacagaagaatagctgcgccacagcaggggaatcatgcgaggataaaagcccaccaggacctgctagtaagagggtgcgcacagcctacacctccgctcagcttgtagagctcgaaaaggaattccatttcaatcgctacctctgtagaccacggcgcgtcgaaatggctaacctgctgaatcttacagagcggcaaattaagatctggtttcagaaccgaagaatgaaatataaaaaagaccaaaaggccaaagggatcctgcattccccagcctcacagtcacccgagcgcagcccccctctgggaggggctgcgggacatgtggcatattcaggccaattaccgcccgttcccggtctcgcttacgatgccccttcaccccccgcttttgcaaaatctcagcctaatatgtacggtctcgccgcatacacagcaccgctctcttcttgcctgccccaacagaagaggtatgctgcaccagaattcgagccccatcccatggcctccaatggcggagggtttgcttccgcaaatttacagggctcgccagtctacgtgggaggcaactttgtggagtctatggcccccgctagcggtccggtcttcaacctcggacacctgagccatccttccagcgcctctgtagactactcctgcgctgcgcagataccggggaatcaccaccacggcccttgcgacccccacccaacatacacggacctgagcgctcaccatagctctcaagggaggctgcccgaagctccaaaacttacacatctttag

SEQ ID NO: 286704 - DNA, 4050 bp, Artificial Sequence
  derived and/or modified sequence
gcctccacagatatcaaaagaaacctgaagagcctacaaaaaaaaaagagataaagacaaaattcaagaaaacacacacatacataattgtggtcacctggagcctgggggccggcccagctctctcaggattcagcagacattggaggtggcagtgaaggatacagtggtagtcaatgttatttgagcagggtcagcaggccctggagcttcctgagtgcacaatgcagaaggctgcttactatgaaaacccaggactgtttggaggctatggctacagcaaaactacggacacttacggctacagcaccccccaccagccctacccaccccctgctgctgccagctccctggacactgactatccaggttctgcctgctccatccagagctctgcccctctgagagccccagcccacaaaggagctgaactcaatggcagctgcatgcggccgggcactgggaacagccagggtgggggtggtggcagccagcctcctggtctgaactcagagcagcagccaccacaaccccctcctccaccaccgaccctgcccccatcttcacccaccaatcctggaggtggagtgcctgccaagaagcccaaaggtgggcccaatgcttctagctcctcagccaccatcagcaagcagatcttcccctggatgaaagagtctcgacagaactccaagcagaagaacagctgtgccactgcaggagagagctgcgaggacaagagcccgccaggcccagcatccaagcgggtacgcacggcatacacgagcgcgcagctggtggaattggaaaaggaattccacttcaaccgctacttgtgccggccgcgccgcgtggagatggccaacctgctgaatctcacggaacgccagatcaagatctggttccagaaccggcgcatgaagtacaagaaggaccagaaggccaagggcatcctgcactcgccggctagccagtcccctgagcgcagcccaccgctcggcggcgccgctggccacgtggcctactccggccagctgccgccagtgcccggcctggcctacgacgcgccctcgccgcctgctttcgccaaatcacagcccaatatgtacggcctggccgcctacacggcgccactcagcagctgcctgccacaacagaagcgctacgcagcgccggagttcgagccccatcccatggcgagcaacggcggcggcttcgccagcgccaacttgcagggcagcccggtgtacgtgggcggcaacttcgtcgagtccatggcgcccgcgtccgggcctgtcttcaacctgggccacctctcgcacccgtcgtcggccagcgtggactacagttgcgccgcgcagattccaggcaaccaccaccatggaccttgcgaccctcatcccacctacacagatctctcggcccaccactcgtctcagggacgactgccggaggctcccaaactgacgcatctgtagcggccgccgccagcccgaactcgcggcaaaattacctctcttgctgtagtggtggggtagagggtggggcccgcggggcagttcgggaacccccttccccgctcttgccctgccgccgcctcccgggtctcaggcctccagcggcggaggcgcaggcgaccgggcctcccctccatgggcgtcctttgggtgactcgccataaatcagccgcaaggatccttccctgtaaatttgacagtgccacatactgcggaccaagggactccaatctggtaatggtgtcccaaaggtaagtctgagacccatcagcggcgcgccctgcagagggaccagagcttggagagtcttgggcctggcccgcgtctagcttagtttcagagaccttaatttatattctccttcctgtgccgtaaggattgcatcggactaaactatctgtatttattatttgaagcgagtcatttcgttccctgattatttatccttgtctgaatgtatttatgtgtatatttgtagatttatccagccgagcttaggaattcgcttccaggccgtgggggccacatttcacctccttagtccccctggtctgaactagttgagagagtagttttgaacagtcgtaaccgtggctggtgtttgtagttgacataaaggattaagaccgcaaattgtccttcatgggtagagtcaggaagcccggtggcgtggcacaacacactttggtcatttctcaaaaaccacagtcctcaccacagtttattgatttcaaattgtctggtactattggaacaaatatttagaataaaaaaatttcccagtcggaactgtatctgtgttaatcatgcacacttgcaagcagatcactatgcctttatctcgcacaatccccatggaaggccccgaaacagactgacactttgaaaaaaatattttatttatttggagtctagtgcataaattggttctcgggatacttgattactttccagctattgaaattaggggagggggaaatgaggatgcaaacctaagaaggttctgggcgggatgatttgggcagggctttttgaaagcagcgcctgctttgctgtttttactgccttctttctagacacaatcgacttttacactggggagaccagagctcacttttctgcattaagtaacaaaaaataaactttgaaagaaaactgacaatcaaagaaaaaacacaagagaagttgtaagaagaattgagctatgaaaaagctaaggtgtagaaaaagaaaccatcatttggagacgcgtacctaagctttttctctaggaaatgctgtcatgaattcttcctttgtagtgatcattagttcatttctaaagaaaacaaacattccccaagatgtaaagtaataatatttcattaatgaaacataacaagtataaacaccttgtttactcctgtttcttatacaaaatgggcaaaaatgtcttcaaggatttataaccattttgtaaatattaatgtggcttctgctaggggtggacaacttcccggcttctatgggaggggccacttagaaaacgccttcagataaggttcaattcttttgtatttcagcaaagtcagcccacgcatctctatttggtttgacaaataatgcaactcctactacatccccgatgacacgaagtgaaattcctattgtgtggaaataatttaacttctaatcttctggtggaacaacaatcgtttctatttggatgtttgtatttcactaagtaatgatggctcaaaataatatttagtttccttgttcctttgtgctgtttttaaaatggcatgttagatttgggggtgggaggggatatccttttgctaaatttcactttatctgagcaggtttaaaatatatatgttgtagaagtgtatcaacagaataaatgacttcaatcgaaggcacattttacccactttcaaggcttaacattgttttctatgaaatttgcatccataggcagaatttctaattgtcttgtaagaaattattttttaagctattagagaaatcaaaggagagctcactgccttgcagggattacaaccacctttcttaactggctaaatattaactagctgaattgtcaggctgcttagattcagcccgattttccctcatctcctcttcctaccataaataataataaaaatacgtaatgtgtcatggctccaggcgttttccagcacagtgtgttaccgcaggagtatctgctgagtctgcgggtgtctgcaaagccccaagtgtcatttgcggcttagggtttcatggattagactttaaacggtgtctagcccggctgacattagcttcctctcacactcaggctccaaggaagtgtgggatcaggggctccctctccaggcagccacagctttccccgacgccctcctctcgagtggggtgagggcttggaccaaatctgccaccttctgtcatctctggaggttcccgagacttctaatagctcggatctgttcctgccattggcgtgagactcatctgaggggcgtgggtgggggtgggcggcgagccg

SEQ ID NO: 286705 - DNA, 2384 bp, Artificial Sequence
  derived and/or modified sequence
agttgaacctcagcctggttccgttctaccgggaattccgtgtgctcgagtatatggccgtgtctgcgagcgcgcaagaccagggttgggacagtgttgtctgcagacaaagggggaaggctagctctgccccccactggcgcccactctgaggccgaggacaccaggtttatgataaattgggatccaggtcacctggagcctgggggccggcccagctctctcaggattcagcagacattggaggtggcagtgaaggatacagtggtagtcaatgttatttgagcagggtcagcaggccctggagcttcctgagtgcacaatgcagaaggctgcttactatgaaaacccaggactgtttggaggctatggctacagcaaaactacggacacttacggctacagcaccccccaccagccctacccaccccctgctgctgccagctccctggacactgactatccaggttctgcctgctccatccagagctctgcccctctgagagccccagcccacaaaggagctgaactcaatggcagctgcatgcggccgggcactgggaacagccagggtgggggtggtggcagccagcctcctggtctgaactcagagcagcagccaccacaaccccctcctccaccaccgaccctgcccccatcttcacccaccaatcctggaggtggagtgcctgccaagaagcccaaaggtgggcccaatgcttctagctcctcagccaccatcagcaagcagatcttcccctggatgaaagagtctcgacagaactccaagcagaagaacagctgtgccactgcaggagagagctgcgaggacaagagcccgccaggcccagcatccaagcgggtacgcacggcatacacgagcgcgcagctggtggaattggaaaaggaattccacttcaaccgctacttgtgccggccgcgccgcgtggagatggccaacctgctgaatctcacggaacgccagatcaagatctggttccagaaccggcgcatgaagtacaagaaggaccagaaggccaagggcatcctgcactcgccggctagccagtcccctgagcgcagcccaccgctcggcggcgccgctggccacgtggcctactccggccagctgccgccagtgcccggcctggcctacgacgcgccctcgccgcctgctttcgccaaatcacagcccaatatgtacggcctggccgcctacacggcgccactcagcagctgcctgccacaacagaagcgctacgcagcgccggagttcgagccccatcccatggcgagcaacggcggcggcttcgccagcgccaacttgcagggcagcccggtgtacgtgggcggcaacttcgtcgagtccatggcgcccgcgtccgggcctgtcttcaacctgggccacctctcgcacccgtcgtcggccagcgtggactacagttgcgccgcgcagattccaggcaaccaccaccatggaccttgcgaccctcatcccacctacacagatctctcggcccaccactcgtctcagggacgactgccggaggctcccaaactgacgcatctgtagcggccgccgccagcccgaactcgcggcaaaattacctctcttgctgtagtggtggggtagagggtggggcccgcggggcagttcgggaacccccttccccgctcttgccctgccgccgcctcccgggtctcaggcctccagcggcggaggcgcaggcgaccgggcctcccctccatgggcgtcctttgggtgactcgccataaatcagccgcaaggatccttccctgtaaatttgacagtgccacatactgcggaccaagggactccaatctggtaatggtgtcccaaaggtaagtctgagacccatcagcggcgcgccctgcagagggaccagagcttggagagtcttgggcctggcccgcgtctagcttagtttcagagaccttaatttatattctccttcctgtgccgtaaggattgcatcggactaaactatctgtatttattatttgaagcgagtcatttcgttccctgattatttatccttgtctgaatgtatttatgtgtatatttgtagatttatccagccgagcttaggaattcgcttccaggccgtgggggccacatttcacctccttagtccccctggtctgaactagttgagagagtagttttgaacagtcgtaaccgtggctggtgtttgtagttgacataaaggattaagaccgcaaattgtccttcatgggtagagtcaggaagcccggtggcgtggcacaacacactttggtcatttctcaaaaaccacagtcctcaccacagtttattgatttcaaattgtctggtactattggaacaaatatttagaataaaa

SEQ ID NO: 286706 - DNA, 428 bp, Artificial Sequence
  derived and/or modified sequence
agacgcccggaccgaccgccgcctgtagctcggcagccttcgggtcacctggagcctgggggccggcccagctctctcaggattcagcagacattggaggtggcagtgaaggatacagtggtagtcaatgttatttgagcagggtcagcaggccctggagcttcctgagtgcacaatgcagaaggctgcttactatgaaaacccaggactgtttggaggctatggctacagcaaaactacggacacttacggctacagcaccccccaccagccctacccaccccctgctgctgccagctccctggacactgactatccaggttctgcctgctccatccagagctctgcccctctgagagccccagcccacaaaggagctgaactcaatggcagctgcatgcggccgggcactgggaacagccagggtg

SEQ ID NO: 286707 - DNA, 4217 bp, Artificial Sequence
  derived and/or modified sequence
ggtcgatgcaaaaacttcacgtttcttcggaatagccagagaccaaagtgcgacatggagactagaagcagccggcgctggtcagccgcctcgttctgttttattaccttggactccaggaggatcagctgcgcctggtgacatagagcagcttttcctctccagaagctcctcacctttaaacagagtatcctctgggtgctgaaaagaaagaaagacagaaagagagaaagagagagagagagagaaagagagaatgcaagcctaattggttgcatggatgcagggccaaagggctaggttttggggtactagggagtgaggtacaaggccagcttgcccagtcccagctctgccctccaggaacatgaggtgcaaaggtacccaaatgggggcttgcttgtatttggggcctgtgggaagaaagcaagcttcaaagaagcccagtggggagctctagggtgcattttgacaaggtggaggtgcccttgccaccatcccagcccacccccagctacatgggcaagggcagcgagggccccctgctattttggcagggcccagctttggctgggaacccccgggcctgggcactggtagaaagcatggcggttactcattgcctaatttgattcaagctggccagattctggtaacttttgggtgaccctgatgaagacaaagccaggacggcggcctttgtatggcagaatccctgctcccgccggctgcaggcagggcgggcaggcaggaaccctcctcgcctggggcactctgcccaactcagaggcgagttcacccacccacctttcattgctctgtaccccaataggaggattcattctcccttgagctgtgcctacttggtgtcggggggcgggggttgcattcagctgggggtgagtggaagggccacggaaggttggcaaaatcagtggcagacaaaagctgggattacctgaggggaatggggtgctggggactggaactacattaatatctggcaggggctctcaaatgtgccatagcaagctacttgattacacgtatgttatttagttaaatttgtgaaaattatgagatgctcaccaacccggtgataaacttgctccctcgccattggctggcctggtcacatggctgcccaactttattcagttgacagcaagtaggagggccctatggaaggagaaaaaaagacaacacgagaaaaattagtattttctaccttctgaaattaatggtcatgagttcgtatatggtgaactccaagtatgtggaccccaagttccctccgtgcgaggagtatttgcagggcggctacctaggcgagcagggcgccgactactacggcggcggcgcgcagggcgcagacttccagcccccggggctctacccacggcccgacttcggtgagcagcctttcggaggcagcggccccgggcctggctcggcgctgcctgcgcggggtcacggacaagagccaggcggccccggcggtcactacgccgctccaggagagccttgcccagctcccccggcgcctccgccggcgcccctgcctggcgcccgggcctacagtcagtccgaccccaagcagccgccctccgggacggcactcaagcagccggccgtggtctacccctggatgaagaaggtgcacgtgaattcgggtatctgacaaggcgccgtcggattgaaatcgctcacaccctgtgtctgtcggagcgccagatcaagatctggttccagaaccggaggatgaagtggaaaaaagatcataagctgcccaacactaaaggcaggtcatcgtcctcatcttcctcctcatcttgctcctcctcagtcgcccccagccagcatttacagccgatggccaaagaccaccacacggacctgacgaccttatagaagtggggaccctgggcccatctctccctgcgcaccaggctgagccgaagctgcgggggcaggccgggcctgctgtcacctcgctgggctctaaggtcacctggagcctgggggccggcccagctctctcaggattcagcagacattggaggtggcagtgaaggatacagtggtagtcaatgttatttgagcagggtcagcaggccctggagcttcctgagtgcacaatgcagaaggctgcttactatgaaaacccaggactgtttggaggctatggctacagcaaaactacggacacttacggctacagcaccccccaccagccctacccaccccctgctgctgccagctccctggacactgactatccaggttctgcctgctccatccagagctctgcccctctgagagccccagcccacaaaggagctgaactcaatggcagctgcatgcggccgggcactgggaacagccagggtgggggtggtggcagccagcctcctggtctgaactcagagcagcagccaccacaaccccctcctccaccaccgaccctgcccccatcttcacccaccaatcctggaggtggagtgcctgccaagaagcccaaaggtgggcccaatgcttctagctcctcagccaccatcagcaagcagatcttcccctggatgaaagagtctcgacagaactccaagcagaagaacagctgtgccactgcaggagagagctgcgaggacaagagcccgccaggcccagcatccaagcgggtacgcacggcatacacgagcgcgcagctggtggaattggaaaaggaattccacttcaaccgctacttgtgccggccgcgccgcgtggagatggccaacctgctgaatctcacggaacgccagatcaagatctggttccagaaccggcgcatgaagtacaagaaggaccagaaggccaagggcatcctgcactcgccggctagccagtcccctgagcgcagcccaccgctcggcggcgccgctggccacgtggcctactccggccagctgccgccagtgcccggcctggcctacgacgcgccctcgccgcctgctttcgccaaatcacagcccaatatgtacggcctggccgcctacacggcgccactcagcagctgcctgccacaacagaagcgctacgcagcgccggagttcgagccccatcccatggcgagcaacggcggcggcttcgccagcgccaacttgcagggcagcccggtgtacgtgggcggcaacttcgtcgagtccatggcgcccgcgtccgggcctgtcttcaacctgggccacctctcgcacccgtcgtcggccagcgtggactacagttgcgccgcgcagattccaggcaaccaccaccatggaccttgcgaccctcatcccacctacacagatctctcggcccaccactcgtctcagggacgactgccggaggctcccaaactgacgcatctgtagcggccgccgccagcccgaactcgcggcaaaattacctctcttgctgtagtggtggggtagagggtggggcccgcggggcagttcgggaacccccttccccgctcttgccctgccgccgcctcccgggtctcaggcctccagcggcggaggcgcaggcgaccgggcctcccctccatgggcgtcctttgggtgactcgccataaatcagccgcaaggatccttccctgtaaatttgacagtgccacatactgcggaccaagggactccaatctggtaatggtgtcccaaaggtaagtctgagacccatcagcggcgcgccctgcagagggaccagagcttggagagtcttgggcctggcccgcgtctagcttagtttcagagaccttaatttatattctccttcctgtgccgtaaggattgcatcggactaaactatctgtatttattatttgaagcgagtcatttcgttccctgattatttatccttgtctgaatgtatttatgtgtatatttgtagatttatccagccgagcttaggaattcgcttccaggccgtgggggccacatttcacctccttagtccccctggtctgaactagttgagagagtagttttgaacagtcgtaaccgtggctggtgtttgtagttgacataaaggattaagaccgcaaattgtccttcatgggtagagtcaggaagcccggtggcgtggcacaacacactttggtcatttctcaaaaaccacagtcctcaccacagtttattgatttcaaattgtctggtactattggaacaaatatttagaataaaaaaatttcccagtcggaa

SEQ ID NO: 286708 - DNA, 1299 bp, Artificial Sequence
  derived and/or modified sequence
atgctgtttgagcagggccagcaggccctggagctgcctgagtgcaccatgcagaaggccgcctactatgagaaccctggcctgtttggaggctacggctacagcaagaccacagacacctacggctacagcaccccccaccagccctacccacctcctgctgctgccagcagcctggacacagactacccaggcagcgcctgcagcatccagagcagcgcccccctgcgggccccagcccacaagggagctgagctgaatggcagctgcatgaggcctggcactggaaacagccagggcggcggcggcggcagccagcccccaggcctgaacagcgagcagcagcccccccagcccccacctcctccacccaccctgccccccagcagccccaccaaccctgggggcggcgtgcctgccaagaagcccaagggcggccccaatgccagcagcagcagcgccaccatcagcaagcagatcttcccctggatgaaggagagccggcagaacagcaagcagaagaacagctgtgccacagctggggagagctgtgaggacaagagccccccaggccctgccagcaagagggtgaggacagcctacaccagcgcccagctggtggagctggagaaggagttccacttcaaccgctacctgtgccggcccaggagagtggagatggccaacctgctgaacctgacagagcggcagatcaagatctggttccagaacagaaggatgaagtacaagaaggaccagaaggccaagggcatcctgcacagccctgccagccagagccctgagaggagcccccccctgggcggcgctgctggccacgtggcctacagcggccagctgccccctgtgcccggcctggcctatgatgcccccagccccccagcctttgccaagagccagcccaacatgtatggcctggccgcctacacagcccccctgagcagctgcctgccccagcagaagagatatgctgcccctgagtttgagccccaccccatggccagcaatggaggcggctttgccagcgccaacctgcagggcagccctgtgtatgtgggcggcaactttgtggagagcatggccccagccagcggccctgtgttcaacctgggccacctgagccaccccagcagcgcctctgtggactacagctgtgccgcccagatccctggcaaccaccaccacggcccctgtgacccccaccccacctacacagacctgagcgcccaccacagcagccagggccgcctgcctgaggcccccaagctgacccacctgtag

SEQ ID NO: 286709 - DNA, 303 bp, Artificial Sequence
  derived and/or modified sequence
atgctgtttgagcagggccagcaggccctggagctgcctgagtgcaccatgcagaaggccgcctactatgagaaccctggcctgtttggaggctacggctacagcaagaccacagacacctacggctacagcaccccccaccagccctacccacctcctgctgctgccagcagcctggacacagactacccaggcagcgcctgcagcatccagagcagcgcccccctgcgggccccagcccacaagggagctgagctgaatggcagctgcatgaggcctggcactggaaacagccagggctag

SEQ ID NO: 286710 - DNA, 1299 bp, Artificial Sequence
  derived and/or modified sequence
atgctgttcgagcagggccagcaggccctggagctgcccgagtgcaccatgcaaaaggccgcctactacgaaaacccaggactctttgggggctacggctattctaagaccacagacacctacggttacagtaccccccaccaaccctaccctccccctgctgctgccagcagcctcgacactgactacccgggcagtgcttgttctatccagtcttccgccccgctgcgggctcccgcccataaaggcgcagagttaaatgggagctgtatgagacccggaactggcaacagccaaggaggcggcggtgggagccaaccccccggtctcaattctgagcagcagccaccccaaccccctcccccaccccccacactccccccatcgtcaccaaccaacccaggcggcggtgtgcctgctaaaaaacctaaagggggccctaacgctagcagcagcagtgccaccataagcaaacagatttttccctggatgaaggagtctcggcaaaactctaagcaaaaaaactcctgcgccaccgcaggagaaagttgcgaagataagagcccccccggacccgcaagcaaacgagtgcgcaccgcttatacttccgcccaacttgtagaattagagaaagaattccacttcaatagatatctctgtagaccacgtcgggtggagatggcaaatctgttgaatctcaccgaaagacagattaagatatggtttcagaaccgacgcatgaagtacaagaaggatcagaaggctaaaggtatcctgcattcccccgcctctcagagccctgagcggtctcctcctttaggtggtgctgctgggcatgtcgcctatagcggtcagctcccacccgtaccagggctagcgtatgatgcccctagtccgccagcctttgcaaagtcccagcccaatatgtacggattagcagcttatacggccccgctgagctcttgccttccgcagcagaagcggtacgccgccccagagttcgaaccccaccctatggcatccaacggtggcggcttcgctagtgccaatctgcagggatctcccgtctatgtcgggggcaatttcgtcgagtctatggcaccggcctccgggcccgtgttcaacctcggacacctgtcacacccatcctctgcttcagtggactactcatgcgctgcacagattccaggcaatcatcaccacggtccctgcgatccccaccccacctacacagacttaagcgcccaccatagtagtcagggtcgactgccagaggcgcctaaattgactcacctgtag

SEQ ID NO: 286711 - DNA, 1299 bp, Artificial Sequence
  derived and/or modified sequence
atgctgttcgagcagggccagcaggccctggagctgcccgagtgcacaatgcagaaagcggcttactacgagaacccgggtctgtttggggggtacggatattcaaaaaccaccgatacttacggatactccacccctcaccagccttatccaccgcccgccgctgcgagctcactagatactgattatccagggtctgcttgttcaatccagtctagtgcaccactcagagctccagctcataaaggggccgaactcaatggcagttgcatgcgccccggaacagggaattcccaaggaggaggcggaggcagccagccccccgggcttaactcagagcagcagccaccccaaccccctccacccccacccaccctcccgccctcatcccctaccaatcctggaggaggcgtgcccgctaagaaaccaaagggaggacccaacgcctcttcaagctccgcaaccatcagtaagcagatcttcccttggatgaaagagagccgacagaatagtaagcagaagaattcctgtgcgacggcaggggaaagctgtgaagacaagtccccccccggtcctgcctctaagcgggtccgtacagcttacacctcagctcagctggtggagttggagaaggagttccacttcaatcgctatctctgtcggccccggcgtgtcgaaatggccaatctgctgaacctcactgagcgacagattaagatttggtttcagaatcgccgcatgaaatacaagaaagatcagaaagcaaagggcatactacatagccctgcctctcagtctcccgaacggtccccaccacttggcggcgctgctggccacgtagcctacagcggtcagttaccgccggtccctgggttagcctatgatgcgccctctccaccagcattcgccaagagtcagcctaacatgtacggccttgccgcctacactgcgcctctttcctcttgtctgcctcagcagaagaggtacgcggctccagagtttgagccacaccccatggccagcaacggtggcgggtttgccagcgccaatctgcaagggtccccggtgtacgttggaggcaactttgtcgagtccatggctccggcctctggccccgtctttaacctcggacacttgtctcaccctagctcagcctcggtcgactattcttgcgccgctcagatcccggggaatcaccatcacgggccatgcgatccccacccgacatacacggacttatccgcacatcactcctcacagggcagacttcctgaagcgcccaagctgacgcacctttag

SEQ ID NO: 286712 - DNA, 303 bp, Artificial Sequence
  derived and/or modified sequence
atgctgttcgagcagggccagcaggccctggagctgcccgagtgcaccatgcagaaggctgcttactacgagaacccgggtttgtttggcggctacggatatagtaagacaacagatacgtacggatacagtactccccaccagccatatccaccccctgcagccgcctcatccctcgacaccgactatcctgggtccgcgtgttccattcaaagtagcgcccccctgcgagcacccgcacataagggagcagaactgaacggatcctgtatgagaccaggcacaggaaattcccaaggctag

SEQ ID NO: 286713 - DNA, 1299 bp, Artificial Sequence
  derived and/or modified sequence
atgctgttcgagcagggccagcaggccctggagctgcccgagtgcacaatgcaaaaagcggcttattacgaaaatcccggccttttcggtggctatggatactccaagactaccgacacttatggctatagcactccccaccagccctacccacctcctgctgctgcgagctccttggatacagattatcccgggagcgcctgttctatacagagttctgctcctctcagagcgcctgctcacaagggtgctgaactaaatggatcatgtatgcgacctgggaccggaaactctcagggaggaggtggcgggagtcaaccccccggtctcaactctgagcaacagcctccgcagccacctccccctcctcccacactaccaccatccagtcccaccaatcctggtggtggcgttccggccaaaaagcccaaaggcggaccgaacgcctcatcatcatccgctacaatatccaagcagattttcccctggatgaaggaatctcgtcaaaattcaaagcagaagaatagttgcgcgacggccggcgaatcatgtgaggacaagtctcccccggggcccgccagcaagcgcgttcggacagcctacactagtgcgcagctcgtggaactagaaaaagaattccacttcaatcgctacctgtgccggcctcgtcgggtagagatggccaacctccttaacctgaccgagaggcagatcaagatctggtttcagaatcgcagaatgaagtacaagaaggatcagaaggccaaaggaatcttacatagtcccgcctcacagtctcctgaacgcagcccacctcttggtggagcggctgggcacgtggcctattcggggcaactgcccccagttccaggcttggcgtacgacgcgcccagccctccagctttcgcgaagtctcagccgaatatgtacggactggccgcatatacggcacctctctcctcctgcctcccccagcaaaagaggtacgcggcccccgagtttgaaccacaccctatggcctcgaacggcggaggctttgcgtccgccaacttgcagggatcacccgtttacgttggtggtaattttgtagaatccatggccccggcctctgggccagtgttcaacctgggccacctgagtcatccatcctctgcttcagtggattactcatgcgctgcccagatacctggtaaccatcaccacggcccctgcgacccccaccctacttatactgaccttagcgctcatcatagtagccaagggcgtctgccggaggccccaaagctcacgcatctgtag

SEQ ID NO: 286714 - DNA, 1299 bp, Artificial Sequence
  derived and/or modified sequence
atgctgttcgagcagggtcagcaggctctagaactgcctgaatgcacaatgcagaaggccgcatattacgagaatcctggtctcttcggcggatacggttatagtaagaccacagacacttacggatattcaactcctcatcagccctacccgcctcctgccgctgcgtccagcttggacaccgactatcctggctccgcttgcagcattcagtcctcagcaccactcagggctccagcccacaaaggtgccgagttgaacggcagctgtatgcggccaggcactggcaacagtcaagggggtggagggggtagtcagccccctggtttaaattccgagcagcagccccctcaacccccaccaccaccccctacgctgccaccctcgtctcccactaacccagggggaggggtgccagccaagaagccgaaaggaggcccaaacgcttccagctcttcggcaaccatcagcaaacagatctttccgtggatgaaggaaagccggcagaacagcaaacagaagaactcatgcgctaccgccggagagtcctgcgaggataagtcacctccaggacctgcaagtaaaagagtgcggacagcctatacgagcgcccagctggtggagctggagaaggaattccattttaaccggtacctctgccgccctaggcgggtcgaaatggcaaacctcctgaacctgactgaaagacagataaaaatatggttccaaaatcgaagaatgaagtacaaaaaggatcaaaaggctaaagggattctgcactccccggcttcccagtcgcccgagcggagtccccctttggggggagccgcagggcacgtagcctactccggacaactcccacctgtgcccggtctggcgtacgacgccccaagcccacccgcatttgcgaagagccaacccaatatgtacggcctcgcggcttacacggctccgttgagctcctgtctgccgcaacagaaaagatacgccgctccagagttcgaacctcatccaatggcttcaaatggaggcggatttgcttcggccaatctgcaaggcagccccgtctatgtaggcggtaatttcgttgagtcaatggctccagctagcgggcctgtgttcaacttagggcacctaagccatccaagctcagccagcgtggattattcttgcgcagcgcagatccctggcaaccaccaccacggaccatgcgacccacacccgacctacacggatctgagtgcccatcactcatcgcagggtcggctccccgaggctccgaaactgacacacctttag

SEQ ID NO: 286715 - DNA, 1299 bp, Artificial Sequence
  derived and/or modified sequence
atgctctttgaacaaggacagcaggccctcgagctgccagagtgcacaatgcagaaagcggcatattacgaaaaccccggactgtttgggggatatggttattccaaaacgacggacacatatggatattcgaccccccatcagccatatccacctcctgcggctgcgtctagtctggacacagattatccaggctccgcatgctccattcaaagcagcgcacccctgagagcgccagcacacaaaggggcagagttaaatgggagttgtatgcgtccaggtacagggaacagccaaggtgggggtggaggaagccagccacctggcttgaactctgaacagcagccccctcagccccctccacccccacccaccctgccaccaagttcacccaccaatcccggtggcggtgtgcccgctaagaagcccaaagggggtcccaacgcatcttcatcatcagctaccatctcgaagcagatcttcccctggatgaaggaatctcggcagaacagcaaacagaagaacagctgcgctacagccggagagagctgcgaggataaatccccacccggaccggcttcaaagcgagtgcgcactgcttatacttctgctcagcttgtcgagctcgagaaagaattccactttaaccgatacctctgccgccctcgcagagtcgagatggctaatctgcttaacctgaccgaacgacagatcaaaatctggttccagaatcgaaggatgaagtacaagaaggaccagaaagcgaaaggtatccttcacagcccagctagccagtctccagagagatctccaccattaggcggagccgcagggcatgtggcttactcagggcagttgccccctgtacctggactggcctatgatgccccatccccacccgcattcgcaaagtcacagcctaacatgtatggattggctgcctatacggctcctttgtcctcttgtctcccacagcagaagcggtacgctgcacccgaatttgagccacatccaatggcttccaacggcggtgggtttgccagcgccaatctgcagggctcccctgtttacgtcgggggtaacttcgtggaatcgatggccccagcgagcgggcctgtgtttaacctgggacacctcagccacccatcctcagcctcagttgactattcctgcgccgcacagatccccggaaatcaccaccacgggccttgtgatcctcaccccacatacacagatttatcggcacatcactctagccagggtagactgcctgaggcccctaagctcacccacctgtag

SEQ ID NO: 286716 - DNA, 303 bp, Artificial Sequence
  derived and/or modified sequence
atgttgttcgagcagggtcaacaggccttggagcttccagagtgtaccatgcagaaagctgcatattacgaaaaccctgggttgtttggaggatatggatactctaaaactactgacacctacggctactctactccccaccaaccttaccccccaccagccgcagcaagctctctcgacaccgactatcccggtagtgcttgctcgatccagtcaagtgccccactccgagctcccgctcataaaggagccgagctgaacggcagctgtatgaggccgggaacggggaattcccaaggatag

SEQ ID NO: 286717 - DNA, 1299 bp, Artificial Sequence
  derived and/or modified sequence
atgctctttgaacaaggacagcaggcccttgaacttcctgaatgcactatgcagaaggctgcctactacgaaaaccccggtctgtttggcggttacggatactctaagactactgatacctacggctatagcactcctcaccagccgtatccccctccggcagcagccagctccctggacaccgattaccccggatcagcttgcagcatccagtcttctgcgcctctgcgggctccggctcataagggtgcagagttgaatggcagttgtatgagaccaggaaccggcaatagccagggaggcggtggaggcagccagccaccaggcctgaatagcgaacaacagccaccccagccaccacccccacccccaactttaccgccttcaagtcccacaaaccctggtgggggtgtccccgctaagaagccaaaagggggacccaatgcgtcttctagtagcgcaactattagcaagcagatttttccgtggatgaaggagtctcgtcaaaactcaaaacaaaaaaattcttgtgcaacggcaggagaatcctgcgaggataagagtccgcctgggcctgcatccaagcgcgtacgtacagcctatactagcgctcagctggtcgaactcgagaaagaatttcattttaatcgatatctttgccggccaaggcgagtcgaaatggccaacctcctgaaccttaccgagagacaaatcaaaatctggtttcagaacaggcgaatgaagtacaagaaagaccagaaggctaagggcattctgcactccccagccagccagagccccgagaggtctccacctctaggcggagccgctggccacgtagcatattccggccagctgcctccggttcccggactcgcgtacgacgcccctagccctcccgcatttgcgaaaagccagccaaacatgtatggcctggctgcatacaccgccccactctcttcctgcctgccgcagcagaagcgttacgccgctcctgaattcgagcctcaccccatggcatcaaatggtggcggattcgcctcagccaacttgcaggggtctccggtatatgtggggggtaactttgtggagtcgatggctccagccagcggcccagtctttaacctcggccaccttagccatccatcctccgctagtgttgactacagttgtgctgctcagattccaggcaatcatcaccacggaccatgtgatccccatcccacatacactgaccttagtgcccatcactcgagccagggtcgcttgcctgaggcacctaaactcacacacctctag

SEQ ID NO: 286718 - DNA, 1299 bp, Artificial Sequence
  derived and/or modified sequence
atgctgttcgagcagggccagcaggccctggagctgcccgagtgcaccatgcagaaggccgcctactacgagaaccccggcctgttcggcggctacggctacagcaagaccaccgacacctacggctacagcaccccccaccagccctaccccccccccgccgccgccagcagcctggacaccgactaccccggcagcgcctgcagcatccagagcagcgcccccctgagagcccccgcccacaagggcgccgagctgaacggcagctgcatgagacccggcaccggcaacagccagggcggcggcggcggcagccagccccccggcctgaacagcgagcagcagcccccccagccccccccccccccccccaccctgccccccagcagccccaccaaccccggcggcggcgtgcccgccaagaagcccaagggcggccccaacgccagcagcagcagcgccaccatcagcaagcagatcttcccctggatgaaggagagcagacagaacagcaagcagaagaacagctgcgccaccgccggcgagagctgcgaggacaagagcccccccggccccgccagcaagagagtgagaaccgcctacaccagcgcccagctggtggagctggagaaggagttccacttcaacagatacctgtgcagacccagaagagtggagatggccaacctgctgaacctgaccgagagacagatcaagatctggttccagaacagaagaatgaagtacaagaaggaccagaaggccaagggcatcctgcacagccccgccagccagagccccgagagaagcccccccctgggcggcgccgccggccacgtggcctacagcggccagctgccccccgtgcccggcctggcctacgacgcccccagcccccccgccttcgccaagagccagcccaacatgtacggcctggccgcctacaccgcccccctgagcagctgcctgccccagcagaagagatacgccgcccccgagttcgagccccaccccatggccagcaacggcggcggcttcgccagcgccaacctgcagggcagccccgtgtacgtgggcggcaacttcgtggagagcatggcccccgccagcggccccgtgttcaacctgggccacctgagccaccccagcagcgccagcgtggactacagctgcgccgcccagatccccggcaaccaccaccacggcccctgcgacccccaccccacctacaccgacctgagcgcccaccacagcagccagggcagactgcccgaggcccccaagctgacccacctgtag

SEQ ID NO: 286719 - DNA, 303 bp, Artificial Sequence
  derived and/or modified sequence
atgctgttcgagcagggccagcaggccctggagctgcccgagtgcaccatgcagaaggccgcctactacgagaaccccggcctgttcggcggctacggctacagcaagaccaccgacacctacggctacagcaccccccaccagccctaccccccccccgccgccgccagcagcctggacaccgactaccccggcagcgcctgcagcatccagagcagcgcccccctgagagcccccgcccacaagggcgccgagctgaacggcagctgcatgagacccggcaccggcaacagccagggctag

SEQ ID NO: 286720 - DNA, 4401 bp, Artificial Sequence
  derived and/or modified sequence
agtctccttgtgcgatctcccagacatgagagccctgctgggctttctggctcctcctccgtgcagagttgtcccgtcaggagccaggaggggcgacgctggctccgtgggagggtgaacagtggctcaagatgagaagcgtattgagacaaagaattctgaaaccgaaagatgtggccatttattctggagaagtcaaccaagttattgctgacttaattaaaagaatctacctcctcaggagccaggcagaagatggagaaaccgtgaccaatgtcaatgatcttttcttcaaatattcaatggaaggagtggccaccatcctttatgagagtcgtttgggctgcctggaaaacagcatcccacagctgactgtggaatacatcgaggccctggagctcatgtttagcatgttcaagacctccatgtatgcaggcgccatccccagatggcttcgccccttcatcccaaagccctggcgggaattctgcaggtcctgggatggactcttcaaattcagccaaattcatgttgacaacaagttgagggacatacagtaccaaatggaccgaggccggagggtgagcgggggacttctcacatacctcttccttagccaggctctgacgctgcaggagatctacgccaacgtgactgagatgctgctggccggcgtcgacacgacgtccttcaccttgtcttggactgtgtacctcctggcaaggcacccagaagtgcagcagacggtgtaccgggagattgtgaagaatttaggggaaaggcatgttccaactgcagctgatgtccccaaggtcccgctggtcagagctctccttaaggaaaccctgaggctgtttccagtgctgccagggaacggccgggtcacccaggaagacctggttattggcgggtatctgattccgaaaggcacccagctggccctttgccactatgccacatcgtaccaggatgagaacttccctcgggccaaggagttccggcctgagcgctggctgcggaaaggagacttagatagagttgacaattttggatccatcccctttggtcatggggttcgcagctgcatagggcggagaattgcagaactggagattcacctcgtcgtgatccagttgcttcaacattttgagatcaaaacatcttctcagaccaatgctgttcatgcaaaaacccacgggctcctgacgccaggggggcccatccacgtgcgatttgttaacagaaagtaagcctagattttaaacctgggctgatgtagcagaccagctcgccgacacacagtgggtatttgtgttcgctgatcaccgtggagaaggaaagcgatgtcgctaaaggctgtcttgttatagactggcctcccaggtcctgggacacttgtaaatctttatgcaaagtaatgtaaaaaggttgctattttactggtgcataccagaagttgccctttctttgggggaaacagctgtttaaaaaccagtggcagtgaatttttatgcttcatacattgtgctagactcaatatttaatgactggcagtatcctgtgcatttacttgtacagggaaatggtggtttacttacaaattcagttcttcaatatatgttctctaatactggcatctgggctcaaattgccatcaacagtaagttgaaggcaatttcaacttactgtttctaatttgaagagggaacattaagaatgcctctgtaatactgtaattatgggaagaaagcaccagaggcaacattttatcctgagcaccagatttagatcctgttaaagggctcaaacttaaaagggctggccgggtgcggtggctcacgcctgtaatcccagcactttgggaggtcaaggtgggaggattgcttgagccagaagttcgagaccagcctgagcaacatggtgaaaccctgtctctaccaaaaatacaaaaattagccgggcgtggtggtgcacacctatggtcctagttactcggaagactgaggcaggaggatcgtttgagctcaggaggttgggtctgcagtgagctatctatgatggcaccactgcacttcagcctgggtgacagagtgagaccctttctcaaaaataaaataaaataaaataaaataaaataaaataaaataaaatggctgtataagaatacttttctctccacaacgagtgcttaattttctagtcataatgcctaatgaagttgactattagtttttatttggaagaaataaataataaataaataataaataaataaaaaagaaagctcctggtgaaatcaagaataatcagattttctaaccaaatctaaatacagagtagagcagacgtataagaactggaaatatgatgacgtaaaattttgttgcctaagttgtgagaagtaataaaacaggcagcatggaaaacaatgtaactttagaacatttttatttcaagggaaaataaatacataaatagagatgctacagatacaacaatatttttatcttgatggtgttgttttaaatatccacacaagaaccctcacccagttgtgtgcctgtgccaggctctctgggaagccgtggctccgggagtgctgggtcctgaggagttctgttgcctttcctgctgctcaccggttgctaagaggaaacaccgtgatttcctgatgctcttgccttgtcatcatgcctgaaacagcttattcccaattctgtaattccttttacataatccttctccaaaaattactttcttactaatatagaccatacagttttttttccatttagtaagtcactctgcaaaataacccttaagtaaatagacataatatccatttcacataccatttttgttaaagtatataataaagttgaaatctctgtgtggtagcagaataactctagtatgaatgctgtaaatgtacaggtaaatgtgaaattaggtcatattaactggccaagtgttggattgattactttgaggtagcagtatacgtatattaagttttataaactagatgaaattgcattctgtttgagactgaaatttaaaaatattgagaataactaagcgacttgaagtgacctcttattccctgggtatacatacagtgtgaccctctcgtgaagtgtggctctgcctggggatcagcacagggtgaatagcaaagtgcgggctgggggtagcacctgtgcccgctgctgagtctcactgaacaggaagggaagcagccagacacgggggcctcctggtgtgatgtagcaggaagtgcagggcgccacccaggaagcatccacgccaaagaaatggagattcagctggacaagtttctaggttcgctactggtttataggaaatatgtggtatacagggagatgtcaaaactccatgggggctgggcgtggtggctcacacctgtaatttcagcactctggggaggttgaggcaggaggattgcttgaggccaggagtttgagacaagcttgggcaacacagtgagatcctgtctactaaaaatcaaaaaacttagctgagtgtggtggtgcatgcctgtagtcctagctatttgggaggctgaggctggaggattgcttaagtctgggaggttgaggctgcagtgagctgtgatccgccattacactccagcctgggtgacagagcaagacttcataacaaacaaacacacaaacaaactccatggggatgcagtcagcaaaatccagaatagagtgaggtctataggaccaatgtctcgggtttccaacaaaacaaatacgtgacaggcaaaaaacaagaggaggggccaggcgaggtggctcatgcctgtaatcccagcactttgggaggccaaggcgggcggataacctgaggtcaggggttccagaccagcctggccaacatggtgaaaccccatctctactaaaaatacagaaattatccaggcatggtggcgggcttctgtaattccagctacttgggaggctgaggcaggagaattgcttgaacctgggaggcagtttgcagtgagctgagatcacgccactgcactccacctgggcaacaagaacgaaactccgtatctaaaaaaaacaaaaaccaaaaagcaaaaaaaaaaccaaggggagaggagaactgttacagatgaagcaatataggagacatattaaccaagtacaatgctggacttcgtttgaatcagattcaaataaaccacttgtaaaaagacatttaagagataatttttaaaaataaaataaaagccaaaaatattaattcttccaatgcatgaaaaaaagagagcaactcggggaaatttgaatgctgactgtgtgtatttgatgatatttgggaattactgttaatttttttgttgtgataatggtagttatgttt

SEQ ID NO: 286721 - protein, 689 aa, Artificial Sequence
  derived and/or modified sequence
MFTMTRAMEEALFQHFMHQKLGIAYAIHKPFPFFEGLLDNSIITKRMYMESLEACRNLIPVSRVVHNILTQLERTFNLSLLVTLFSQINLREYPNLVTIYRSFKRVGASYEWQSRDTPILLEAPTGLAEGSSLHTPLALPPPQPPQPSCSPCAPRVSEPGTSSQQSDEILSESPSPSDPVLPLPALIQEGRSTSVTNDKLTSKMNAEEDSEEMPSLLTSTVQVASDNLIPQIRDKEDPQEMPHSPLGSMPEIRDNSPEPNDPEEPQEVSSTPSDKKGKKRKRCIWSTPKRRHKKKSLPGGTASSRHGIQKKLKRVDQVPQKKDDSTCNSTVETRAQKARTECARKSRSEEIIDGTSEMNEGKRSQKTPSTPRRVTQGAASPGHGIQEKLQVVDKVTQRKDDSTWNSEVMMRVQKARTKCARKSRLKEKKKEKDICSSSKRRFQKNIHRRGKPKSDTVDFHCSKLPVTCGEAKGILYKKKMKHGSSVKCIRNEDGTWLTPNEFEVEGKGRNAKNWKRNIRCEGMTLGELLKRKNSDECEVCCQGGQLLCCGTCPRVFHEDCHIPPVEAKRMLWSCTFCRMKRSSGSQQCHHVSKTLERQMQPQDQLIRDYGEPFQEAMWLDLVKERLITEMYTVAWFVRDMRLMFRNHKTFYKASDFGQVGLDLEAEFEKDLKDVLGFHEANDGGFWTLP

SEQ ID NO: 286722 - DNA, 2070 bp, Artificial Sequence
  derived and/or modified sequence
atgttcaccatgaccagagccatggaggaggccctgttccagcacttcatgcaccagaagctgggcatcgcctacgccatccacaagcccttccccttcttcgagggcctgctggacaacagcatcatcaccaagagaatgtacatggagagcctggaggcctgcagaaacctgatccccgtgagcagagtggtgcacaacatcctgacccagctggagagaaccttcaacctgagcctgctggtgaccctgttcagccagatcaacctgagagagtaccccaacctggtgaccatctacagaagcttcaagagagtgggcgccagctacgagtggcagagcagagacacccccatcctgctggaggcccccaccggcctggccgagggcagcagcctgcacacccccctggccctgccccccccccagcccccccagcccagctgcagcccctgcgcccccagagtgagcgagcccggcaccagcagccagcagagcgacgagatcctgagcgagagccccagccccagcgaccccgtgctgcccctgcccgccctgatccaggagggcagaagcaccagcgtgaccaacgacaagctgaccagcaagatgaacgccgaggaggacagcgaggagatgcccagcctgctgaccagcaccgtgcaggtggccagcgacaacctgatcccccagatcagagacaaggaggacccccaggagatgccccacagccccctgggcagcatgcccgagatcagagacaacagccccgagcccaacgaccccgaggagccccaggaggtgagcagcacccccagcgacaagaagggcaagaagagaaagagatgcatctggagcacccccaagagaagacacaagaagaagagcctgcccggcggcaccgccagcagcagacacggcatccagaagaagctgaagagagtggaccaggtgccccagaagaaggacgacagcacctgcaacagcaccgtggagaccagagcccagaaggccagaaccgagtgcgccagaaagagcagaagcgaggagatcatcgacggcaccagcgagatgaacgagggcaagagaagccagaagacccccagcacccccagaagagtgacccagggcgccgccagccccggccacggcatccaggagaagctgcaggtggtggacaaggtgacccagagaaaggacgacagcacctggaacagcgaggtgatgatgagagtgcagaaggccagaaccaagtgcgccagaaagagcagactgaaggagaagaagaaggagaaggacatctgcagcagcagcaagagaagattccagaagaacatccacagaagaggcaagcccaagagcgacaccgtggacttccactgcagcaagctgcccgtgacctgcggcgaggccaagggcatcctgtacaagaagaagatgaagcacggcagcagcgtgaagtgcatcagaaacgaggacggcacctggctgacccccaacgagttcgaggtggagggcaagggcagaaacgccaagaactggaagagaaacatcagatgcgagggcatgaccctgggcgagctgctgaagagaaagaacagcgacgagtgcgaggtgtgctgccagggcggccagctgctgtgctgcggcacctgccccagagtgttccacgaggactgccacatcccccccgtggaggccaagagaatgctgtggagctgcaccttctgcagaatgaagagaagcagcggcagccagcagtgccaccacgtgagcaagaccctggagagacagatgcagccccaggaccagctgatcagagactacggcgagcccttccaggaggccatgtggctggacctggtgaaggagagactgatcaccgagatgtacaccgtggcctggttcgtgagagacatgagactgatgttcagaaaccacaagaccttctacaaggccagcgacttcggccaggtgggcctggacctggaggccgagttcgagaaggacctgaaggacgtgctgggcttccacgaggccaacgacggcggcttctggaccctgccctag

SEQ ID NO: 286723 - DNA, 2070 bp, Artificial Sequence
  derived and/or modified sequence
atgtttaccatgacccgcgccatggaggaggccctttttcaacattttatgcaccagaaactaggcatcgcttacgcgatccacaaaccctttccgtttttcgaggggctgttagataatagtatcatcacaaagcggatgtacatggagagcctggaagcctgccgtaatctgatccctgttagccgcgtcgttcacaacatcctaacccagctggaacggaccttcaacctgtcactgctagttaccttgttctcgcaaattaacttgcgggaatatccaaatctagtgacaatttatagatcttttaaacgagtcggtgcttcctatgagtggcagagcagggacactcccatactgttggaagctccgactgggttggccgaaggcagttcccttcatacaccattggccctcccccctccacagccacctcagccgtcctgcagtccatgcgcacctcgggtgtccgaacctgggacgagtagccaacagtctgatgagatactgtcggaaagcccatcgccttccgatcctgtgcttcccctgcctgccctgatacaagaaggtcggtccaccagtgtgaccaatgataagctgacatccaagatgaacgcagaggaggacagcgaggaaatgccttccttactcacttccaccgtccaggtcgcttcagataacctgatcccccagatcagggacaaagaggatccacaggagatgccccattctcccctaggttcaatgccggagattcgggacaacagtccggagccaaatgatcccgaagagcctcaggaggtttctagcacaccctcggataagaaaggcaaaaagcgaaaacggtgcatctggagtacaccgaaacggcgccataagaagaaatcattgcccggggggacagctagtagtcgtcacggcatccagaagaagctaaaaagggtcgatcaggtgcctcaaaagaaagacgattccacttgcaactcgactgtggagacgagagcccagaaagccaggacagaatgtgcgaggaagagccggtccgaggagatcatcgacggaacctcagagatgaatgagggcaagcgatcccaaaagactccctcaacgcctaggcgggttacccagggggcggcaagtcccggacatggcatacaggagaagctccaagtggtggacaaagtgacccaaaggaaagacgatagcacatggaacagcgaagtgatgatgcgcgtccaaaaggcaagaaccaagtgtgcacgcaagagccgactgaaggagaaaaagaaggaaaaggacatctgctcttctagtaagagacggttccaaaagaatatccaccgtcggggcaagccgaaatccgatacagtggactttcattgtagcaaactgcccgtaacgtgcggagaggctaaggggatcttatacaagaaaaagatgaagcacggctcgagtgtgaaatgcatccgcaacgaggacgggacttggctgaccccaaatgaattcgaggttgaaggcaaaggtcggaatgcaaagaattggaaacgcaacatcagatgcgaagggatgacccttggggagcttctgaaacgtaaaaatagcgatgaatgtgaggtttgctgccagggagggcagctactttgttgcggcacgtgtccacgcgtttttcacgaggactgtcacatcccacccgtagaagctaaacgaatgctatggtcgtgcactttctgcaggatgaagaggtctagcggctctcaacaatgtcatcatgtgtcgaagacacttgagaggcagatgcaaccacaggaccaactgatacgggattatggggagccatttcaagaggctatgtggcttgacctcgtaaaggagagattgatcactgaaatgtatactgtagcgtggttcgttcgcgatatgcgacttatgttccggaatcataaaacattctacaaagccagcgattttggacaggtgggcctcgacctggaggcggaattcgagaaggacttgaaagacgtcctgggattccacgaagccaacgatgggggtttttggaccttgccatag

SEQ ID NO: 286724 - DNA, 2070 bp, Artificial Sequence
  derived and/or modified sequence
atgttcaccatgacccgggccatggaggaggccctcttccagcacttcatgcaccagaagctgggcatcgcctatgccatccacaagcccttccccttctttgagggcctgctggacaacagcatcatcaccaagaggatgtacatggagagcctggaggcctgcaggaacctgatccctgtgtcccgggtggtgcacaacatcctgacccagctggagaggaccttcaacctgagcctgctggtgaccctcttcagccagatcaacctgcgggagtaccccaacctggtgaccatctaccgctccttcaagagggtgggcgccagctatgagtggcagagccgggacacccccatcctgctggaggcccccaccggcctggccgagggcagcagcctgcacacccccctggccctgcccccaccccagcccccccagcccagctgcagcccctgtgccccccgggtgtctgagcccggcaccagcagccagcagagtgatgagatcctgtctgagagccccagccccagcgaccctgtgctgcccctgcctgccctgatccaggagggccgcagcacctctgtgaccaatgacaagctgaccagcaagatgaatgctgaggaggacagcgaggagatgcccagcctgctgaccagcacagtgcaggtggccagtgacaacctgatcccccagatccgggacaaggaggacccccaggagatgccccacagccccctgggctccatgcctgagatccgggacaacagccctgagcccaatgaccctgaggagccccaggaggtgagcagcacccccagcgacaagaagggcaagaagaggaagcgctgcatctggagcacccccaagaggaggcacaagaagaagagcctgcccggcggcacagccagcagccgccacggcatccagaagaagctgaagagggtggaccaggtgccccagaagaaggatgacagcacctgcaacagcacagtggagacccgggcccagaaggccaggacagaatgtgccaggaagagccgctctgaggagatcattgatggcaccagcgagatgaatgaaggcaagaggagccagaagacccccagcaccccccggcgggtgacccagggcgccgccagccctggccacggcatccaggagaagctgcaggtggtggacaaggtgacccagaggaaggatgacagcacctggaacagcgaggtgatgatgagggtgcagaaggcccggaccaagtgtgccaggaagagccggctgaaggagaagaagaaggagaaggacatctgcagcagcagcaagaggcgcttccagaagaacatccaccggcggggcaagcccaagagtgacacagtggacttccactgcagcaagctgcctgtgacctgtggggaggccaagggcatcctgtacaagaagaagatgaagcacggcagctctgtgaagtgcatcagaaatgaagatggcacctggctgaccccaaatgaatttgaggtggagggcaaaggaagaaatgccaagaactggaagaggaacatccgctgtgagggcatgaccctgggggagctgctgaagaggaagaacagtgatgaatgtgaggtgtgctgccagggcggccagctgctgtgctgcggcacctgccccagggtcttccacgaggactgccacatcccccctgtggaggccaagaggatgctgtggagctgcaccttctgcaggatgaagaggagcagcggcagccagcagtgccaccacgtgtccaagaccctggagcggcagatgcagccccaggaccagctgatccgggactatggagagcccttccaggaggccatgtggctggacctggtgaaggagcggctcatcacagagatgtacacagtggcctggtttgtgcgggacatgaggctgatgttcaggaaccacaagaccttctacaaggccagtgactttggccaggtgggcctggacctggaggccgagtttgagaaggacctgaaggatgtgctgggcttccacgaggccaatgatggcggcttctggaccctgccctag

SEQ ID NO: 286725 - DNA, 2070 bp, Artificial Sequence
  derived and/or modified sequence
atgttcaccatgacccgggccatggaggaggccctgttccagcactttatgcaccagaagcttggcatcgcttacgccatacataagccgttccctttcttcgagggactgctagacaactccattattacaaagcgaatgtacatggagtcgctggaggcctgccgaaatttgatcccagtttcccgcgttgtgcacaacattttaacacagctagagaggacctttaacctcagcctgctggttaccctattctcccagattaacctccgcgaatatcctaatctggtgaccatctacagatctttcaagcgtgttggcgcttcttacgaatggcagtctagagatacgccgattttgcttgaggcccctaccggcttagcagagggtagcagcctgcacaccccattggccctgccccctccgcaaccaccgcaaccctcctgtagtccctgcgcgccccgggtatccgaaccagggacttcttcacagcagtctgatgaaatcctatccgagtctccaagcccatcagacccggttctgcccttgccagctttaatccaggagggaagatccactagcgtgaccaatgacaagctgacatccaagatgaatgcggaagaggattccgaagaaatgccaagcttacttacgagtacggtgcaggtggcttccgataacctgattccccaaatcagagataaggaagatccacaggagatgccacattctcccctgggcagcatgccagaaattcgggataattccccagaacctaacgatcccgaagagccccaggaggtctcttccaccccaagcgataaaaaagggaaaaagcgtaaaaggtgcatctggtcaacccctaaaaggcggcacaagaagaaatcgttgcccggcggaactgcatcttctcgtcacggaattcagaagaaactcaagcgagtggaccaagtgcctcagaagaaggacgattcaacatgtaattctaccgtcgaaactagagcccaaaaggcccggacagagtgcgcacgcaaatcacgaagcgaggagattatcgacggtacaagcgaaatgaatgaaggaaaacggtcccagaaaacaccatccacccctcgcagagttacccaaggagctgcgtcccctggccacgggatacaggaaaaacttcaggtagtcgacaaggtgactcagagaaaagatgatagcacatggaactctgaagttatgatgagggtgcaaaaggcacgtacaaaatgtgcgcggaagtcaaggctgaaggaaaagaagaaggagaaggacatctgctctagcagtaaacgccgtttccagaagaatattcaccgaaggggcaagcccaagagcgacactgtcgacttccattgttctaagctgcccgtgacttgcggggaggccaaggggatcttgtataaaaaaaagatgaaacacggaagcagcgtgaagtgtatccgtaatgaagatggaacgtggctgactcctaatgaattcgaagttgagggcaagggtcgcaatgctaagaactggaagcgcaacatccgatgcgagggtatgactctcggtgagctccttaagcgaaagaatagtgatgaatgcgaggtctgttgtcaggggggacagctgttgtgttgtggcacctgcccaagggtgtttcacgaagactgtcatataccgccggtcgaagcaaaaagaatgctgtggtcctgcaccttttgtaggatgaaacgtagctcagggagtcagcagtgtcatcatgtgagtaagactctcgagaggcagatgcagccgcaggaccagttgataagagactatggggagcctttccaagaggccatgtggctggaccttgtcaaagaaagactgattactgagatgtatactgtcgcctggtttgtccgggatatgcgcctgatgttccgcaatcataagacattttacaaggccagtgatttcggacaggtaggcctagaccttgaggcagagtttgagaaggaccttaaggacgtgctgggatttcatgaggctaatgacggtggtttctggacacttccatag

SEQ ID NO: 286726 - DNA, 2070 bp, Artificial Sequence
  derived and/or modified sequence
atgttcactatgacccgggcaatggaagaagctctgttccagcactttatgcatcagaagttgggaatcgcatatgccattcacaagccatttcctttttttgaaggactcctggacaacagtattatcacaaagagaatgtatatggagagcctcgaggcctgccggaatctcatcccagtgtctagggtggtacacaacatcctgactcagttggagcgcacattcaatctttcactattggtgaccctgttctcccaaatcaacctccgcgaatatcctaatctggtgacaatctaccgctcattcaaacgtgtcggcgcatcttacgagtggcagtcacgcgatacccccatcttgctggaggcccctactggccttgccgagggcagcagcttgcacacacctctggctctgccacctcctcagccgcctcagccttcttgttcaccctgcgccccacgcgtgtccgagccaggcacctcaagccagcaatcggacgagattctttccgaaagccctagcccttcagacccagttttgccgcttcccgcactgatacaagagggtcgcagtacaagtgttactaatgataagctgaccagcaagatgaatgccgaggaggattcagaggagatgcctagcctgttgacgtcaactgtgcaggtagctagcgataatctgatacctcagatcagagataaagaggatccccaggaaatgcctcattctcccctggggagcatgcctgagattcgtgacaatagtccagaacctaatgatccagaggaaccacaggaagttagcagcaccccctcagacaaaaaagggaaaaagagaaagcggtgtatctggtccactcctaagcggaggcacaagaagaagtcgctgccgggtggcaccgcgtcttcacgccacggtatccagaagaaactcaaacgggtcgatcaggtcccccagaagaaggacgacagtacttgtaactccacagtagaaactagggcacaaaaagccagaacggaatgtgctcgaaaaagtcgatccgaggagatcattgacggaacatccgaaatgaacgagggaaagaggagccaaaagaccccatccacacccagacgcgttacccagggagctgccagccccggacatggcatccaggagaagctccaagtggttgacaaggttacacagcgcaaggatgactctacttggaacagcgaagtgatgatgagggtccaaaaagccagaacaaaatgtgctcgcaagagccggttaaaagagaaaaaaaaggagaaagacatttgctcgtcgtctaagcgacgctttcagaaaaacatccaccgccgtggcaaacctaaaagcgataccgtggatttccactgttccaaacttccagtgacttgcggtgaggccaagggtattctctacaagaagaaaatgaagcacggctctagtgtgaaatgcattcggaatgaggatggaacctggctgacgcctaacgagtttgaggtggagggaaaagggagaaatgccaagaattggaagcgtaatattcgctgcgaagggatgacactcggggagttgctgaaacgcaagaacagcgacgagtgtgaggtctgctgccagggcggacaactgctctgttgtggaacatgtccgagagtgtttcacgaggactgtcacatccctcctgtggaagccaagagaatgctgtggtcatgtacgttctgcagaatgaagagatcgtcaggaagtcagcagtgccatcacgtatcgaaaacattggaaagacaaatgcaacctcaggaccagctaatccgggactatggcgaaccgttccaggaggccatgtggctggatttggtcaaagagaggcttatcaccgagatgtacactgtggcctggttcgtcagggacatgcggctgatgttccgtaaccataaaacattctacaaagcatccgatttcgggcaagtcggtctggacctcgaggcggaatttgagaaggaccttaaggacgttctcggctttcacgaagctaacgacgggggattctggacactcccttag

SEQ ID NO: 286727 - DNA, 2337 bp, Artificial Sequence
  derived and/or modified sequence
tgtaactctcccaatcttgaggagtgatccctgtcccagcccctggaaaggggcaggaacgacaaactcaaagtccaggatgttcaccatgacaagagccatggaagaggctctttttcagcacttcatgcaccagaagctggggatcgcctatgccatacacaagccatttcccttctttgaaggcctcctagacaactccatcatcactaagagaatgtacatggaatctctggaagcctgtagaaatttgatccctgtatccagagtggtgcacaacattctcacccaactggagaggacttttaacctgtctcttctggtgacattgttcagtcaaattaacctgcgtgaatatcccaatctggtgacgatttacagaagcttcaaacgtgttggtgcttcctatgaatggcagagcagagacacaccaatcctacttgaagccccaactggcctagcagaaggaagctccctccataccccactggcgctgcccccaccacaaccccctcaaccaagctgttcaccctgtgcgccaagagtcagtgagcctggaacatcctcccagcaaagcgatgagatcctgagtgagtcgcccagcccatctgaccctgtcctgcctctccctgcactcatccaggaaggaagaagcacttcagtgaccaatgacaagttaacatccaaaatgaatgcggaagaagactcagaagagatgcccagcctcctcactagcactgtgcaagtggccagtgacaacctgatcccccaaataagagataaagaagaccctcaagagatgccccactctcccttgggctctatgccagagataagagataattctccagaaccaaatgacccagaagagccccaggaggtgtccagcacaccttcagacaagaaaggaaagaaaagaaaaagatgtatctggtcaactccaaaaaggagacataagaaaaaaagcctcccaggagggacagcctcatctagacacggaatccaaaagaagctcaaaagggtggatcaggttcctcaaaagaaagatgactcaacttgtaactccacggtagagacaagggcccaaaaggcgagaactgaatgtgcccgaaagtcgagatcagaggagatcattgatggcacttcagaaatgaatgaaggaaagaggtcccagaagacgcctagtacaccacgaagggtcacacaaggggcagcctcacctgggcatggcatccaagagaagctccaagtggtggataaggtgactcaaaggaaagacgactcaacctggaactcagaggtcatgatgagggtccaaaaggcaagaactaaatgtgcccgaaagtccagattgaaagaaaagaaaaaggagaaagatatctgttcaagctcaaaaaggagatttcagaaaaatattcaccgaagaggaaaacccaaaagtgacactgtggattttcactgttctaagctccccgtgacctgtggtgaggcgaaagggattttatataagaagaaaatgaaacacggatcctcagtgaagtgcattcggaatgaggatggaacttggttaacaccaaatgaatttgaagtcgaaggaaaaggaaggaacgcaaagaactggaaacggaatatacgttgtgaaggaatgaccctaggagagctgctgaagcggaaaaactcggatgaatgcgaggtgtgctgtcaagggggacaacttctctgctgcggtacttgtccacgagtcttccatgaggactgtcacatcccccctgtggaagccaagaggatgctgtggagttgcaccttctgcaggatgaagaggtcttcaggaagccaacagtgccatcatgtatctaagaccctggagaggcagatgcagcctcaggaccagctgattcgagattacggtgagccctttcaggaagcaatgtggttggacctggttaaggaaaggctgattacggaaatgtacacggtggcatggtttgtgcgagacatgcgcctgatgtttcgcaaccataaaacattttacaaggcttctgactttggccaggtaggacttgacttagaggcagaatttgaaaaagatctcaaagacgtgctcggttttcatgaagccaatgacggcggtttctggactcttccttgaccctgttctgtaaagactgaagcatccccacctcaggattcagctgatgggaccctggcttggactgttgattgccagtgagtctgggatgtaattggctgccctcaggacccaaacccagacacttcataggattatcacaccctccatctttattctttctttttacctttaaaagtctatatcta

SEQ ID NO: 286728 - protein, 101 aa, Artificial Sequence
  derived and/or modified sequence
MFTMTRAMEEALFQHFMHQKLGIAYAIHKPFPFFEGLLDNSIITKRMYMESLEACRNLIPVSRVVHNILTQLERTFNLSLLVTLFSQINLREYPNLVTIYR

SEQ ID NO: 286729 - protein, 1778 aa, Artificial Sequence
  derived and/or modified sequence
MDDKEPKRWPTLRDRLCSDGFLFPQYPIKPYHLKGIHRAVFYRDLEELKFVLLTRYDINKRDRKERTALHLACATGQPEMVHLLVSRRCELNLCDREDRTPLIKAVQLRQEACATLLLQNGADPNITDVFGRTALHYAVYNEDTSMIEKLLSYGANIEECSEDEYPPLFLAVSQRKVKMVEFLLKKKANINAVDYLGRSALIHAVTLGEKDIVILLLQHNIDVFSRDVYGKLAEDYASEAKNRVIFELIYEYERKKHEELSINSNPVSSQKQPALKATSGKEDSISNIATEIKDGQKSGTVSSQKQPALKGTSDKNDSVSNTATEIKDEQKSGTVSSQKQPALKDTSDKNDSVSNTATEIKDEQKSGTVLPAVEQCLNRSLYRPDAVAQPVTEDEFALESEIISKLYIPKRKIISPRSIEDVLPPVEEAVDRCLYLLDRFAQAVTKDKFALESENISEPYFTNRRTISQQSAEKLDAACGIDKTENGTLFEDQNVDKEGKALPATGQKANVSPEQPPLFTHTVKDSDHISTRFLGSMDSLTSSEESSERPPLSTLTLKEADPSSKAAMRRKDSPPPGKVSSQKQPAEKATSDDKDSVSNIATEIKEGPISGTVSSQKQPAEKATSDEKDSVSNIATEIKEGQQSGTVSPQKQSAWKVIFKKKVSLLNIATRITGGGKSGTVSSQKQPPSKATSDKTDSALNIATEIKDGLQCGTVSSQKQPALKATTDEEDSVSNIATEIKDGEKSGTVSSQKQPALKATTDEEDSVSIIATEIKDGEKSGTVSSRKKPALKATSDEKDSFSNITREKKDGEISRTVTSEKPAGLKATSDEEDSVLNIARGKEDGEKTRRVSSRKKPALKATSDEKDSFSNITREKKDGETSRTVSSQKPPALKATSDEEDSVLNIAREKKDGEKSRTVSSEKPSGLKATSDEKDSVLNIARGKKHGEKTRRVSSHKQPALKATSDKENSVPNMATETKDEQISGTVSSQKQPALKATSDKKDSVSNIPTEIKDGQQSGTVSSQKQLAWKATSVKKDSVSNIATEIKDGQIRGTVSSQRQPALKATGDEKDSVSNIAREIKDGEKSGTVSPQKQSAQKVIFKKKVSLLNIATRITGGWKSGTEYPENLPTLKATIENKNSVLNTATKMKDVQTSTPEQDLEMASEGEQKRLEEYENNQPQVKNQIHSRDDLDDIIQSSQTVSEDGDSLCCNCKNVILLIDQHEMKCKDCVHLLKIKKTFCLCKRLTELKDNHCEQLRVKIRKLKNKASVLQKRLSEKEEIKSQLKHETLELEKELCSLRFAIQQEKKKRRNVEELHQKVREKLRITEEQYRIEADVTKPIKPALKSAEVELKTGGNNSNQVSETDEKEDLLHENRLMQDEIARLRLEKDTIKNQNLEKKYLKDFEIVKRKHEDLQKALKRNEETLAETIACYSGQLAALTDENTTLRSKLEKQRESGQRLETEMQSYRCRLNAALCDHDQSHSSKRDQELAFQGTVDKCCHLQENLNSHVLILSLQLSKAESKFRVLETELHYTGEALKEKALVFEHVQSELKQKQSQMKDIEKMYKSGYNTMEKCIEKQERFCQLKKQNMLLQQQLDDARNKADNQEKAILNIQARCDARVENLQAECRKHRLLLEEDNKMLVNELNHSKEKKCQYEKEKAEREVAVRQLQQKQDDVLNKRSATKALLDASSRHCIYLENGMQDSRKKLDQMRSQFQEIQDQLTATIRCTKEMEGDAQKLEVENVMMRKIIKKQDEQIERFEKILQHSSLMLQVFES

SEQ ID NO: 286730 - DNA, 5782 bp, Artificial Sequence
  derived and/or modified sequence
gggcgcgcgagagctgctagggcggtttctctgcctcgggcctgttgggcagggccggctaaggtgcgcgtgctcgctggttctaacccttctgttgggcgtttctgctgagaggcgggaggcgctgagagtctgtgcggaggtccgtggacagactgctttgctcgttgttgctcttcggaggcggcgatccccgaaggcgagctgaaatacggctgcaggctacaatttgcagccgacgattatggaagacggcaagcgggagaggtggcccaccctcatggagcgcttgtgctcggatggcttcgcatttccccaataccccattaaaccgtatcatctgaagaggatccacagagctgtcttacatggtaatctagagaaactgaagtaccttctgctcacgtattatgacgccaataagagagacaggaaggaaaggaccgccctacatttggcctgtgccactggccaaccggaaatggtacatctcctggtgtccagaagatgtgagcttaacctctgcgaccgtgaagacaggacacctctgatcaaggctgtacaactgaggcaggaggcttgtgcaactcttctgctgcaaaatggcgccaatccaaatattacggatttctttggaaggactgctctgcactacgctgtgtataatgaagatacatccatgatagaaaaacttctttcacatggtacaaatattgaagaatgcagcaagtgtgaatatcagccactgttatttgctgtgagtcgaagaaaagtgaaaatggtggaatttttattaaagaaaaaagcaaatgtaaatgccattgattatcttggcagatcagccctcatacatgctgttactcttggagaaaaagatatagtcattcttcttctgcagcacaatattgatgtgctttctcgagatgcgtttcgaaagattgcaggagattatgccattgaggctaagaatagagtcatttttgatctaatttatgaatacgaaagaaagagatatgaagatcttcctataaatagcaatccagtgtcttctcagaaacaaccagccttgaaggctacaagtggcaaggaagattctatttcaaatatagccacagaaataaaggatggacaaaaatctgggacagtgtcttctcagaaacaaccggccttgaaggatacaagtgacaaggatgattctgtttcgaacacagccacagaaataaaagatgaacaaaaatctgggacagtgcttcctgctgttgaacagtgtttaaacaggagtctctacagacctgatgctgttgcacagcctgtgacagagaatgagttttctttggaatctgagattatttcaaaactatacatcccaaagagaaagattatttctccacgatctataaaagatgtgcttcctcctgttgaagaggctgttgacaggtgtctctacctactggaccgttttgcacagcctgtgacaaaggataagtttgctttggaatctgagaatatttcagaaccatactttacgaacagaaggactatttctcaacaatctgcagaaaatttagatgctgcatgtggcattgacaaaacagaaaatggaaacatgtttgaagaccaaaatgttgataaggaaggaaaagcactaccagcaactggacaaaaagcaaatgtgtctcctgagcaaccgcctttattcacgcatacggtgaaagacagagatcacatttcaactagattcttaggaggtatggattcactaacttccagtgaagaatcttctgagcgacctcctttatccacgcttactctgaaagaggcagatcccagttcaaaagcagccatgagaaggaaggattcaccacctccaggaaaagtgtcttctcagaaacaaccagctgagaaggctacaagtgacgacaaagattctgtttcaaatatagccacagaaataaaggagggaccaatatctgggacagtgtcttctcagaaacaaccagctgagaaggctacaagtgacgagaaagattctgtttcaaatatagccacagaaataaagaagggacaacaatctgggacagtgtctcctcagaaacaatcggcctggaaggttatatttaaaaagaaagtttctcttttgaatattgccacaagaataatgggtggtgggaaatctggaacagtgtcttctcagaaacaaccagcctcaaaggctacaagtgacaagacagattctgctttgaatatagctacagaaataaaggatggactacagtgtgggacagtgtcttctcagaaacaaccagccttgaaggctacaactgacgaggaagactctgtttcgaatatagccacagaaataaaggatggagaaaaatctgggacagtgtcttctcagaagcaaccagccttgaaggctacaactgacgaggaagattctgtttcgaatatagccacagaaataaaggatggagaaaaatctgggacagtgtcttctcagaaacaaccagccttgaaggctacaactgatgagaaagattctgtttcgaacatagccacagaaataaaggatggagaaaaatctgggacagtgtcttctcagaaaccaccagccttgacggctacaagtgacgaggaaggttctgttttgagtatagccagagaaaacaaggatggagaaaaatctaggacagtgtcttctcggaaaaaaccagccttgaaggctacaagtgatgagaaggattctttttcgaatataaccagaggaaaaaaggatggagaaatatctaggaaagtgtcttctcagaaaccaccaaccttgaagggtacaagtgacgaggaagattctgttttgggtatagccagagaaaacaaggatggagaaaaatctaggacagtgtcttctgagaaaccaccaggcttgaaggcttcaagtgccgagaaagattctgttttgaatatagccagaggaaaaaaggatggagaaaaaactaagagagtgtcttctcggaaaaaaccatccttggaggccacaagtgatgagaaggattctttttcgaatataaccagagaaaaaaaggatggagaaatatctaggaaagtgtcttctcagaaaccaccagccttgaagggtacaagtgacgaggaagattctgttttgggtatagccagagaaaacaaggatggagaaaaatctaggacagtgtcttctgagaaaccaccaggcttgaaggctacaagtgatgagaaagattctgttttgaatatagccagaggaaaaaaggatggagaaaaaactaggacagtgtcttctccgaaacaaccagcattgaaggctatctgtgacaaggaagattctgttccgaatatggccacggaaaaaaaggatgaacaaatatctgggacagtgtcttgtcagaaacaaccagccttgaaggctacaagtgacaagaaagattctgtttcgaatatacccacagaaataaaggatggacaacaatctggaacagtgtcttctcagaaacaaccggcctggaaggctacaagtgtcaagaaagattctgtttcgaatatagccacagaaataaaggatggacaaatacgtgggacagtaagtcctcaggttccaatccccagacacaaagtaggaaacatcaaatcctaccctaatacaggcagaaggatacagcttgatgctaacactttttcagtgtctcctcagaaacaatcggcccagaaggttatatttaaaaagaaagtttctcttttgaatattgccacaagaataacaggcggttggaaatctggaacagagtatcctgagaatctgcccaccttgaaggctacaattgaaaataaaaattctgttctgaatacagccaccaaaatgaaggatgtacaaacatccacaccagcagaacaagacttagaaatggcatcagagggagagcaaaagaggcttgaagaatatgaaaataaccagccacaggtgaaaaaccaaatacattctagggatgaccttgatgacataattcagtcatctcaaacagtctcagaggacggtgactcgctttgctgtaattgtaagaatgtcatattactcattgatcaacatgaaatgaagtgtaaagattgtgttcacctattgaaaattaaaaatacattttgtttatggaaaagattaataaaacttaaagataaccactgtgagcaacttagagtaaaaattcgaaaactgaaaaataaggctagtgtactacaaaagagaatatctgaaaaagaagaaataaaatcgcagttaaagcatgaaatacttgaattggaaaaagaactctgtagtttgagatttgccatacagcaagaaaaaaagaaaagaagaaatgttgaagaggtgcaccaaaaagttagggaaaagttaagaataacagaagagcaatataggatagaagctgatgtgacaaaaccaattaaaccggctctcaaatcagcagaggtggaattgaagacaggaggaaataattcaaatcaggtttctgaaactgatgaaaaagaagacctgctgcatgaaaaccgcttgatgcaagatgaaattgccaggctcaggctggaaaaagacacaataaaaaaccaaaacctggaaaagaaatacttaaaagactttgaaattgtgaaaagaaagcatgaagaccttcaaaaggctctaaaacggaatggggaaacattagcaaaaacgatagcctgttatagtggacagcttgctgctctgacagatgaaaacacaacgctccgttccaaactggagaagcaaagagagagcaggcaaagactggaaacagaaatgcaatcataccattgtagactgaatgctgctcgatgtgatcatgatcaaagtcactcatcaaaaagagaccaagagcttgctttccagggcacagtagataaatgtcgtcacttacaggaaaatttgaattctcatgttctgattctttctctgcaactttctaaagctgagagtaagtccagagtcctcaaaactgagctccattacacaggagaggctctgaaagaaaaggctttggtttttgaacacgtgcaaagtgagctaaagcaaaaacagagtcaaatgaaggacattgaaaaaatgtacaaaagtggatacaatacaatggaaaaatgcatagaaaaacaggaaagattttgtcaactaaaaaaacaaaatatgttgcttcaacagcaactggatgatgctcgcaacaaagctgacaatcaagaaaaagcaatacttaatattcaagccagatgtgatgctagagtacaaaaccttcaagctgagtgcagaaagcaccgtcttttactagaagaagacaataaaatgttggtcaatgaactgaatcattcgaaagaaaaagaatgccaatatgaaaaagagaaagcagaaagagaagtagctgtgagacagcttcaacaaaaacgagatgatgtcttaaacaaaggatcagcaacaaaagctctgctggatgcttcatcgcgtcactgcacctatttagaaaatgggatgcaggattcaaggaagaaattagaccagatgagaagtcaatttcaagaaatacaggatcaacttacagctactataagatgtactaaggagatggaaggcgacacacaaaagcttgaagtagaacatgtgatgatgagaaaaattattaaaaaacaggatgaccaaattgagcggcttgagaaaatcctgcagcattcaagtttgcttttattgaactttgagact

SEQ ID NO: 286731 - protein, 119 aa, Artificial Sequence
  derived and/or modified sequence
MGTRTLQFEISDSHEKEEDLLHKNHLMQDEIARLRLEIHTIKNQILEKKYLKDIEIIKRKHEDLQKALKQNGEKSTKTIAHYSGQLTALTDENTMLRSKLEKEKQSRQRLTKWNHTIVD

SEQ ID NO: 286732 - protein, 52 aa, Artificial Sequence
  derived and/or modified sequence
MSKQQPTQFINPETPGYVGFANLPNQVHRKSVKKGFEFTLMVVGESGLGKST

SEQ ID NO: 286733 - protein, 50 aa, Artificial Sequence
  derived and/or modified sequence
MSKQQPTQFINPETPGYVGFANLPNQVHRKSVKKGFEFTLMVVGESGLGK

SEQ ID NO: 286734 - protein, 72 aa, Artificial Sequence
  derived and/or modified sequence
MSKQQPTQFINPETPGYVGFANLPNQVHRKSVKKGFEFTLMVVGESGLGKSTLINSLFLTDLYPERVIPGAA

SEQ ID NO: 286735 - protein, 29 aa, Artificial Sequence
  derived and/or modified sequence
  misc_feature (1)..(1): Xaa can be any naturally occurring amino acid
XEMIARMQAQMQMQMQGGDGDGGALGHHV

SEQ ID NO: 286736 - DNA, 72 bp, Artificial Sequence
  derived and/or modified sequence
atgtctaagcaacagccaacccagtttatcaatccagagacgcccgggtacgtgggcttcgccaatctgtag

SEQ ID NO: 286737 - DNA, 72 bp, Artificial Sequence
  derived and/or modified sequence
atgagcaagcagcagcccacccagttcatcaaccctgagaccccaggctacgtgggctttgccaacctgtag

SEQ ID NO: 286738 - DNA, 72 bp, Artificial Sequence
  derived and/or modified sequence
atgagcaagcagcagcccacccagttcatcaaccccgagacccccggatatgtcggcttcgctaatctgtag

SEQ ID NO: 286739 - DNA, 72 bp, Artificial Sequence
  derived and/or modified sequence
atgtcaaaacagcagcctactcagtttattaatcccgaaacacctggctacgttgggttcgcgaatctgtag

SEQ ID NO: 286740 - DNA, 539 bp, Artificial Sequence
  derived and/or modified sequence
gggcggtcctagtgccggcgacagtggctccgacacgggcaggcccgggcgcgggagtggggattccggtgaccccttgttgaccctgcgggaattcctctgcactgtcgtcggtgctgggcctcggggcgtcgagtgcggtcgaggcgtggaggactggccagcccccaaacctccaagcccatcggctggatgccgtggataagcgaggggagagcgactaggccctgtctgcgggtaccttcggcgaggagaggcgacgaagcatacagaaactgctgtaaaagaagaagttgtgggtatttttttttttttttttgtctggaggaatggggacaccaaaactcatttggcagcagaggtgagacgaagcttcacaaaagatgtctaagcaacagccaactcagtttataaatccagaaacacctggctatgttggatttgcaaacctccccaatcaagttcaccgaaaatcagtgaaaaaaggttttgagttcacactgatggtggtcggtgaatcaggtctaggaaaatcgact

SEQ ID NO: 286741 - DNA, 644 bp, Artificial Sequence
  derived and/or modified sequence
agtcgtactcggcgccccagctcggtgctgccgccatcttcttggaggacaggaggagaggcgaaggctccccctccccgtgatcgctccgcactcccgccaccacctgccctcccgcgaccgcctctctcctcctcagtgggcacttgtctccttctaacaaacggccttccccccactccagttacccaccgcaaggcgaagattctcattacctgttccactcttataagcataagaaaaccgagctcataaggcgtggaggactggccagcccccaaacctccaagcccatcggctggatgccgtggataagcgaggggagagcgactaggccctgtctgcgggtaccttcggcgaggagaggcgacgaagcatacagaaactgctgtaaaagaagaagttgtgggtatttttttttttttttttgtctggaggaatggggacaccaaaactcatttggcagcagaggtgagacgaagcttcacaaaagatgtctaagcaacagccaactcagtttataaatccagaaacacctggctatgttggatttgcaaacctccccaatcaagttcaccgaaaatcagtgaaaaaaggttttgagttcacactgatggtggtcggtgaatcaggtctaggaaaat

SEQ ID NO: 286742 - DNA, 724 bp, Artificial Sequence
  derived and/or modified sequence
ccccgcacaagttgtgggccggccctcccgaggagctgcgggggacgcgccgctcgtcccatactctcgggcggtggtcggctggctctggggtgccggcggggcggtgtgggggaggggcggccgagcccaggctcttcggcacttatcgtgggctcccccgtcccgggcggtcctagtgccggcgacagtggctccgacacgggcaggcccgggcgcgggagtggggattccggtgaccccttgttgaccctgcgggaattcctctgcactgtcgtcggtgctgggcctcggggcgtcgagtgcggtcgaggtcgggaggtttggtgcttggagggaggatacaggtttaggcccgacaaacacttagagcttgtgtggccatcttgtctttctaacggtgccatttcctccctgaggcgtggaggactggccagcccccaaacctccaagcccatcggctggatgccgtggataagcgaggggagagcgactaggccctgtctgcgggtaccttcggcgaggagaggcgacgaagcatacagaaactgctgtaaaagaagaagttgtgggtatttttttttttttttttgtctggaggaatggggacaccaaaactcatttggcagcagaggtgagacgaagcttcacaaaagatgtctaagcaacagccaactcagtttataaatccagaaacacctggctatgttggatttgcaaacct

SEQ ID NO: 286743 - DNA, 775 bp, Artificial Sequence
  derived and/or modified sequence
cgggctgtgagcggaccgcgagcgctgggcgggtccgcggcgcggtcggtcggcgcctgttctcgggctgtttggcgggcgtggaggactggccagcccccaaacctccaagcccatcggctggatgccgtggataagcgaggggagagcgactaggccctgtctgcgggtaccttcggcgaggagaggcgacgaaggtctgcaccagcgagcatacagaaactgctgtaaaagaagaagttgtgggtatttttttttttttttttgtctggaggaatggggacaccaaaactcatttggcagcagaggtgagacgaagcttcacaaaagatgtctaagcaacagccaactcagtttataaatccagaaacacctggctatgttggatttgcaaacctccccaatcaagttcaccgaaaatcagtgaaaaaaggttttgagttcacactgatggtggtcggtgaatcaggtctaggaaaatcgactctcataaacagcctattcctaactgatctgtacccagaaagagtcatacctggagcagcagaaaaaattgaaagaactgtccagattgaggcttcaactgttgaaattgaagagcgaggggtcaagctacgcctgacagtggtagatacccctggctatggtgacgctatcaactgcagagattgttttaagacaattatctcctatattgatgagcaatttgagaggtacctgcatgacgagagcggcttgaacaggcggcacatcattgataatagggtgcattgtt

SEQ ID NO: 286744 - DNA, 372 bp, Artificial Sequence
  derived and/or modified sequence
gcgcggtcggtcggcgcctgttctcgggctgtttggcggcatacagaaactgctgtaaaagaagaagttgtgggtatttttttttttttttttgtctggaggaatggggacaccaaaactcatttggcagcagaggtgagacgaagcttcacaaaagatgtctaagcaacagccaactcagtttataaatccagaaacacctggctatgttggatttgcaaacctccccaatcaagttcaccgaaaatcagtgaaaaaaggttttgagttcacactgatggtggtcggtgaatcaggtctaggaaaatcgactctcataaacagcctattcctaactgatctgtacccagaaagagtcatacctggagcagc

SEQ ID NO: 286745 - DNA, 72 bp, Artificial Sequence
  derived and/or modified sequence
atgagcaagcagcagcccacccagttcatcaaccccgagacccccggctacgtgggcttcgccaacctgtag

SEQ ID NO: 286746 - protein, 19 aa, Artificial Sequence
  derived and/or modified sequence
MSLPLTEEQRKKIEENRQK

SEQ ID NO: 286747 - protein, 146 aa, Artificial Sequence
  derived and/or modified sequence
MSLPLTEEQRKKIEENRQKALARRAEKLLAEQHQRTSSGTSIAGNPFQAKQGPSQNFPRESCKPVSHGVIFKQQNLSSSSNADQRPHDSHSFQAKGIWKKPEEMPTACPGHSPRSQMALTGISPPLAQSPPEVPKQQLLSYELGQG

SEQ ID NO: 286748 - protein, 92 aa, Artificial Sequence
  derived and/or modified sequence
MSLPLTEEQRKKIEENRQKALARRAEKLLAEQHQRTSSGTSIAGNPFQAKQGPSQNFPRESCKPVSHGVIFKQQNLSSSSNADQRPHDSHSF

SEQ ID NO: 286749 - protein, 130 aa, Artificial Sequence
  derived and/or modified sequence
MSLPLTEEQRKKIEENRQKALARRAEKLLAEQHQRTSSGTSIAGNPFQAKQGPSQNFPRESCKPVSHGVIFKQQNLSSSSNADQRPHDSHSFQAKGIWKKPEEMPTACPGHSPRSQMALTGISPPLAQSP

SEQ ID NO: 286750 - DNA, 441 bp, Artificial Sequence
  derived and/or modified sequence
atgagcctgcccctgaccgaggagcagagaaagaagatcgaggagaacagacagaaggccctggccagaagagccgagaagctgctggccgagcagcaccagagaaccagcagcggcaccagcatcgccggcaaccccttccaggccaagcagggccccagccagaacttccccagagagagctgcaagcccgtgagccacggcgtgatcttcaagcagcagaacctgagcagcagcagcaacgccgaccagagaccccacgacagccacagcttccaggccaagggcatctggaagaagcccgaggagatgcccaccgcctgccccggccacagccccagaagccagatggccctgaccggcatcagcccccccctggcccagagcccccccgaggtgcccaagcagcagctgctgagctacgagctgggccagggctag

SEQ ID NO: 286751 - DNA, 279 bp, Artificial Sequence
  derived and/or modified sequence
atgagcctgcccctgaccgaggagcagagaaagaagatcgaggagaacagacagaaggccctggccagaagagccgagaagctgctggccgagcagcaccagagaaccagcagcggcaccagcatcgccggcaaccccttccaggccaagcagggccccagccagaacttccccagagagagctgcaagcccgtgagccacggcgtgatcttcaagcagcagaacctgagcagcagcagcaacgccgaccagagaccccacgacagccacagcttctag

SEQ ID NO: 286752 - DNA, 393 bp, Artificial Sequence
  derived and/or modified sequence
atgagcctgcccctgaccgaggagcagagaaagaagatcgaggagaacagacagaaggccctggccagaagagccgagaagctgctggccgagcagcaccagagaaccagcagcggcaccagcatcgccggcaaccccttccaggccaagcagggccccagccagaacttccccagagagagctgcaagcccgtgagccacggcgtgatcttcaagcagcagaacctgagcagcagcagcaacgccgaccagagaccccacgacagccacagcttccaggccaagggcatctggaagaagcccgaggagatgcccaccgcctgccccggccacagccccagaagccagatggccctgaccggcatcagcccccccctggcccagagcccctag

SEQ ID NO: 286753 - DNA, 441 bp, Artificial Sequence
  derived and/or modified sequence
atgtcattgcccttgaccgaggaacaacggaaaaaaattgaagagaacaggcaaaaggccctggcgaggcgcgccgaaaagttgctggcggaacagcaccagaggacttcttctgggacgtctatagcgggtaatcccttccaagctaagcaggggccaagtcagaatttccccagagagagttgcaagcccgtctcccatggagttattttcaaacaacaaaatctatcgagctcatccaacgcggatcagcgtccgcatgacagtcacagcttccaagcgaaaggaatctggaagaagcccgaagagatgcccacagcttgcccaggacactcccctcgctcacagatggccctgacgggaatttcacctcccttagcccagtctcccccggaagtacccaagcagcagttgctttcctatgagctgggccagggctag

SEQ ID NO: 286754 - DNA, 279 bp, Artificial Sequence
  derived and/or modified sequence
atgtcactccctctgaccgaagagcaaagaaagaagatcgaggagaatcgccagaaggccctggcccggagagcggagaagttgctggcagagcagcaccagcgcacgagttcaggtactagcatagccgggaatccattccaggccaagcaggggccttcacaaaacttccctagagagtcctgcaagcctgtgtcccatggagtgattttcaagcagcaaaatctttcttcatcatctaacgctgaccagcgcccgcacgactctcactctttctag

SEQ ID NO: 286755 - DNA, 393 bp, Artificial Sequence
  derived and/or modified sequence
atgtcgcttccgttgactgaggaacagagaaagaagattgaggaaaataggcagaaagccctggcccgcagagccgagaagctattagccgaacagcaccagagaactagcagtggtacaagtattgctgggaacccctttcaagccaaacagggcccttcacagaattttccccgtgagtcctgtaagccggtcagtcatggtgtcatattcaagcaacagaacctgagttcctcctccaatgccgaccagcgacctcatgactcacactcattccaggcaaagggcatctggaagaagcccgaagagatgccaaccgcttgtcctggccactcgccaagaagtcagatggctttgacaggaattagtcctcctctcgcacagagcccgtag

SEQ ID NO: 286756 - DNA, 441 bp, Artificial Sequence
  derived and/or modified sequence
atgagcctgcccctgacagaggagcagaggaagaagattgaagaaaatcggcagaaggccctggccaggagagctgagaagctgctggccgagcagcaccagaggaccagcagcggcaccagcattgctggcaaccccttccaggccaagcagggccccagccagaacttcccccgggagagctgcaagcctgtgtcccatggagtcatcttcaagcagcagaacctgagcagcagcagcaatgctgaccagaggcctcatgacagccacagcttccaggccaagggcatctggaagaagccagaggagatgcccacagcctgccccggccacagccccaggagccagatggccctgaccggcatcagcccccccctggcccagagccccccagaggtgcccaagcagcagctgctgtcctatgagctgggccagggctag

SEQ ID NO: 286757 - DNA, 279 bp, Artificial Sequence
  derived and/or modified sequence
atgagcctgcccctgacagaggagcagaggaagaagattgaagaaaatcggcagaaggccctggccaggagagctgagaagctgctggccgagcagcaccagaggaccagcagcggcaccagcattgctggcaaccccttccaggccaagcagggccccagccagaacttcccccgggagagctgcaagcctgtgtcccatggagtcatcttcaagcagcagaacctgagcagcagcagcaatgctgaccagaggcctcatgacagccacagcttctag

SEQ ID NO: 286758 - DNA, 393 bp, Artificial Sequence
  derived and/or modified sequence
atgagcctgcccctgacagaggagcagaggaagaagattgaagaaaatcggcagaaggccctggccaggagagctgagaagctgctggccgagcagcaccagaggaccagcagcggcaccagcattgctggcaaccccttccaggccaagcagggccccagccagaacttcccccgggagagctgcaagcctgtgtcccatggagtcatcttcaagcagcagaacctgagcagcagcagcaatgctgaccagaggcctcatgacagccacagcttccaggccaagggcatctggaagaagccagaggagatgcccacagcctgccccggccacagccccaggagccagatggccctgaccggcatcagcccccccctggcccagagcccctag

SEQ ID NO: 286759 - DNA, 441 bp, Artificial Sequence
  derived and/or modified sequence
atgagcctgcccctgaccgaggagcagcggaagaagatcgaggagaatcggcagaaggcccttgcccgacgggccgagaagttgctggccgagcaacatcagcgcactagttccgggacttccatcgctggcaacccgttccaggctaagcaagggcccagccaaaatttcccacgagagagctgcaagcccgtgagccatggagttatttttaaacaacagaatctcagttcgtctagcaatgcagaccaacgccctcacgactctcacagtttccaggctaaggggatttggaagaaacccgaagagatgcctaccgcttgtcctggacatagtccccgtagtcagatggccctcacgggaatatctccgcccctggctcagtctccccctgaggttccgaaacaacagttactctcttatgagctgggacagggatag

SEQ ID NO: 286760 - DNA, 279 bp, Artificial Sequence
  derived and/or modified sequence
atgagcctgcccctgaccgaggagcagcggaagaagatcgaggagaataggcagaaagctttggccagaagagccgaaaaactgctggccgagcagcaccagcgcacaagctctggcacatctatcgcagggaatccttttcaagcaaaacagggacccagccaaaatttccctagggaaagttgtaaacctgtgtcacatggtgtgatctttaagcagcagaaccttagcagttcaagcaacgccgaccagaggccgcatgactcacactccttctag

SEQ ID NO: 286761 - DNA, 393 bp, Artificial Sequence
  derived and/or modified sequence
atgagcctgcccctgaccgaggagcagcggaagaagatcgaggagaataggcagaaagcactggcccggagggcagaaaaactgttagcggagcagcaccaaaggacttcttctggaactagtatcgccgggaacccttttcaagccaagcagggcccctcacaaaatttcccaagggaaagttgcaagccagtgtcccacggggtgattttcaaacagcagaatctatcctccagcagcaacgccgaccagcgaccacatgactctcattccttccaagcaaaggggatttggaagaagcctgaggagatgcccaccgcttgcccagggcacagtccacggtcccagatggctcttacgggcatcagccccccattagcacagtcgccctag

SEQ ID NO: 286762 - DNA, 441 bp, Artificial Sequence
  derived and/or modified sequence
atgtctttgcccctcaccgaagagcagaggaagaagatcgaagagaatcgacaaaaagcacttgccaggcgggcagagaaattgctggcagaacagcatcaacggacatcttcaggaacatccatagccggaaatccgtttcaggctaaacagggcccaagtcagaattttcccagggaatcttgtaagcccgtgtcacatggggttatatttaaacagcagaatcttagttcttcctccaacgccgatcagcgtccacacgatagtcactcattccaggctaaggggatctggaaaaagcccgaggagatgcccaccgcttgtccaggtcactctccccgttcccagatggcccttacagggatctctcctcctctcgcacaatctccaccagaggtgccaaagcagcagcttctgagctacgagctgggacagggatag

SEQ ID NO: 286763 - DNA, 279 bp, Artificial Sequence
  derived and/or modified sequence
atgagcttgcccttgacagaagagcaacggaaaaagattgaggaaaatagacagaaagctttagccaggagggctgaaaaactcctcgccgaacagcaccagcgcactagcagcgggaccagcattgccggaaatccgttccaggctaagcaaggaccaagccaaaacttccctcgcgagagctgtaaaccagtttctcacggcgtgatcttcaaacagcaaaacttaagctcctcctccaatgccgaccaacgccctcatgacagtcactccttctag

SEQ ID NO: 286764 - DNA, 393 bp, Artificial Sequence
  derived and/or modified sequence
atgtctctcccgctcacagaggagcaaaggaagaagattgaggagaataggcagaaagccctcgccaggcgggctgagaaacttttggcagaacagcaccagcgaacttcttctggcaccagcatcgccggaaacccgttccaagcaaaacaaggaccgagccagaatttccctcgtgagtcttgcaaaccagtttcccacggggtgattttcaaacagcagaacctgtccagcagctcaaacgcagaccaacgccctcatgattctcattctttccaggccaagggcatctggaaaaagccagaggagatgcctacggcctgtcctggccacagtccacggagccaaatggccctgacgggaataagcccacctctggcccaatccccctag

SEQ ID NO: 286765 - DNA, 310 bp, Artificial Sequence
  derived and/or modified sequence
ggaagaccggtcccgctcgggaggctctgcagtcgcgcctggggtcagggccgggggcgaatgtggctcgcgttctaggcctccctgggtgagaaagtggtagactggcaggaaggcggcggaggcggacgagaccaatgccagcctggaggaggaagttggaaaaagactatgttagcaagtgtcacgccatgcttttgccaactttccaattaaaggttgacattcctgcataagcatttctctgtgaaaatgtccttgcctcttacagaggagcagaggaaaaagattgaagagaatcgacaaaagg

SEQ ID NO: 286766 - DNA, 722 bp, Artificial Sequence
  derived and/or modified sequence
atcattcttacttttggaagcgaaactgcggccgcgttgcctgctgggaaatgtagttcagcggtggcctagcccttcaggcctggccgctacaataaggctggcgaactcgcagcgcttgaatacccgtggcctaaccgtccactcggaagaccggtcccgctcgggaggctctgcagtcgcgcctggggttggaaaaagactatgttagcaagtgtcacgccatgcttttgccaactttccaattaaaggttgacattcctgcataagcatttctctgtgaaaatgtccttgcctcttacagaggagcagaggaaaaagattgaagagaatcgacaaaaggctctggcccgcagagctgagaagttattggcagaacagcatcagaggactagctcgggcacctccattgctggcaacccattccaggccaagcaaggcccatcccaaaatttcccaagggagtcttgtaagccagtgagccatggtgtcattttcaagcaacagaatctcagtagctcatctaatgctgaccaaagacctcatgattcccacagttttcaggcaaagggaatatggaaaaagccagaagaaatgcccacagcctgcccaggccacagtccacgtagtcaaatggctctcactggaatctctcctcccttggcacaaagtcctccagaggtccctaaacaacagctcttgagttatgagttaggtcaagg

SEQ ID NO: 286767 - DNA, 544 bp, Artificial Sequence
  derived and/or modified sequence
agtggggcgtggcgcccgcttaccttgaggctgggtgaggctcgccccgaaatgcggggcgtggggggcggggggcagaggtccctgcctagaggggaagaggggcgtccatgtggcggaatggatttatggtttggggctgatcagtgggtcttatggccgagtctctctggttggaaaaagactatgttagcaagtgtcacgccatgcttttgccaactttccaattaaaggttgacattcctgcataagcatttctctgtgaaaatgtccttgcctcttacagaggagcagaggaaaaagattgaagagaatcgacaaaaggctctggcccgcagagctgagaagttattggcagaacagcatcagaggactagctcgggcacctccattgctggcaacccattccaggccaagcaaggcccatcccaaaatttcccaagggagtcttgtaagccagtgagccatggtgtcattttcaagcaacagaatctcagtagctcatctaatgctgaccaaagacctcatgattcccacagttttc

SEQ ID NO: 286768 - DNA, 711 bp, Artificial Sequence
  derived and/or modified sequence
aaggctggcgaactcgcagcgcttgaatacccgtggcctaaccgtccactcggaagaccggtcccgctcgggaggctctgcagtcgcgcctggggtcagggccgggggcgaatgtggctcgcgttctaggcctccctgggtgagaaagtggtagactggcaggaaggcggcggaggcggacgagaccaatgccagcctggaggaggaagtgggccaatgggaagggttggaaaaagactatgttagcaagtgtcacgccatgcttttgccaactttccaattaaaggttgacattcctgcataagcatttctctgtgaaaatgtccttgcctcttacagaggagcagaggaaaaagattgaagagaatcgacaaaaggctctggcccgcagagctgagaagttattggcagaacagcatcagaggactagctcgggcacctccattgctggcaacccattccaggccaagcaaggcccatcccaaaatttcccaagggagtcttgtaagccagtgagccatggtgtcattttcaagcaacagaatctcagtagctcatctaatgctgaccaaagacctcatgattcccacagttttcaggcaaagggaatatggaaaaagccagaagaaatgcccacagcctgcccaggccacagtccacgtagtcaaatggctctcactggaatctctcctcccttggcacaaagtcctc

SEQ ID NO: 286769 - protein, 304 aa, Artificial Sequence
  derived and/or modified sequence
MNRAFSRKKDKTWMHTPEALSKHFIPYNAKFLGSTEVEQPKGTEVVRDAVRKLKFARHIKKSEGQKIPKVELQISIYGVKILEPKTKEVQHNCQLHRISFCADDKTDKRIFTFICKDSESNKHLCYVFDSEKCAEEITLTIGQAFDLAYRKFLESGGKDVETRKQIAGLQKRIQDLETENMELKNKVQDLENQLRITQVSAPPAGSMTPKSPSTDIFDMIPFSPISHQSSMPTRNGTQPPPVPSRSTEIKRDLFGAEPFDPFNCGAADFPPDIQSKLDEMQEGFKMGLTLEGTVFCLDPLDSRC

SEQ ID NO: 286770 - protein, 167 aa, Artificial Sequence
  derived and/or modified sequence
MNRAFSRKKDKTWMHTPEALSKHFIPYNAKFLGSTEVEQPKGTEVVRDAVRKLKFARHIKKSEGQKIPKVELQISIYGVKILEPKTKEVQHNCQLHRISFCADDKTDKRIFTFICKDSESNKHLCYVFDSEKCVSIPDVVGWFVLFYKPGIVLLLALAKYLKMNNFL

SEQ ID NO: 286771 - protein, 68 aa, Artificial Sequence
  derived and/or modified sequence
MNRAFSRKKDKTWMHTPEALSKHFIPYNAKFLGSTEVEQPKGTEVVRDAVRKLKFARHIKKSEGQKIP

SEQ ID NO: 286772 - DNA, 915 bp, Artificial Sequence
  derived and/or modified sequence
atgaacagagctttcagtaggaagaaggacaaaacatggatgcacacgccagaggctctcagtaagcatttcattccgtacaatgccaaattcctgggaagcaccgaagtagagcagcctaagggaaccgaggttgtcagggatgctgtgcgaaagctaaagttcgcaaggcacatcaagaagagcgagggtcagaagatcccaaaggtggagctgcagatctccatttacggtgttaaaatcttagagcctaaaaccaaggaggtccagcacaattgccagctccatagaatatcattttgtgctgatgataagacggataaacgaatcttcaccttcatctgcaaggattcggaaagcaataaacacctgtgctacgttttcgattccgagaagtgcgcagaggagataactctgactatcggacaggctttcgatctggcctacaggaagttccttgagagcggaggtaaagacgtggagacgagaaagcaaattgcgggcttgcaaaagcgaattcaggaccttgaaaccgaaaacatggaactcaagaataaagtccaggaccttgagaaccagcttaggatcacacaggtgtccgctcctcctgccgggtctatgacaccaaaatccccctctacagatatttttgacatgatccccttcagccctatttcccaccagtcctcaatgcccactaggaatgggacccagcctccccccgtgcctagcaggtccaccgaaatcaaaagggacttgtttggagccgagcccttcgacccattcaattgcggggcggctgactttccccccgatatccagtcgaagcttgatgagatgcaggagggctttaagatgggcctgacactagagggcacggtcttttgcctggaccccctggattctcgttgttag

SEQ ID NO: 286773 - DNA, 915 bp, Artificial Sequence
  derived and/or modified sequence
atgaatcgggccttcagtcgcaagaaggataaaacttggatgcacacgcccgaggctctttccaagcactttattccctataatgctaagtttttgggttcaaccgaggtggaacagccgaaggggaccgaggttgttagagacgccgtccgcaagctaaaattcgcccgtcatattaagaaatcagagggacagaaaattccaaaggtagagttgcagatctccatttacggagtaaagatactggaaccaaaaactaaggaagttcagcataattgccagctacatcgaatttctttctgcgccgatgataagacagacaagcggatttttaccttcatctgcaaagatagtgagagcaacaagcacttatgttacgttttcgactcggaaaagtgtgctgaagaaatcacactcactattggacaggcgttcgacctcgcctacaggaaattcctggagtccggaggaaaggacgtcgagactagaaaacagatcgccggcctgcagaaaagaatccaggatttggaaaccgaaaatatggagctcaaaaacaaagtgcaggacttggagaaccagctgcggatcactcaggtctcagcgccacccgcaggctcaatgactcctaagagtccgtctaccgacatcttcgatatgatcccattcagtccgatcagccatcagtcttccatgcctacgagaaacgggacacagccaccgcccgtaccgtccaggtcaacagaaattaagagagatctgttcggtgccgaacccttcgatccttttaactgcggcgctgccgatttcccgccggacattcagagtaaactcgacgaaatgcaagaagggttcaagatggggctgaccctcgagggaacggtgttttgcctcgaccccctcgacagtaggtgttag

SEQ ID NO: 286774 - DNA, 915 bp, Artificial Sequence
  derived and/or modified sequence
atgaatagagcgttttctaggaagaaagacaaaacttggatgcacactcccgaagccttgagcaagcatttcatcccatacaacgcgaagttccttggttccaccgaggtagaacagcccaaagggaccgaggtcgttagagatgccgttagaaagttaaagttcgctcggcatattaagaagagtgagggacagaaaattcctaaagtagaactgcaaattagtatctatggtgtcaaaattctggaacccaaaacaaaagaggtgcagcataactgtcagctgcatagaatctctttctgcgcggatgataagacagacaaaaggatctttaccttcatctgcaaggattctgagtcaaataaacacctctgctatgtgtttgattccgagaagtgtgccgaggagatcacactgacaattgggcaggcattcgacctggcgtaccgtaaattccttgagagcgggggaaaagacgtagagacacgcaagcagattgcaggcctgcagaaaaggattcaggatcttgaaaccgagaatatggagctcaaaaacaaggtgcaagatctcgagaaccagctcagaatcactcaggtttctgcccccccagccggatcaatgactccaaagtcacctagtactgacatcttcgacatgattcctttttcacccatctctcatcagagctcaatgccaactagaaacggaacacaaccacctcctgtcccctctcgttcaaccgagataaaacgagacctgtttggcgcggagccgttcgatccgtttaactgcggagcagcagattttcctccggacatccagtctaagctcgatgagatgcaggaaggatttaaaatgggcctgaccctcgaggggaccgtgttctgtctggatcccctggacagtcgatgttag

SEQ ID NO: 286775 - DNA, 915 bp, Artificial Sequence
  derived and/or modified sequence
atgaatcgggcattctcgaggaagaaggacaaaacatggatgcatactccagaagctctatcaaagcatttcatcccgtacaatgcgaaattcctggggagtaccgaagtagaacagccaaagggtacggaagttgtgcgtgacgcggtccgcaagctgaagtttgcgcgccacatcaagaagtctgaaggccagaagattccaaaagtcgagttacaaatctccatttacggggtgaagatacttgaaccgaaaaccaaagaggttcagcataattgccagctccacagaatcagtttctgcgcagatgataagaccgataaaagaatctttacctttatctgcaaagattctgagtccaacaagcacctgtgttatgtgtttgatagcgaaaagtgtgcggaggagataaccctgaccatcggacaggcctttgacctcgcctacaggaagtttctggagtcaggcggaaaagacgtcgaaactaggaaacagattgcgggcctgcagaagcggatccaggacctggagacagaaaatatggagcttaaaaacaaggtccaggacctggagaaccagctgcgaatcactcaggtcagtgccccacccgctggatccatgacccctaaatctccatcaacggatattttcgacatgataccattttcccctatctcccaccaaagctcaatgccgacaagaaatgggacccagcctccacccgtgcccagtcggtctaccgagattaagcgcgatcttttcggcgcggaaccattcgacccctttaactgtggtgccgcggattttccccccgacattcagagcaagctcgacgaaatgcaggaaggattcaaaatggggttgacacttgaggggactgtattttgcctggaccccctggactctagatgctag

SEQ ID NO: 286776 - DNA, 3342 bp, Artificial Sequence
  derived and/or modified sequence
aaaggaaggggcggcgtccacatggttacccttctgctgcgcgggtcaagtagcttcttctggagggcgcaaggcgcggcgggggtgatgagcccttgggttctcgctccgactgctaaattcgcttggccgggtccaccttctcgtggcctcactcgccacacggatcagaatccggagcaggcagttctctctattctgaggctcctgcggctgccgcgctgacttccctgtgtgcgggagggaactctgggcaggctggttttcttggaatgtgtttacgatgttgaatgggacttgaacaggaagctggacgctgcagctggaactagcgtgccaagttatttatgattccatctgatatacataggagagaaactgatagaagaattctgatggcaactgtatgatagaagctatataaagtcaagtgtccattttctttcaactatatttgagcatacccaggatttaagtcgtggaactgaacatttatttggctgatcctcatcatgaaccgtgcttttagcaggaagaaagacaaaacatggatgcatacacctgaagctttatcaaaacatttcattccctataatgcaaagtttcttggcagtacagaagtggaacagccaaaaggaacagaagttgtgagagatgctgtaaggaaactaaagtttgcaagacatatcaagaaatctgaaggccagaaaattcctaaagtggagttgcaaatatcaatttatggagtaaaaattctagaacccaaaacaaaggaagttcaacacaattgccagcttcatagaatatctttttgtgcagatgataaaactgacaagaggatattcactttcatatgcaaagattctgagtcaaataaacatttgtgctatgtatttgacagcgaaaagtgtgctgaagagatcactttaacaattggccaagcatttgacctggcatacaggaaatttctagaatcaggaggaaaagatgttgaaacaagaaaacagatcgcagggttacaaaaaagaatccaagacttagaaacagaaaatatggaacttaaaaataaagtacaagatttggaaaaccaactgagaataactcaagtatcagcacctccagcaggcagtatgacacctaagtcgccctccactgacatctttgatatgattccattttctccaatatcacaccagtcttcgatgcctactcgcaatggcacacagccacctccagtacctagtagatctactgagattaaacgggacctgtttggagcagaaccttttgacccatttaactgtggagcagcagatttccctccagatattcaatcaaaattagatgagatgcaggaggggttcaaaatgggactaactcttgaaggcacagtattttgtctcgacccgttagacagtaggtgctgacatcaagaacaagaaatcctgattcatgttaaatgtgtttgtatacacatgtcatttattattattactttaagataggtattattcatgtgtcaatgtttttgaatattttaatattttgaaaattttctcagttaaatttcctcaccttcactattgatctgtaatttttattttaaaaacagcttactgtaaagtagatcatacttttatgttcctttctgtttctactgtagatgaatttgtaattgaaagacatattatacaaatacctgccttgtgtctgagttctatttagttagcatcttgaaatttgtattcattttccagatggctagtttattaatgatttcccaaaagccataccttaaagataactttttaaattctgaagagacatgccaatgtcaaactaaacatgttctgtttttaaaccaacaaacatgttactattcattggacagatatcattttatgtataaatactgttcacatcactgggaaaatgtaaactttaaacataatgccacaaggtcactaatttctagcaggtaaaattataaggatataaattccaataataaaccaaatgtatttagagtatttattagtaaatgcaaggtgatgttagttatgatcagttatactctaaatatttaatttgttttataaaggtagtgaaaaaatgaaaatttgctatttattaaaaaacattaaatttcattccaaatgagataagtgatattactataacatctaagcatcatctgatttgatattccctaaaaaacatttggaatatatgctatctatagattcagtatctactacccatatttactttaccaaatatatttctcctcactgcataaggactactcttctcatattttcttctttgatgaagatatttttcaccaaagtttattttgtgatgccctcttggttttgatactttaaaatctgtggcacccgttctacatgaattatcaatatttggtaaattcaatctgtatttgttttgttaaagtcaaaaatctcattttccaaaaaaaaaaaaaaaacccagttactgctcagtttagtcttgaacatgagcaataaaattctcttgcatttcattattgatgtgctgatgaacctggacttttaaaaatatttgtttcctatacctttaccctttacctaacagactaatttgtactcagtaaaacaaaaatttatggtcaaaatttctaacttggttcatcacattataagataaataaattaaattaatgaaaatgtgacttagagtaggggtagccctcaaaaatagatttatcatttactcattggaattttcttcaagtgttaaaggtacattttcactaggaaaagaaatcaaatatgcttatgcaatatatatttgtgtgtttttccttaatgttatatggtatatatgagccttcttgtttagtttcttttatctgctaagttgtaccttaattagagggcaatatatgtttcataaagaagagtctttataattttgtttgtcagatagtattttggaatttgtataataaggatgtttagaagccatataagtggctttttttaacagatagaatttgtatttttattgtactttaaaaagatttatgtaataggtatatatttagtggccatttattatcaatggtaacacaatggagtactaagatggtatttgcacatttaagatatgttactttaccaatttttaatggtaatcaactctgctactggcatgatgaaatagtacataactggtcattaattatgaacatttatttctccagtgcgtttttatgaagatctggttgaaaattgtatttctatgtaaactcaacgatatgtttggttttcctgaaaataaatgattttaaataaa

SEQ ID NO: 286777 - DNA, 3544 bp, Artificial Sequence
  derived and/or modified sequence
tggagggcgcaaggcgcggcgggggtgatgagcccttgggttctcgctccgactgctaaattcgcttggccgggtccaccttctcgtggcctcactcgccacacggatcagaatccggagcaggcagttctctctattctgaggctcctgcggctgccgcgctgacttccctgtgtgcgggagggaactctgggcaggctggttttcttggaatgtgtttacgatgttgaatgggacttgaacaggaagctggacgctgcagctggaactagcgtgccaaggtagagtaaggaagacttagctggtgttgggcttggcgggtccacttggtacgctgggcaaactccaacagcaagaattgaagacttaagggtttgagcagatggttttctacctaaattgaataattcaattacgtattctcagctagcatggatttgggtcatggaattaaagtagaaacgtatccggcatgacttctttgtgcttatcaaaagtgatcctgataaacagatcttgctctttcatgtaaagaagtaaaagttatttatgattccatctgatatacataggagagaaactgatagaagaattctgatggcaactgtatgatagaagctatataaagtcaagtgtccattttctttcaactatatttgagcatacccaggatttaagtcgtggaactgaacatttatttggctgatcctcatcatgaaccgtgcttttagcaggaagaaagacaaaacatggatgcatacacctgaagctttatcaaaacatttcattccctataatgcaaagtttcttggcagtacagaagtggaacagccaaaaggaacagaagttgtgagagatgctgtaaggaaactaaagtttgcaagacatatcaagaaatctgaaggccagaaaattcctaaagtggagttgcaaatatcaatttatggagtaaaaattctagaacccaaaacaaaggaagttcaacacaattgccagcttcatagaatatctttttgtgcagatgataaaactgacaagaggatattcactttcatatgcaaagattctgagtcaaataaacatttgtgctatgtatttgacagcgaaaagtgtgctgaagagatcactttaacaattggccaagcatttgacctggcatacaggaaatttctagaatcaggaggaaaagatgttgaaacaagaaaacagatcgcagggttacaaaaaagaatccaagacttagaaacagaaaatatggaacttaaaaataaagtacaagatttggaaaaccaactgagaataactcaagtatcagcacctccagcaggcagtatgacacctaagtcgccctccactgacatctttgatatgattccattttctccaatatcacaccagtcttcgatgcctactcgcaatggcacacagccacctccagtacctagtagatctactgagattaaacgggacctgtttggagcagaaccttttgacccatttaactgtggagcagcagatttccctccagatattcaatcaaaattagatgagatgcaggaggggttcaaaatgggactaactcttgaaggcacagtattttgtctcgacccgttagacagtaggtgctgacatcaagaacaagaaatcctgattcatgttaaatgtgtttgtatacacatgtcatttattattattactttaagataggtattattcatgtgtcaatgtttttgaatattttaatattttgaaaattttctcagttaaatttcctcaccttcactattgatctgtaatttttattttaaaaacagcttactgtaaagtagatcatacttttatgttcctttctgtttctactgtagatgaatttgtaattgaaagacatattatacaaatacctgccttgtgtctgagttctatttagttagcatcttgaaatttgtattcattttccagatggctagtttattaatgatttcccaaaagccataccttaaagataactttttaaattctgaagagacatgccaatgtcaaactaaacatgttctgtttttaaaccaacaaacatgttactattcattggacagatatcattttatgtataaatactgttcacatcactgggaaaatgtaaactttaaacataatgccacaaggtcactaatttctagcaggtaaaattataaggatataaattccaataataaaccaaatgtatttagagtatttattagtaaatgcaaggtgatgttagttatgatcagttatactctaaatatttaatttgttttataaaggtagtgaaaaaatgaaaatttgctatttattaaaaaacattaaatttcattccaaatgagataagtgatattactataacatctaagcatcatctgatttgatattccctaaaaaacatttggaatatatgctatctatagattcagtatctactacccatatttactttaccaaatatatttctcctcactgcataaggactactcttctcatattttcttctttgatgaagatatttttcaccaaagtttattttgtgatgccctcttggttttgatactttaaaatctgtggcacccgttctacatgaattatcaatatttggtaaattcaatctgtatttgttttgttaaagtcaaaaatctcattttccaaaaaaaaaaaaaaaacccagttactgctcagtttagtcttgaacatgagcaataaaattctcttgcatttcattattgatgtgctgatgaacctggacttttaaaaatatttgtttcctatacctttaccctttacctaacagactaatttgtactcagtaaaacaaaaatttatggtcaaaatttctaacttggttcatcacattataagataaataaattaaattaatgaaaatgtgacttagagtaggggtagccctcaaaaatagatttatcatttactcattggaattttcttcaagtgttaaaggtacattttcactaggaaaagaaatcaaatatgcttatgcaatatatatttgtgtgtttttccttaatgttatatggtatatatgagccttcttgtttagtttcttttatctgctaagttgtaccttaattagagggcaatatatgtttcataaagaagagtctttataattttgtttgtcagatagtattttggaatttgtataataaggatgtttagaagccatataagtggctttttttaacagatagaatttgtatttttattgtactttaaaaagatttatgtaataggtatatatttagtggccatttattatcaatggtaacacaatggagtactaagatggtatttgcacatttaagatatgttactttaccaatttttaatggtaatcaactctgctactggcatgatgaaatagtacataactggtcattaattatgaacatttatttctccagtgcgtttttatgaagatctggttgaaaattgtatttctatgtaaactcaacgatatgtttggttttcctgaaaataaatgattttaaataaa

SEQ ID NO: 286778 - DNA, 1932 bp, Artificial Sequence
  derived and/or modified sequence
agactgagctcagtagccaggcatgaaagagactgggcaagttgcaggggctaattggaaaggggctgtcggttgcacttggggtttaaacaagaggtttcttttgcaatgagaatttttaggtggctaagatcagtcttcttggcaaaaaaataaactaagcatagagtgcagttggatatgaccgaggaaattacaaaaagggctccaggagcaaagtctgaactttccttatcagtgttgcagtggaatagctgggggcctgatgctgtttgtgctgatcatactttgcaaatgcccacactttgttgctgtttgtctccttggacgaggtttgctgcaacttcaattccttgacttcggccttactttgttttcatagcagcaagaattgaagacttaagggtttgagcagatggttttctacctaaattgaataattcaattacgtattctcagctagcatggatttgggtcatggaattaaagtagaaacgtatccggcatgacttctttgtgcttatcaaaagtgatcctgataaacagatcttgctctttcatgtaaagaagtaaaagttatttatgattccatctgatatacataggagagaaactgatagaagaattctgatggcaactgtatgatagaagctatataaagtcaagtgtccattttctttcaactatatttgagcatacccaggatttaagtcgtggaactgaacatttatttggctgatcctcatcatgaaccgtgcttttagcaggaagaaagacaaaacatggatgcatacacctgaagctttatcaaaacatttcattccctataatgcaaagtttcttggcagtacagaagtggaacagccaaaaggaacagaagttgtgagagatgctgtaaggaaactaaagtttgcaagacatatcaagaaatctgaaggccagaaaattcctaaagtggagttgcaaatatcaatttatggagtaaaaattctagaacccaaaacaaaggaagttcaacacaattgccagcttcatagaatatctttttgtgcagatgataaaactgacaagaggatattcactttcatatgcaaagattctgagtcaaataaacatttgtgctatgtatttgacagcgaaaagtgtgctgaagagatcactttaacaattggccaagcatttgacctggcatacaggaaatttctagaatcaggaggaaaagatgttgaaacaagaaaacagatcgcagggttacaaaaaagaatccaagacttagaaacagaaaatatggaacttaaaaataaagtacaagatttggaaaaccaactgagaataactcaagtatcagcacctccagcaggcagtatgacacctaagtcgccctccactgacatctttgatatgattccattttctccaatatcacaccagtcttcgatgcctactcgcaatggcacacagccacctccagtacctagtagatctactgagattaaacgggacctgtttggagcagaaccttttgacccatttaactgtggagcagcagatttccctccagatattcaatcaaaattagatgagatgcaggaggggttcaaaatgggactaactcttgaaggcacagtattttgtctcgacccgttagacagtaggtgctgacatcaagaacaagaaatcctgattcatgttaaatgtgtttgtatacacatgtcatttattattattactttaagataggtattattcatgtgtcaatgtttttgaatattttaatattttgaaaattttctcagttaaatttcctcaccttcactattgatctgtaatttttattttaaaaacagcttactgtaaagtagatcatacttttatgttcctttctgtttctactgtagatgaatttgtaattgaaagacatattatacaaat

SEQ ID NO: 286779 - DNA, 1376 bp, Artificial Sequence
  derived and/or modified sequence
cccggccgggagcgacccggagtccccagccccgcgtcccagctgccgccagcgccagttttggattcggcggattaggaagaggagggaggggggagagagcgcgaagagggaggggaccgaagctggagggtcccgagtccagcgccgtgttggcgtagagaaactttccctctcggcctcggagacggcgccccggccgtgccggagtggagatcgccaggctcggaggaaccggcagctctccacgcccctgcccgaagcctgacccgactgcctctctcagtgagttatttatgattccatctgatatacataggagagaaactgatagaagaattctgatggcaactgtatgatagaagctatataaagtcaagtgtccattttctttcaactatatttgagcatacccaggatttaagtcgtggaactgaacatttatttggctgatcctcatcatgaaccgtgcttttagcaggaagaaagacaaaacatggatgcatacacctgaagctttatcaaaacatttcattccctataatgcaaagtttcttggcagtacagaagtggaacagccaaaaggaacagaagttgtgagagatgctgtaaggaaactaaagtttgcaagacatatcaagaaatctgaaggccagaaaattcctaaagtggagttgcaaatatcaatttatggagtaaaaattctagaacccaaaacaaaggaagttcaacacaattgccagcttcatagaatatctttttgtgcagatgataaaactgacaagaggatattcactttcatatgcaaagattctgagtcaaataaacatttgtgctatgtatttgacagcgaaaagtgtgctgaagagatcactttaacaattggccaagcatttgacctggcatacaggaaatttctagaatcaggaggaaaagatgttgaaacaagaaaacagatcgcagggttacaaaaaagaatccaagacttagaaacagaaaatatggaacttaaaaataaagtacaagatttggaaaaccaactgagaataactcaagtatcagcacctccagcaggcagtatgacacctaagtcgccctccactgacatctttgatatgattccattttctccaatatcacaccagtcttcgatgcctactcgcaatggcacacagccacctccagtacctagtagatctactgagattaaacgggacctgtttggagcagaaccttttgacccatttaactgtggagcagcagatttccctccagatattcaatcaaaattagatgagatgcaggaggggttcaaaatgggactaactcttgaaggcacagtattttgtctcgacccgttagacagtaggtgctga

SEQ ID NO: 286780 - DNA, 915 bp, Artificial Sequence
  derived and/or modified sequence
atgaacagagccttcagcaggaagaaggacaagacctggatgcacaccccagaggccctgagcaagcacttcatcccctacaatgccaagttcctgggcagcacagaggtggagcagcccaagggcacagaggtggtgagagatgctgtgaggaagctgaagtttgcccggcacatcaagaagtctgagggccagaagatccccaaggtggagctgcagatcagcatctatggagtgaagatcctggagcccaagaccaaggaggtgcagcacaactgccagctgcaccgcatctccttctgtgctgatgacaagacagacaagaggatcttcaccttcatctgcaaggacagcgagagcaacaagcacctgtgctacgtgtttgacagcgagaagtgtgccgaggagatcaccctgaccatcggccaggcctttgacctggcctacaggaagttcctggagagcggcggcaaggatgtggagaccaggaagcagattgctggcctgcagaagaggatccaggacctggagacagagaacatggagctgaagaacaaggtgcaggacctggagaaccagctgcgcatcacccaggtgtctgcccccccagctggctccatgacccccaagagccccagcacagacatctttgacatgatccccttcagccccatcagccaccagagctccatgcccaccagaaatggcacccagcccccacctgtgcccagccgcagcacagagatcaagagggacctgtttggagctgagccctttgaccccttcaactgtggggctgctgacttccccccagacatccagagcaagctggatgagatgcaggagggcttcaagatgggcctgaccctggagggcaccgtcttctgcctggaccccctggacagccgctgctag

SEQ ID NO: 286781 - DNA, 915 bp, Artificial Sequence
  derived and/or modified sequence
atgaaccgggccttcagccggaagaaggacaagacctggatgcacactcccgaagcactgtccaaacacttcattccctacaacgccaagttcttgggcagtacagaagtggaacagccgaagggaaccgaggtcgtgagagatgccgtcaggaagctcaagtttgcgagacacataaaaaaatcagaaggccaaaagatccctaaagtggaattgcagatcagtatttacggagtgaagattttagagcccaaaaccaaggaggttcagcataattgtcagctgcacagaatcagtttctgtgcagatgacaaaactgataaacgaatttttacatttatctgtaaagactcagaaagtaacaaacacctttgttacgttttcgacagcgagaaatgtgcggaagaaattacactaacaatagggcaagctttcgatctcgcataccgaaagtttctagagtctgggggtaaagatgtggagacacgcaagcagatagccggcctgcagaagcgcatccaagaccttgaaacagagaacatggaactgaagaataaagtgcaagacttggagaatcagcttcggatcacacaggtgtctgccccacccgctggcagcatgacacctaagtcaccgtccactgatatctttgacatgataccgttttcaccaatttcccatcaatcctccatgccaaccaggaatggaacccaacccccaccggtcccgtcccggtccacagaaatcaagcgggacctttttggagcagagccgttcgaccctttcaattgtggagctgccgactttcccccagatatccagtccaagctggatgaaatgcaggagggctttaagatgggcctaacattggagggaactgtgttctgcctggacccactcgactcaagatgttag

SEQ ID NO: 286782 - DNA, 915 bp, Artificial Sequence
  derived and/or modified sequence
atgaaccgggccttcagccggaagaaggacaagacctggatgcacacccccgaagccctctctaagcacttcatcccctacaacgccaaatttctgggctctacagaagtagaacaacctaaagggacagaagtcgtccgagacgctgttagaaagctcaagtttgcacgccacattaaaaaaagcgaagggcaaaagatccccaaggtggagctgcagattagtatttacggagtgaaaatcctcgagcctaagacaaaagaggtccagcataactgccagctgcacagaattagcttctgcgcagacgacaagacagacaagcgtatctttacctttatttgcaaggactctgagagtaacaaacacttgtgttatgtcttcgatagtgaaaagtgcgcggaagagattactctcacgattggacaggcatttgatctggcctataggaaattcctggagagcggcggcaaagatgttgaaactcggaagcagattgccgggctccagaagagaattcaagacctggaaacagagaatatggaactgaagaataaagttcaggatctcgagaatcagttacgtattacacaagtatctgctccaccagcgggtagcatgaccccaaaatcaccttcaacagatatcttcgatatgattcctttctccccaatctcgcatcagtccagcatgcccactcggaacggaacacagccccctcccgtgccgtcacgaagtactgaaatcaaaagggatctgttcggtgccgagccgttcgatccttttaactgtggtgcggccgacttccctccagatatccaatctaagctcgatgaaatgcaggagggattcaaaatggggctgacacttgagggcactgtgttttgccttgacccacttgatagccggtgttag

SEQ ID NO: 286783 - DNA, 915 bp, Artificial Sequence
  derived and/or modified sequence
atgaaccgggccttcagccggaagaaggacaagacctggatgcacactccagaagctttatctaagcatttcatcccttataacgccaagttcctgggtagcaccgaagtggagcagcccaaggggacagaagtggttcgggacgctgtccgcaaactcaaattcgcccggcacatcaagaagagcgagggacagaaaatccccaaggtggaactccagatctctatctatggcgtaaagattctcgagcctaaaaccaaggaggtgcagcataactgccagctgcataggatcagtttctgcgctgacgacaagactgataagagaatctttacatttatttgtaaagattccgagtccaataagcacctatgctatgtgtttgacagcgaaaagtgcgctgaagagataacgctgacaataggacaggccttcgatcttgcttaccggaagttcctggaaagtggaggcaaggacgttgaaacaaggaagcaaatcgctggtctgcagaagcgaatccaagacctcgagactgagaatatggagctgaaaaataaagtccaggatttggaaaatcagctgagaataacacaggtctccgccccacccgcaggctcaatgacaccaaaatccccatccacagacatattcgatatgatcccgttcagtcctatttctcatcaatccagtatgcccacccggaatggcacccagcccccaccagttccttccagaagtactgagattaagcgcgaccttttcggcgctgagccctttgacccattcaattgcggggctgccgattttcccccagatatccaaagcaaactggatgagatgcaggagggtttcaaaatgggcttgaccctagaagggaccgtattctgcctggatcccctggactctcggtgttag

SEQ ID NO: 286784 - DNA, 915 bp, Artificial Sequence
  derived and/or modified sequence
atgaaccgggccttcagccggaagaaggacaagacctggatgcacaccccagaagctctgagcaaacacttcatcccatataatgccaaattcctggggagcaccgaggtggagcagccaaaaggcacggaggtggtgcgcgacgcagtacggaagctgaagttcgcccgtcatataaagaagtcggagggacagaagatcccgaaagttgaactgcagatcagcatttatggtgtgaagatcctagaacccaagaccaaggaagtccagcataattgtcaactgcacagaatctccttttgtgcagacgataagaccgacaaacggatatttacttttatttgtaaggatagcgaatccaacaagcacttgtgttacgtgttcgatagcgaaaagtgcgcggaggagatcaccttgaccatcggccaagccttcgatttagcctacagaaaatttcttgaaagcggaggaaaagacgtggaaactcgaaagcagatcgcggggcttcagaagagaatccaagacttggagacagagaacatggagcttaaaaataaagtacaagacctcgaaaaccaactgagaattacccaagtctctgcgcctcccgccggttctatgacaccaaagtccccctctaccgatatctttgatatgatccctttttctccaatctcccaccagtcatctatgcctactcgcaatggaacccagccccctccggttccaagccgcagcaccgagattaaaagagacctgtttggagctgagcctttcgatccatttaattgtggagcagcagacttcccacctgacatccagagtaagctggatgaaatgcaggagggttttaagatgggtctgacgctcgaggggacagtgttctgtcttgacccactcgactctagatgctag

SEQ ID NO: 286785 - DNA, 915 bp, Artificial Sequence
  derived and/or modified sequence
atgaaccgggctttttcccgaaagaaagacaagacatggatgcacactccggaggccctgagcaaacacttcatcccctataacgctaagttcctaggatctactgaggttgagcagcctaaaggaactgaagtggtgcgcgatgccgttcgcaagctcaaattcgcccgacacattaaaaaaagcgaggggcaaaagatcccgaaggtggagctacagatctccatatacggggttaagatcctggagccaaaaacaaaagaagtgcagcataactgccaacttcaccgaatcagcttctgtgccgatgacaagacggataagagaatcttcaccttcatttgtaaagattccgaaagcaataagcacctctgctacgtctttgattctgaaaagtgcgctgaggaaatcacactgacaatcgggcaggcattcgatctggcctacaggaaattcctggaatccggcggtaaagatgtcgagacacgaaagcaaatcgccggtctccaaaagaggatccaagaccttgaaaccgaaaacatggaattaaagaacaaggtgcaggacctcgagaatcagctgcgcattacacaggtgtctgctcctcccgctggctctatgacgcccaaatctccaagcactgacatatttgacatgattcccttttctccaatctctcaccagtcaagcatgcctacacgcaatggtacacagccacctcctgtcccctctagatccaccgagattaaaagagacctgtttggcgcagagccatttgaccctttcaactgcggggctgccgatttcccccctgatatccagtccaaactggatgagatgcaggagggatttaaaatgggactgacattggaggggactgtgttctgcctcgacccactggattctaggtgctag

SEQ ID NO: 286786 - DNA, 915 bp, Artificial Sequence
  derived and/or modified sequence
atgaatcgtgctttcagccggaagaaagacaaaacgtggatgcacacaccagaggctctctccaagcatttcattccctataacgccaagtttctgggcagcacagaggtagagcagcccaagggcacagaagtggtgagagacgcagtgaggaagctgaaattcgcgaggcatataaagaaaagcgaggggcagaaaatacccaaggtggagctgcagatctctatttacggagttaagatactggagccgaaaactaaggaggttcaacacaattgccagctccatcggatttccttttgtgccgatgataaaacagataaacggatcttcacatttatttgtaaagatagcgagtctaacaaacacctgtgttatgtcttcgacagcgaaaagtgcgcggaggaaataaccctcaccatagggcaagcctttgatctggcataccgcaagttcctggaaagcggtgggaaagacgtcgaaactagaaagcagattgcaggtttgcaaaaaagaattcaggacctagagaccgaaaacatggaactcaagaataaagtacaagacctggagaaccagctccgcattacacaggtgagcgctcctccagctggttccatgacccccaaatcccctagcacagacatcttcgatatgatcccattctctccaatttcccaccaatcaagtatgcccacaagaaatggtactcagccgccacctgtaccctctagatcaacggaaataaaacgggacctgtttggtgctgaaccattcgatccgtttaattgcggggcagccgacttccctcccgacatccagagcaagctggatgaaatgcaggaaggctttaaaatgggactaaccttagaagggactgtcttctgtctagacccactagactcaaggtgctag

SEQ ID NO: 286787 - DNA, 915 bp, Artificial Sequence
  derived and/or modified sequence
atgaacagagctttcagcagaaagaaggataagacatggatgcacacccctgaggcactctccaaacatttcataccctataatgccaaattcctgggctctactgaagtggagcaaccgaagggaactgaggttgtcagagatgctgttcgtaagctgaagtttgctcggcatatcaaaaaaagcgagggtcagaaaatacctaaagtggaactgcagataagcatatacggcgtgaaaatcctcgagcccaagacaaaagaggtgcagcacaactgccagctgcataggatcagcttttgtgccgatgacaaaacagacaagcgcatctttactttcatatgcaaagacagcgagagtaacaaacatctgtgctacgtgttcgatagcgagaagtgtgccgaggaaatcactctgaccattggccaggcttttgatcttgcctaccggaaattcctcgaatctggcggtaaggacgtagagactcgtaaacagatcgctggtctccaaaaacgaatacaggacctcgagacagaaaacatggagcttaaaaacaaggtgcaggacctagagaatcagctcaggattacacaggtttccgctccaccagccggttctatgactcctaaatcaccaagtaccgacattttcgacatgatcccctttagtcctatctctcaccaatccagcatgcccactaggaatgggacgcaacccccacccgtaccctcacggtccaccgaaattaaaagggatctcttcggggctgagcccttcgatccgttcaattgtggcgcagccgacttccctccggatatccagtcaaagctggatgagatgcaggaaggtttcaaaatggggctcacactcgaagggaccgtgttttgcctggaccccctggactctagatgttag

SEQ ID NO: 286788 - DNA, 915 bp, Artificial Sequence
  derived and/or modified sequence
atgaaccgcgctttctctagaaaaaaagataagacctggatgcacacccctgaggccctttctaaacactttatcccctacaacgccaaatttctgggatcgactgaggtggaacaacccaagggcaccgaagtggttcgggatgcagtgaggaagctcaaattcgccagacatattaaaaagagtgaaggtcagaaaatcccgaaagtggagctgcagatcagtatctatggtgtgaagattctggagcccaagacaaaagaggtgcagcacaactgtcagctacatcgcatatcattttgcgcagacgataaaacagataaacggatattcaccttcatatgtaaggactccgagtccaataaacacctgtgctatgtgtttgactctgagaaatgcgccgaggaaatcaccctcactatcggacaagctttcgacctcgcatataggaagtttctggaatcggggggtaaggacgtcgagactagaaaacagattgccggactgcagaagcgcattcaggatctggaaaccgaaaacatggagctcaagaacaaggtacaagacctagaaaaccagctgagaattacacaggtgagcgcaccgcctgccggatcaatgacgcccaaatctcctagtacagacattttcgacatgataccatttagtccgatttcacaccaatcgtcgatgcctacgagaaacgggacccagcccccacccgtccccagtcgctcaacagagattaagcgggacctatttggagccgaaccgtttgatccatttaactgtggcgctgcagatttcccacccgatattcagtcaaaactagacgagatgcaagagggattcaagatgggcctaaccctggaggggaccgtcttttgcctggaccctctggactcaagatgctag

SEQ ID NO: 286789 - DNA, 915 bp, Artificial Sequence
  derived and/or modified sequence
atgaacagagccttcagcagaaagaaggacaagacctggatgcacacccccgaggccctgagcaagcacttcatcccctacaacgccaagttcctgggcagcaccgaggtggagcagcccaagggcaccgaggtggtgagagacgccgtgagaaagctgaagttcgccagacacatcaagaagagcgagggccagaagatccccaaggtggagctgcagatcagcatctacggcgtgaagatcctggagcccaagaccaaggaggtgcagcacaactgccagctgcacagaatcagcttctgcgccgacgacaagaccgacaagagaatcttcaccttcatctgcaaggacagcgagagcaacaagcacctgtgctacgtgttcgacagcgagaagtgcgccgaggagatcaccctgaccatcggccaggccttcgacctggcctacagaaagttcctggagagcggcggcaaggacgtggagaccagaaagcagatcgccggcctgcagaagagaatccaggacctggagaccgagaacatggagctgaagaacaaggtgcaggacctggagaaccagctgagaatcacccaggtgagcgccccccccgccggcagcatgacccccaagagccccagcaccgacatcttcgacatgatccccttcagccccatcagccaccagagcagcatgcccaccagaaacggcacccagcccccccccgtgcccagcagaagcaccgagatcaagagagacctgttcggcgccgagcccttcgaccccttcaactgcggcgccgccgacttcccccccgacatccagagcaagctggacgagatgcaggagggcttcaagatgggcctgaccctggagggcaccgtgttctgcctggaccccctggacagcagatgctag

SEQ ID NO: 286790 - protein, 163 aa, Artificial Sequence
  derived and/or modified sequence
MGSSLGLCLGKAPSSSQLFLFFAMGSDVQPGTEMEIVVEETISVRDCLKLMLKKSGLQGDAWHLRKMDWCYEAGEPLCEEDATLKELLICSGDTLLLIEGQLPPLGFLKVPIWWYQLQGPSGHWESHQDQTNCTSSWGRVWRATSSQGENRMGFQQPVHHKEK

SEQ ID NO: 286791 - DNA, 4257 bp, Artificial Sequence
  derived and/or modified sequence
gtcttttgaaatcaaatgactcaacaacagtaaagcatgtcctaaagcattcctggttcttctttgcaattatcctaaaatcgatggcacagcacttgattgacacaaataaaatccagcttccccggcctcagagatttcctgaatcttaccaaaatgaattggacaatcttgtcatggtcctatccgaccatgtgatttggaaatacaaggatgcacttgaagaaacaagaagggcaaaccacagcgttgccagatttctcaagcgctgctttacatttatggaccgagggtatgtgtttaagatggtcaacaattacatcagcatgttctcctccggtgaccttaagaccttgtgccagtataaatttgattttcttcaagaagtatgtcaacatgaacactttatccctttgtgtctgcccataagatcagcaaacattccagatcctttgacaccttcagaatcgactcaagagttacatgcatcagatatgcctgaatattcagtcacaaatgaattttgtcgcaaacacttcttaatcggaattctgctccgagaagttggctttgccctgcaggaagaccaagatgtcagacacttagctttagctgtcctaaaaaatctaatggctaagcattcatttgatgatcgatacagagagccaagaaagcaggcccagatagcaagtttatacatgcccctgtacggcatgctcctggacaatatgccaaggatttatctgaaggacctgtatccttttactgtcaatacatctaatcaggggtctagagatgatctaagcaccaatggaggatttcaaagccagacagctatcaaacatgcaaactctgtggatacatcattttctaaagatgttttaaattccatagcagcattttcatcaatagctatttctacagtaaaccatgctgactccagagcatctttagcaagtcttgactccaatccaagtaccaatgagaagagcagtgagaagacggacaactgtgaaaagatcccaagacccttgtctttgattggctcaactcttcgatttgacaagttagatcaagcagaaaccaggagtctcctgatgtgttttcttcacattatgaaaacgatttcgtacgagactctgattgcctactggcagagagctcccagcccagaggtgtccgacttcttcagcatcttggacgtttgtcttcaaaatttcagatacctaggaaaacgcaacataataagaaaaattgctgctgcatttaaatttgtgcagtccacccagaacaatggaactctcaaaggatccaatccttcctgccagacatcaggtctcttgtcacaatggatgcactccacttccagtcatgaaggccataagcagcacagatcacaaactttacctataattcgaggcaaaaatgcactttctaaccccaaactcttacagatgttagacaataccatgaccagcaactccaatgaaatagacatcgtgcatcatgtagacactgaggccaatatagctacggaggtttgcctcactattctggacctgttatccctcttcacacagactcatcagagacaactccaacaatgtgactgtcaaaattcattgatgaaaagggtctttgatacctacatgctctttttccaagtcaatcagtcagccacagcgctgaagcatgtgtttgcctccttgagactgtttgtatgcaagtttccttcagcgttctttcaagggcctgctgacctctgtggatcattctgttacgaagtcctaaaatgctgtaaccacaggtcacggtcaactcagacagaagcctcagcccttctgtactttttcatgaggaagaattttgaatttaacaagcagaagtcaattgtccggtcccacttacaactcatcaaagctgtgagccagttaatagccgatgctgggattggaggctctcggtttcaacattcgcttgcaattaccaataatttcgccaatggagataagcaaatgaaaaacagcaatttcccagcagaggtgaaggacctgactaagcgtataaggactgttttgatggccacagctcagatgaaggagcacgagaaggaccccgagatgctggtggatctccagtacagcctggcaaactcctacgcaagcactcctgaactacgcaggacctggctggaaagtatggccaagattcatgccagaaacggagatttatctgaggctgccatgtgttacatccatattgctgctctcattgcagagtatctgaaaagaaagggcatgttctctatgggatggccagcttttttgagcattacaccaaacattaaggaagaaggagcgatgaaagaggattctggaatgcaagatacaccatacaatgagaatatcctggtggagcagctatacatgtgtgtggagtttctctggaagtctgagcgatatgaactcattgctgatgtcaacaagcccatcattgctgtctttgagaaacaacgagacttcaaaaaattgtcagatctctactacgacattcatcggtcatatctgaaagtggcagaggtggtgaattcggagaagcggctgtttggtcgctactatcgtgtggcattttatgggcagggtgttggcttttttgaagaagaagaaggtaaagagtatatttataaagagcctaagctgacaggtctgtccgagatttcccaaagattactcaagctctatgcagataaatttggagcagacaatgtgaagataatccaggattccaacaaggtaaaccccaaggatttggaccccaaatatgcctacatccaggtgacctatgtgacgccgttctttgaggaaaaggaaatcgaagaccggaagacagatttcgaaatgcaccacaacatcaaccgctttgtcttcgagacacccttcacgctgtcgggcaagaagcacggtggggtggcggagcagtgcaagcggcggacgatcctgacaacgagtcacctgttcccctacgtgaagaagagaatacaagtaattagccaatcgagcacagaactgaatccaattgaagtggcaattgacgagatgtccaagaaggtttctgagcttaatcagctttgcacaatggaagaagtggacatgatcagactgcagctcaaactgcaaggaagtgtcagcgtgaaggttaatgctgggccaatggcctatgcacgagcttttcttgaagaaaccaatgcaaagaagtaccctgacaaccaagtaaagcttttgaaggagatcttcaggcaatttgcagatgcatgtgggcaggcccttgacgtgaatgagcgcctcatcaaagaggaccagctggagtaccaggaagaactgaggtcccactacaaggacatgctcagcgaactctccacagtcatgaatgagcagctctgtcgaggtccgtgtttatacagcttctgttcctctgtgtctagtatttccctcagtactgtaagcaaaagtgattacgggcagggacgacctgtcaaagcgcggagtggaccaaacctgcactcgagtaattagcaaagcaactccggccctacccacggtctccatctcatctagtgctgaagtctgagggctctgcagcatcagacccacctctaagagaactttctgaatttgcagctaatctcggggaagagaaagataggtttaatttatttgaagttttcatggtgttaatatttttgtttacctcgctagcttcagaattttgccaacctctgaatttgcacattttgtataatttttttttctttgagcagtgttgatcaagccaggttgaatatttgccatgaaattccagtgaatgtgtagctcaaatgcaaaccctaagtttgctgtcagttattgtatggtcagtaccccagtcctagtacacatattttaaaggttaaagtgaatgtttttgtaacatttaagcatatttcagatgtaaataaaagattgtaaaatatacggtttttaccaaatttaaaagatcctttttagttaatactatgacagtactaaaaatatatgaataacatttcagataccattatattaaaatatttgtgtatgtgtacaaaagcgttgataaatactaatctttaaagtttgtggagttcctttatttgtaatatatgtgctcttaaaagcaatgggatgtgaaattatgaaagtattttattgttcatagaaataaaaaacacagttactttgc

SEQ ID NO: 286792 - protein, 700 aa, Artificial Sequence
  derived and/or modified sequence
MTSNSNEIDIVHHVDTEANIATEVCLTILDLLSLFTQTHQRQLQQCDCQNSLMKRVFDTYMLFFQVNQSATALKHVFASLRLFVCKFPSAFFQGPADLCGSFCYEVLKCCNHRSRSTQTEASALLYFFMRKNFEFNKQKSIVRSHLQLIKAVSQLIADAGIGGSRFQHSLAITNNFANGDKQMKNSNFPAEVKDLTKRIRTVLMATAQMKEHEKDPEMLVDLQYSLANSYASTPELRRTWLESMAKIHARNGDLSEAAMCYIHIAALIAEYLKRKGMFSMGWPAFLSITPNIKEEGAMKEDSGMQDTPYNENILVEQLYMCVEFLWKSERYELIADVNKPIIAVFEKQRDFKKLSDLYYDIHRSYLKVAEVVNSEKRLFGRYYRVAFYGQGVGFFEEEEGKEYIYKEPKLTGLSEISQRLLKLYADKFGADNVKIIQDSNKVNPKDLDPKYAYIQVTYVTPFFEEKEIEDRKTDFEMHHNINRFVFETPFTLSGKKHGGVAEQCKRRTILTTSHLFPYVKKRIQVISQSSTELNPIEVAIDEMSKKVSELNQLCTMEEVDMIRLQLKLQGSVSVKVNAGPMAYARAFLEETNAKKYPDNQVKLLKEIFRQFADACGQALDVNERLIKEDQLEYQEELRSHYKDMLSELSTVMNEQLCRGPCLYSFCSSVSSISLSTVSKSDYGQGRPVKARSGPNLHSSN

SEQ ID NO: 286793 - DNA, 2103 bp, Artificial Sequence
  derived and/or modified sequence
atgacaagtaacagtaatgagatagatattgtccaccacgttgacaccgaagctaacattgctacagaggtctgcctaaccatccttgatctcctttctctgttcactcagactcaccagagacaactgcagcaatgcgattgtcaaaactcacttatgaagcgagtgttcgacacctacatgctgtttttccaagtcaatcaaagcgccacagctctgaagcatgtttttgcgagcctgagactgtttgtttgcaaattcccatccgccttcttccaaggccccgcggacctctgtggtagtttctgctacgaggtcctcaaatgctgcaatcatcgcagccgatctactcagaccgaggcctctgccttgctttattttttcatgcggaaaaattttgagtttaataaacagaagtccatcgtaagatcccacttgcaattaatcaaggccgtgtctcagcttatcgcggatgcaggaatcggaggctcgcggttccagcatagtcttgccatcaccaataatttcgcaaacggagataaacagatgaaaaactccaattttcctgctgaggttaaggatctgactaaaaggattcgtacagttctcatggcaaccgctcagatgaaggagcatgagaaggatccagagatgttggtggacctgcaatattctcttgccaactcgtatgcctccacaccagagctgagacgtacatggctggaaagcatggcaaagatccatgcacgtaacggggacctgtctgaagctgccatgtgctacatacacattgccgctctgatcgcagaatatttaaagagaaaaggcatgttcagcatgggctggcccgccttcctgtctatcacaccaaatattaaggaggagggcgcgatgaaggaagattccggcatgcaagataccccttacaacgagaatattctggtggagcagctgtacatgtgtgtagagtttctgtggaaaagtgaacgttatgaattaattgctgacgttaacaagcctatcatcgctgtgtttgagaagcagagagacttcaaaaaattgtctgatttatactacgatatccatcggtcatacctgaaggtggctgaggttgtgaactccgagaagcggttgttcgggagatactatagagtggcgttctacgggcagggcgtcggattttttgaggaggaggaagggaaagagtacatatacaaggagccaaagctgaccggactctcagagatatcacaaaggctgctcaagctctacgccgataaatttggagccgacaacgtcaagataatacaggactccaataaggtgaatcccaaagatctggacccaaaatatgcatacatccaagtaacgtacgtgacaccgtttttcgaagaaaaggagatcgaggatagaaagactgacttcgagatgcaccacaatattaacagatttgttttcgagacgccttttacactctcaggcaagaaacacggcggcgtggccgagcagtgtaagcgccgcacaattctgacaacaagtcacctgttcccatacgtgaaaaagaggattcaggtcatcagtcagtcttctactgagcttaatcctattgaagtggcaatcgatgagatgtctaagaaggtgagtgaacttaaccagctttgcacaatggaagaagttgatatgatcaggcttcagttgaagctgcagggttcagtaagtgtgaaggtgaatgctgggcctatggcgtacgcacgtgcatttctcgaagagaccaatgcgaaaaaatatccagataaccaagtgaaactgctcaaggagattttccgacagttcgcggacgcctgcgggcaggcactagacgtcaatgagcggcttatcaaggaggaccagttggaatatcaggaggagctgcgctctcattacaaagacatgctcagcgagctatctacagtcatgaatgagcagctgtgtcgcggcccatgcttatatagcttttgtagtagtgtgagctccatttcccttagcacggttagcaaatcagactacggccaagggagacctgttaaagcacggtctggacctaaccttcatagttccaactag

SEQ ID NO: 286794 - DNA, 2103 bp, Artificial Sequence
  derived and/or modified sequence
atgaccagcaacagcaatgaaattgacatcgtgcaccacgtggacacagaggccaacatcgccacagaggtgtgcctgaccatcctggacctgctgagcctcttcacccagacccaccagaggcagctgcagcagtgtgactgccagaacagcctgatgaagagggtgtttgacacctacatgctgttcttccaggtgaaccagagcgccacagccctgaagcacgtgtttgccagcctgcggctgtttgtgtgcaagttccccagcgccttcttccagggccctgctgacctgtgtggcagcttctgctatgaggtgctgaagtgctgcaaccacaggagccgcagcacccagacagaggccagcgccctgctgtacttcttcatgaggaagaactttgagttcaacaagcagaagagcatcgtgcgcagccacctgcagctgatcaaggctgtgtcccagctgattgctgatgctggcattggaggcagccgcttccagcacagcctggccatcaccaacaactttgccaacggggacaagcagatgaagaacagcaacttccctgctgaggtgaaggacctgaccaagaggatcagaacagtgctgatggccacagcccagatgaaggagcacgagaaggaccctgagatgctggtggacctgcagtacagcctggccaacagctatgccagcaccccagagctgcggaggacctggctggagagcatggccaagatccacgccagaaatggagacctgtctgaggccgccatgtgctacatccacatcgccgccctgattgctgagtacctgaagaggaagggcatgttctccatgggctggccagccttcctgagcatcacccccaacatcaaggaggagggcgccatgaaggaggacagcggcatgcaggacaccccctacaatgaaaacatcctggtggagcagctgtacatgtgtgtggagttcctgtggaagtcagaaagatatgagctgattgctgatgtgaacaagcccatcatcgctgtgtttgagaagcagagggacttcaagaagctgagtgacctgtactatgacatccacaggagctacctgaaggtggccgaggtggtgaacagcgagaagaggctgtttggccgctactacagagtggccttctacggccagggcgtgggcttctttgaggaggaggagggcaaggagtacatctacaaggagcccaagctgaccggcctgtctgagatcagccagaggctgctgaagctgtatgctgacaagtttggagctgacaacgtgaagatcatccaggacagcaacaaggtgaaccccaaggacctggaccccaagtatgcctacatccaggtgacctacgtgacccccttctttgaggagaaggagattgaggacaggaagacagactttgagatgcaccacaacatcaacagatttgtgtttgagacccccttcaccctgagcggcaagaagcatggaggagtggccgagcagtgcaagaggaggaccatcctgaccaccagccacctgttcccctacgtgaagaagaggatccaggtgatcagccagagcagcacagagctgaaccccatcgaggtggccattgatgagatgagcaagaaggtgtctgagctgaaccagctgtgcaccatggaggaggtggacatgatccggctgcagctgaagctgcagggctctgtgtctgtgaaggtgaatgccggccccatggcctatgcccgggccttcctggaggagaccaatgccaagaagtacccagacaaccaggtgaagctgctgaaggagatcttccggcagtttgctgatgcctgtggccaggccctggatgtgaatgaaagactcatcaaggaggaccagctggagtaccaggaggagctgcggagccactacaaggacatgctgtctgagctgagcacagtgatgaatgagcagctgtgccggggcccctgcctgtacagcttctgcagctctgtgagcagcatcagcctgagcacagtgtccaagagtgactatggccagggccggcctgtgaaggcccggagcggccccaacctgcacagcagcaactag

SEQ ID NO: 286795 - DNA, 2103 bp, Artificial Sequence
  derived and/or modified sequence
atgaccagcaacagcaacgagatcgacatcgtgcaccacgtggacaccgaggctaacatcgcaaccgaagtctgtctgactatcttagatctgctaagtctgtttacccagacacatcagcgccagttgcagcagtgcgactgtcagaactcactgatgaagagagtctttgatacatatatgctgttctttcaggtgaatcaaagcgccaccgcattgaagcacgtgttcgcgagtctcaggctgtttgtctgcaaatttccatcagcattcttccaggggcccgccgacctgtgtggctccttctgctacgaagtcctgaagtgctgcaaccacagatctaggagcacccagacagaggcttcggccctcctatatttttttatgagaaagaattttgaatttaataagcagaagagtatcgtgagatcccacctgcaactgatcaaagctgtctctcaactgattgccgacgccggcatcggaggttctcgattccagcatagtttagccatcaccaacaactttgctaacggagacaaacaaatgaaaaatagtaactttccagccgaggtgaaggatttaaccaaaaggatacggacggttctgatggccaccgctcaaatgaaggagcatgaaaaggatccggagatgctggttgatctgcagtactctctggcaaactcatacgcatccactcccgaattacgcaggacatggctagaaagtatggccaagatccacgcgcgcaacggagatctgtcagaagccgctatgtgttatattcacattgcagccctcatagctgagtacctgaagcgtaaaggcatgtttagcatggggtggcccgctttcttgtcaatcacgcctaatatcaaagaagaaggagctatgaaagaagatagcggaatgcaagacaccccttacaatgaaaatatcctcgtcgagcaactttacatgtgtgtggagttcctttggaaaagcgagaggtatgaactgattgccgacgtgaataagccaatcatcgccgtctttgaaaaacaacgcgacttcaagaagttgtccgatctctattacgatatccatcgcagttacctcaaggtggctgaggtcgtcaactctgagaaaaggctttttgggcggtactaccgcgtagctttttatggccagggagtcgggtttttcgaagaagaggagggcaaggaatacatttacaaggaaccgaagctgaccggcctgtccgaaatatctcagcgtttgttgaagttatatgcagataaatttggcgcagataacgtgaaaattattcaggattccaataaagttaatccaaaggatttagacccgaaatacgcatatatccaggtgacgtacgtcacacctttctttgaagagaaggagatcgaggatcgtaagactgattttgaaatgcaccacaatattaatagattcgtgtttgagacgccttttacattgtccggtaagaagcatggcggagtggccgagcagtgcaaaagaaggacaattctgactacaagtcacctgtttccctacgtcaagaagcgcatacaggttatctcccagtctagcaccgaactcaatcccatcgaggtcgccatcgacgagatgagtaagaaggtctccgagcttaaccagctctgcaccatggaggaagtcgatatgatcagactacagcttaagctccaggggagcgtgagcgttaaggtgaacgctggtcctatggcctatgcacgcgctttcttggaagagaccaatgcgaagaaataccccgacaatcaggtgaaactgctgaaggagattttccgccagtttgccgacgcatgtggtcaggctctggacgtgaacgagaggctgattaaggaagatcagttagagtatcaagaggaactccggagtcattataaagacatgttgtcggaattgagtacagtgatgaacgagcaactgtgtaggggcccatgcttgtactcgttctgctctagtgtgtcctccataagcctcagcaccgtcagcaaatctgattacggtcagggcagacctgtgaaagccagaagtggtcctaatctgcacagttctaactag

SEQ ID NO: 286796 - DNA, 2103 bp, Artificial Sequence
  derived and/or modified sequence
atgacaagtaattccaatgagatagacattgtgcatcatgtcgatacagaggctaacatagcaacagaagtatgcttaacaattctggacctcttgtcccttttcacgcaaacccaccagagacagctgcagcagtgcgattgccagaatagcctgatgaaacgggtgtttgatacctacatgcttttcttccaagttaatcagtcagctacagcactcaagcatgtcttcgccagtctgcgcctcttcgtttgcaagttcccctcggctttctttcaggggccagcagatctgtgtggctcattctgctacgaagtgctcaagtgctgtaatcaccggtccagatcaacacagactgaagcatccgctttactctacttttttatgaggaagaatttcgagttcaacaaacaaaagtctattgtgaggagccatctgcagctgattaaagcagtttctcagctgatcgcagacgccggtatcggtggatcccgtttccagcactcactggctatcaccaataacttcgcgaatggggacaaacaaatgaaaaatagtaactttccagccgaggtgaaagatttaaccaagcggattagaactgttcttatggccacagcccagatgaaggagcatgagaaagatccagagatgttggtggatttgcagtactctctggctaacagctatgcttctactcccgaactgagaagaacttggttagagtccatggccaaaatccatgctcgcaacggcgatttatctgaggctgctatgtgttatatccacatcgccgctcttatcgcagagtatctaaaacgcaagggcatgttcagcatggggtggcctgccttcctgtcgattactcctaatataaaggaggaaggggctatgaaggaggatagtgggatgcaagacacaccatacaatgagaatattctagtagagcagctgtacatgtgtgtggagttcctatggaaaagcgaacggtacgaacttatcgccgacgttaacaaacccatcatcgctgtgttcgagaaacagagagatttcaagaaactgagcgatctatactacgatatacatcggtcatacctgaaggtcgccgaggtcgtgaatagcgaaaaacgactgtttggacgttactaccgggtggccttttacggccagggtgtcggattttttgaagaggaggaaggcaaggagtacatatataaggagcccaagttgacaggattgtccgagattagtcaacggctgctgaagctttacgccgataagtttggcgctgacaacgtaaaaataatccaggactcaaacaaagttaatccaaaggacttggacccaaaatacgcctacattcaagtgacctacgttaccccattctttgaggagaaggagatagaagaccgcaagacagatttcgaaatgcatcataatatcaacaggtttgtattcgaaacccctttcacgttgtccgggaagaagcatggcggtgttgctgagcaatgtaaacgcaggacaattcttactacttcacatttgttcccatacgtcaagaagagaatccaagtcatcagccagtctagcaccgagctgaatcccatcgaggtcgctatagacgaaatgagtaaaaaggtgtccgaactaaatcagctgtgcaccatggaggaagttgatatgatcagacttcagttaaagctgcagggcagcgtgtcggtgaaagtcaacgccggtcccatggcgtacgccagagctttcctagaggagactaacgcgaaaaagtaccccgataaccaagtaaaattgcttaaagagatcttccgccagttcgccgacgcctgcggacaggccctcgacgtaaacgaaaggctgattaaggaagatcagctggaataccaggaggaacttcgcagccactataaggacatgttaagtgagcttagcacagtgatgaacgagcagctttgccgcggaccgtgtttgtacagcttctgttcctcggtgtcatcaatctcactgagtacagtttccaagagtgactacggccagggaaggccagtgaaagctagatccggcccaaaccttcactcctcaaactag

SEQ ID NO: 286797 - DNA, 2103 bp, Artificial Sequence
  derived and/or modified sequence
atgaccagcaacagcaacgagatcgacatcgtgcaccacgtggacaccgaggccaacatcgccaccgaggtgtgcctgaccatcctggacctgctgagcctgttcacccagacccaccagagacagctgcagcagtgcgactgccagaacagcctgatgaagagagtgttcgacacctacatgctgttcttccaggtgaaccagagcgccaccgccctgaagcacgtgttcgccagcctgagactgttcgtgtgcaagttccccagcgccttcttccagggccccgccgacctgtgcggcagcttctgctacgaggtgctgaagtgctgcaaccacagaagcagaagcacccagaccgaggccagcgccctgctgtacttcttcatgagaaagaacttcgagttcaacaagcagaagagcatcgtgagaagccacctgcagctgatcaaggccgtgagccagctgatcgccgacgccggcatcggcggcagcagattccagcacagcctggccatcaccaacaacttcgccaacggcgacaagcagatgaagaacagcaacttccccgccgaggtgaaggacctgaccaagagaatcagaaccgtgctgatggccaccgcccagatgaaggagcacgagaaggaccccgagatgctggtggacctgcagtacagcctggccaacagctacgccagcacccccgagctgagaagaacctggctggagagcatggccaagatccacgccagaaacggcgacctgagcgaggccgccatgtgctacatccacatcgccgccctgatcgccgagtacctgaagagaaagggcatgttcagcatgggctggcccgccttcctgagcatcacccccaacatcaaggaggagggcgccatgaaggaggacagcggcatgcaggacaccccctacaacgagaacatcctggtggagcagctgtacatgtgcgtggagttcctgtggaagagcgagagatacgagctgatcgccgacgtgaacaagcccatcatcgccgtgttcgagaagcagagagacttcaagaagctgagcgacctgtactacgacatccacagaagctacctgaaggtggccgaggtggtgaacagcgagaagagactgttcggcagatactacagagtggccttctacggccagggcgtgggcttcttcgaggaggaggagggcaaggagtacatctacaaggagcccaagctgaccggcctgagcgagatcagccagagactgctgaagctgtacgccgacaagttcggcgccgacaacgtgaagatcatccaggacagcaacaaggtgaaccccaaggacctggaccccaagtacgcctacatccaggtgacctacgtgacccccttcttcgaggagaaggagatcgaggacagaaagaccgacttcgagatgcaccacaacatcaacagattcgtgttcgagacccccttcaccctgagcggcaagaagcacggcggcgtggccgagcagtgcaagagaagaaccatcctgaccaccagccacctgttcccctacgtgaagaagagaatccaggtgatcagccagagcagcaccgagctgaaccccatcgaggtggccatcgacgagatgagcaagaaggtgagcgagctgaaccagctgtgcaccatggaggaggtggacatgatcagactgcagctgaagctgcagggcagcgtgagcgtgaaggtgaacgccggccccatggcctacgccagagccttcctggaggagaccaacgccaagaagtaccccgacaaccaggtgaagctgctgaaggagatcttcagacagttcgccgacgcctgcggccaggccctggacgtgaacgagagactgatcaaggaggaccagctggagtaccaggaggagctgagaagccactacaaggacatgctgagcgagctgagcaccgtgatgaacgagcagctgtgcagaggcccctgcctgtacagcttctgcagcagcgtgagcagcatcagcctgagcaccgtgagcaagagcgactacggccagggcagacccgtgaaggccagaagcggccccaacctgcacagcagcaactag

SEQ ID NO: 286798 - protein, 249 aa, Artificial Sequence
  derived and/or modified sequence
MESRHPAVAEIACTCWALLHLANPEGRGHLCRPCHNREKAKGLGKYICQRCHLVIDEQPLMFRSDAYHPDHFNCTHCGKELTAEARELKGELYCLPCHDKMGVPICGACRRPIEGRVVNALGKQWHVEHFVCAKCEKPFLGHRHYEKKGLAYCETHYNQLFGDVCYNCSHVIEGDVVSALNKAWCVSCFSCSTCNSKLTLKNKFVEFDMKPVCKRCYEKFPLELKKRLKKLSELTSRKAQPKATDLNSA

SEQ ID NO: 286799 - DNA, 750 bp, Artificial Sequence
  derived and/or modified sequence
atggagagcagacaccccgccgtggccgagatcgcctgcacctgctgggccctgctgcacctggccaaccccgagggcagaggccacctgtgcagaccctgccacaacagagagaaggccaagggcctgggcaagtacatctgccagagatgccacctggtgatcgacgagcagcccctgatgttcagaagcgacgcctaccaccccgaccacttcaactgcacccactgcggcaaggagctgaccgccgaggccagagagctgaagggcgagctgtactgcctgccctgccacgacaagatgggcgtgcccatctgcggcgcctgcagaagacccatcgagggcagagtggtgaacgccctgggcaagcagtggcacgtggagcacttcgtgtgcgccaagtgcgagaagcccttcctgggccacagacactacgagaagaagggcctggcctactgcgagacccactacaaccagctgttcggcgacgtgtgctacaactgcagccacgtgatcgagggcgacgtggtgagcgccctgaacaaggcctggtgcgtgagctgcttcagctgcagcacctgcaacagcaagctgaccctgaagaacaagttcgtggagttcgacatgaagcccgtgtgcaagagatgctacgagaagttccccctggagctgaagaagagactgaagaagctgagcgagctgaccagcagaaaggcccagcccaaggccaccgacctgaacagcgcctag

SEQ ID NO: 286800 - DNA, 750 bp, Artificial Sequence
  derived and/or modified sequence
atggagtcccggcaccccgcagtcgccgaaattgcatgcacttgctgggccctgctacacctggccaaccccgagggcagaggacacttatgtaggccctgccacaaccgggagaaagcaaaggggctaggaaaatatatctgccaacgctgccatctggtgatcgacgaacaaccacttatgttcagatctgatgcatatcatcccgatcacttcaactgtacccactgtggcaaagaactgacggcggaggcacgagaacttaagggagagctgtattgtttgccatgccatgacaagatgggagtccctatatgcggtgcttgcaggagacctatcgagggacgagtggtaaacgccctgggcaagcaatggcacgtagagcactttgtttgtgctaaatgcgaaaagccctttctggggcatagacattacgagaagaagggtctcgcctattgcgaaactcactataatcagctgtttggcgacgtgtgctacaactgttctcacgtcattgaaggggacgtggttagtgctttaaacaaagcgtggtgtgtgagctgtttttcttgcagtacgtgcaactccaaacttaccctcaaaaacaaatttgtggaattcgacatgaaacccgtgtgcaagaggtgctatgaaaaatttcctcttgagttgaagaaaagactgaaaaagctatcggagctaacaagcaggaaagcacagcctaaggctaccgacttaaactctgcctag

SEQ ID NO: 286801 - DNA, 1617 bp, Artificial Sequence
  derived and/or modified sequence
cacagtgctgtgcaggatggagtccagacacccagcagtagcagaaatcgcctgtacgtgttgggcccttcttcatctggcaaaccccgaaggaagggggcatctctgccggccttgccacaaccgtgagaaggccaagggcctgggcaagtacatctgccagcggtgccacctggtcatcgacgagcagcccctcatgttcaggagcgacgcctaccaccctgaccacttcaactgcacccactgtgggaaggagctgacagccgaggcccgcgagctgaagggtgagctctactgcctgccctgccatgacaagatgggcgtccccatctgcggggcctgccgccggcccatcgagggccgagtggtcaacgcgctgggcaagcagtggcacgtggagcactttgtctgtgccaagtgtgagaagccattcctggggcaccggcactatgagaagaagggcctggcctactgcgagactcactacaaccagctcttcggggacgtctgctacaactgcagccatgtgattgaaggcgatgtggtgtcggccctcaacaaggcctggtgtgtgagctgcttctcctgctccacctgcaacagcaagctcaccctgaagaacaagtttgtggagttcgacatgaagcccgtgtgtaagaggtgctacgagaagttcccgctggagctgaagaagcggctgaagaagctgtcggagctgacctcccgcaaggcccagcccaaggccacagacctcaactctgcctgaaggccctcttgcgcagctgcctctcggcccctccgccttctcccctcctgctgtccatgcttggccccctcgtccccatccacctgtgccctccgcatcttaccctccctttctctttcctcattgccttctcccttcctgttccctcatctctgccttccccatgtctctcctctccttggccgtggcttctgtctgtgaggaggcaggagctggggagtgggagcctatgaccccacgtctgacagccatgtccacctgtgcccacagcttccgcccacagacctccagggacaggagcaaattgcaccacagctccccgcctggcctggccctccccaggcggctcagtggctcatgctgtcctgtgagagcccctgccccagagcggccccactaagcgcatgtggctcctgggctacccacagccagggcagcctgctggagccacagggccagggccatgcagatggaggcctctgggagccacctccaatccctcaccactcactcaaccagtggcacagtgtccttgtgcccacactgagccagcaagtcctgctgtccacacccacaagctacctggagggacaggacccacctccatccttcggaaggccttcctggaatcccaccttggcctccgccctcggttccgccccgcccctctccccccgaccttggggcttgtgtcgagcccttgggtggggccaggaggaggtgatggcgtcagaggaggtgtggtcagaggtgacttgttcccacctccagggaggacgcttcgtcttcggccagcgcagacctggtgtttgtttgttgggctcacgcttgcacaatgaaggcttgttcac

SEQ ID NO: 286802 - DNA, 867 bp, Artificial Sequence
  derived and/or modified sequence
gcattctgaacttcagcacaaggcaaacgcagaaccagggcttggaatttcgccgctatgcagctgcacccctgccacccaggagatctgaggctcctcagagctgggaggaccgggcatctctgccggccttgccacaaccgtgagaaggccaagggcctgggcaagtacatctgccagcggtgccacctggtcatcgacgagcagcccctcatgttcaggagcgacgcctaccaccctgaccacttcaactgcacccactgtgggaaggagctgacagccgaggcccgcgagctgaagggtgagctctactgcctgccctgccatgacaagatgggcgtccccatctgcggggcctgccgccggcccatcgagggccgagtggtcaacgcgctgggcaagcagtggcacgtggagcactttgtctgtgccaagtgtgagaagccattcctggggcaccggcactatgagaagaagggcctggcctactgcgagactcactacaaccagctcttcggggacgtctgctacaactgcagccatgtgattgaaggcgatgtggtgtcggccctcaacaaggcctggtgtgtgagctgcttctcctgctccacctgcaacagcaagctcaccctgaagaacaagtttgtggagttcgacatgaagcccgtgtgtaagaggtgctacgagaagttcccgctggagctgaagaagcggctgaagaagctgtcggagctgacctcccgcaaggcccagcccaaggccacagacctcaactctgcctgaaggccctcttgcgcagctgcctctcggcccctccgccttctcccctcctgctgtccatgcttggccccctcgtccccatccacc

SEQ ID NO: 286803 - DNA, 1678 bp, Artificial Sequence
  derived and/or modified sequence
gtgacagggcagtctgctttcccataccctgggctgagcccctttgaagcccccagctgctcagtgaagttgcaggggtctggcctctcttctcctggaggtggccaggctgtgtgggagtgggggctctgcccctaatgcccccgcctcccgcaggcatctctgccggccttgccacaaccgtgagaaggccaagggcctgggcaagtacatctgccagcggtgccacctggtcatcgacgagcagcccctcatgttcaggagcgacgcctaccaccctgaccacttcaactgcacccactgtgggaaggagctgacagccgaggcccgcgagctgaagggtgagctctactgcctgccctgccatgacaagatgggcgtccccatctgcggggcctgccgccggcccatcgagggccgagtggtcaacgcgctgggcaagcagtggcacgtggagcactttgtctgtgccaagtgtgagaagccattcctggggcaccggcactatgagaagaagggcctggcctactgcgagactcactacaaccagctcttcggggacgtctgctacaactgcagccatgtgattgaaggcgatgtggtgtcggccctcaacaaggcctggtgtgtgagctgcttctcctgctccacctgcaacagcaagctcaccctgaagaacaagtttgtggagttcgacatgaagcccgtgtgtaagaggtgctacgagaagttcccgctggagctgaagaagcggctgaagaagctgtcggagctgacctcccgcaaggcccagcccaaggccacagacctcaactctgcctgaaggccctcttgcgcagctgcctctcggcccctccgccttctcccctcctgctgtccatgcttggccccctcgtccccatccacctgtgccctccgcatcttaccctccctttctctttcctcattgccttctcccttcctgttccctcatctctgccttccccatgtctctcctctccttggccgtggcttctgtctgtgaggaggcaggagctggggagtgggagcctatgaccccacgtctgacagccatgtccacctgtgcccacagcttccgcccacagacctccagggacaggagcaaattgcaccacagctccccgcctggcctggccctccccaggcggctcagtggctcatgctgtcctgtgagagcccctgccccagagcggccccactaagcgcatgtggctcctgggctacccacagccagggcagcctgctggagccacagggccagggccatgcagatggaggcctctgggagccacctccaatccctcaccactcactcaaccagtggcacagtgtccttgtgcccacactgagccagcaagtcctgctgtccacacccacaagctacctggagggacaggacccacctccatccttcggaaggccttcctggaatcccaccttggcctccgccctcggttccgccccgcccctctccccccgaccttggggcttgtgtcgagcccttgggtggggccaggaggaggtgatggcgtcagaggaggtgtggtcagaggtgacttgttcccacctccagggaggacgcttcgtcttcggccagcgcagacctggtgtttgtttgttgggctcacgcttgcacaatgaaggcttgttcacacaa

SEQ ID NO: 286804 - DNA, 1620 bp, Artificial Sequence
  derived and/or modified sequence
cagtgctgtgcaggatggagtccagacacccagcagtagcagaaatcgcctgtacgtgtttgggcccttcttcatctggcaaaccccgaaggaagggggcatctctgccggccttgccacaaccgtgagaaggccaagggcctgggcaagtacatctgccagcggtgccacctggtcatcgacgagcagcccctcatgttcaggagcgacgcctaccaccctgaccacttcaactgcacccactgtgggaaggagctgacagccgaggcccgcgagctgaagggtgagctctactgcctgccctgccatgacaagatgggcgtccccatctgcggggcctgccgccggcccatcgagggccgagtggtcaacgcgctgggcaagcagtggcacgtggagcactttgtctgtgccaagtgtgagaagccattcctggggcaccggcactatgagaagaagggcctggcctactgcgagactcactacaaccagctcttcggggacgtctgctacaactgcagccatgtgattgaaggcgatgtggtgtcggccctcaacaaggcctggtgtgtgagctgcttctcctgctccacctgcaacagcaagctcaccctgaagaacaagtttgtggagttcgacatgaagcccgtgtgtaagaggtgctacgagaagttcccgctggagctgaagaagcggctgaagaagctgtcggagctgacctcccgcaaggcccagcccaaggccacagacctcaactctgcctgaaggccctcttgcgcagctgcctctcggcccctccgccttctcccctcctgctgtccatgcttggccccctcgtccccatccacctgtgccctccgcatcttaccctccctttctctttcctcattgccttctcccttcctgttccctcatctctgccttccccatgtctctcctctccttggccgtggcttctgtctgtgaggaggcaggagctggggagtgggagcctatgaccccacgtctgacagccatgtccacctgtgcccacagcttccgcccacagacctccagggacaggagcaaattgcaccacagctccccgcctggcctggccctccccaggcggctcagtggctcatgctgtcctgtgagagcccctgccccagagcggccccactaagcgcatgtggctcctgggctacccacagccagggcagcctgctggagccacagggccagggccatgcagatggaggcctctgggagccacctccaatccctcaccactcactcaaccagtggcacagtgtccttgtgcccacactgagccagcaagtcctgctgtccacacccacaagctacctggagggacaggacccacctccatccttcggaaggccttcctggaatcccaccttggcctccgccctcggttccgccccgcccctctccccccgaccttggggcttgtgtcgagcccttgggtggggccaggaggaggtgatggcgtcagaggaggtgtggtcagaggtgacttgttcccacctccagggaggacgcttcgtcttcggccagcgcagacctggtgtttgtttgttgggctcacgcttgcacaatgaaggcttgttcacacaa

SEQ ID NO: 286805 - DNA, 1695 bp, Artificial Sequence
  derived and/or modified sequence
aagatgcctgaagttctaacaccagagatggtttcctgctgcttccaggaacagggtctgttcttagtccaatgtggagttcctcatggggaccccattccccaggaatccaggttccacagtactctgacttggtctggctggtctcggctggcactttccctaggactgctaaaaccacggtgagggcggagagctgagggccgaagaaggcggggcatctctgccggccttgccacaaccgtgagaaggccaagggcctgggcaagtacatctgccagcggtgccacctggtcatcgacgagcagcccctcatgttcaggagcgacgcctaccaccctgaccacttcaactgcacccactgtgggaaggagctgacagccgaggcccgcgagctgaagggtgagctctactgcctgccctgccatgacaagatgggcgtccccatctgcggggcctgccgccggcccatcgagggccgagtggtcaacgcgctgggcaagcagtggcacgtggagcactttgtctgtgccaagtgtgagaagccattcctggggcaccggcactatgagaagaagggcctggcctactgcgagactcactacaaccagctcttcggggacgtctgctacaactgcagccatgtgattgaaggcgatgtggtgtcggccctcaacaaggcctggtgtgtgagctgcttctcctgctccacctgcaacagcaagctcaccctgaagaacaagtttgtggagttcgacatgaagcccgtgtgtaagaggtgctacgagaagttcccgctggagctgaagaagcggctgaagaagctgtcggagctgacctcccgcaaggcccagcccaaggccacagacctcaactctgcctgaaggccctcttgcgcagctgcctctcggcccctccgccttctcccctcctgctgtccatgcttggccccctcgtccccatccacctgtgccctccgcatcttaccctccctttctctttcctcattgccttctcccttcctgttccctcatctctgccttccccatgtctctcctctccttggccgtggcttctgtctgtgaggaggcaggagctggggagtgggagcctatgaccccacgtctgacagccatgtccacctgtgcccacagcttccgcccacagacctccagggacaggagcaaattgcaccacagctccccgcctggcctggccctccccaggcggctcagtggctcatgctgtcctgtgagagcccctgccccagagcggccccactaagcgcatgtggctcctgggctacccacagccagggcagcctgctggagccacagggccagggccatgcagatggaggcctctgggagccacctccaatccctcaccactcactcaaccagtggcacagtgtccttgtgcccacactgagccagcaagtcctgctgtccacacccacaagctacctggagggacaggacccacctccatccttcggaaggccttcctggaatcccaccttggcctccgccctcggttccgccccgcccctctccccccgaccttggggcttgtgtcgagcccttgggtggggccaggaggaggtgatggcgtcagaggaggtgtggtcagaggtgacttgttcccacctccagggaggacgcttcgtcttcggccagcgcagacctggtgttt

SEQ ID NO: 286806 - DNA, 1661 bp, Artificial Sequence
  derived and/or modified sequence
ggagttcctcatggggaccccattccccaggaatccaggttccacagtactctgacttggtctggctggtctcggctggcactttccctaggactgctaaaaccacggtgagggcggagagctgagggccgaagaaggcgggggcatctctgccggccttgccacaaccgtgagaaggccaagggcctgggcaagtacatctgccagcggtgccacctggtcatcgacgagcagcccctcatgttcaggagcgacgcctaccaccctgaccacttcaactgcacccactgtgggaaggagctgacagccgaggcccgcgagctgaagggtgagctctactgcctgccctgccatgacaagatgggcgtccccatctgcggggcctgccgccggcccatcgagggccgagtggtcaacgcgctgggcaagcagtggcacgtggagcactttgtctgtgccaagtgtgagaagccattcctggggcaccggcactatgagaagaagggcctggcctactgcgagactcactacaaccagctcttcggggacgtctgctacaactgcagccatgtgattgaaggcgatgtggtgtcggccctcaacaaggcctggtgtgtgagctgcttctcctgctccacctgcaacagcaagctcaccctgaagaacaagtttgtggagttcgacatgaagcccgtgtgtaagaggtgctacgagaagttcccgctggagctgaagaagcggctgaagaagctgtcggagctgacctcccgcaaggcccagcccaaggccacagacctcaactctgcctgaaggccctcttgcgcagctgcctctcggcccctccgccttctcccctcctgctgtccatgcttggccccctcgtccccatccacctgtgccctccgcatcttaccctccctttctctttcctcattgccttctcccttcctgttccctcatctctgccttccccatgtctctcctctccttggccgtggcttctgtctgtgaggaggcaggagctggggagtgggagcctatgaccccacgtctgacagccatgtccacctgtgcccacagcttccgcccacagacctccagggacaggagcaaattgcaccacagctccccgcctggcctggccctccccaggcggctcagtggctcatgctgtcctgtgagagcccctgccccagagcggccccactaagcgcatgtggctcctgggctacccacagccagggcagcctgctggagccacagggccagggccatgcagatggaggcctctgggagccacctccaatccctcaccactcactcaaccagtggcacagtgtccttgtgcccacactgagccagcaagtcctgctgtccacacccacaagctacctggagggacaggacccacctccatccttcggaaggccttcctggaatcccaccttggcctccgccctcggttccgccccgcccctctccccccgaccttggggcttgtgtcgagcccttgggtggggccaggaggaggtgatggcgtcagaggaggtgtggtcagaggtgacttgttcccacctccagggaggacgcttcgtcttcggccagcgcagacctggtgtttgtttgttgggctcacgcttgcacaatgaaggcttgttcac

SEQ ID NO: 286807 - DNA, 750 bp, Artificial Sequence
  derived and/or modified sequence
atggagagccgccaccctgctgtggccgagatcgcctgcacctgctgggccctgctgcacctggccaaccctgagggccggggccacctgtgccggccctgccacaaccgggagaaggccaagggcctgggcaagtacatctgccagcgctgccacctggtgattgatgagcagcccctgatgttcagaagtgatgcctaccacccagaccacttcaactgcacccactgcggcaaggagctgacagctgaggcccgggagctgaagggggagctgtactgcctgccctgccacgacaagatgggcgtgcccatctgtggggcctgccggcggcccatcgagggccgggtggtgaatgccctgggcaagcagtggcacgtggagcactttgtgtgtgccaagtgtgagaagcccttcctgggccaccgccactatgagaagaagggcctggcctactgtgagacccactacaaccagctgtttggagatgtgtgctacaactgcagccacgtgattgaaggagatgtggtgtctgccctgaacaaggcctggtgtgtgtcctgcttcagctgcagcacctgcaacagcaagctgaccctgaagaacaagtttgtggagtttgacatgaagcctgtgtgcaagcgctgctatgagaagttccccctggagctgaagaagaggctgaagaagctgtctgagctgaccagcaggaaggcccagcccaaggccacagacctgaacagcgcctag

SEQ ID NO: 286808 - DNA, 750 bp, Artificial Sequence
  derived and/or modified sequence
atggagagccggcaccccgccgtggccgagatcgcctgcacctgctgggcactgctgcacctggcaaacccagagggcaggggtcatttgtgcagaccctgtcacaatcgggaaaaagcaaaagggttggggaagtatatttgccaaagatgccacctcgtgattgacgaacagcccctgatgtttcgcagcgacgcataccaccccgatcattttaattgcactcactgcggaaaggagctgaccgccgaggctagggaattaaaaggcgagctgtattgcctgccgtgtcacgataagatgggagtgccaatttgtggcgcgtgtagaagaccaattgagggaagagttgtaaacgctcttggaaagcagtggcatgtggagcactttgtctgcgcaaagtgcgaaaagccattcctggggcaccgccattatgagaaaaagggcttggcctactgtgaaacccactataaccagctgtttggagacgtttgttacaattgcagccatgtgatcgagggtgatgtggtgagcgcccttaacaaagcgtggtgtgtgagctgcttcagttgctctacttgtaatagcaaactaactctgaaaaacaaattcgtggagtttgacatgaagcccgtctgtaagagatgttacgaaaagtttcccctggagctcaagaaaaggctgaaaaagctatcggagctcacatccaggaaagcacaacccaaagccaccgacctcaacagtgcgtag

SEQ ID NO: 286809 - DNA, 750 bp, Artificial Sequence
  derived and/or modified sequence
atggagtctaggcatcccgcagtggccgagattgcgtgcacatgttgggcactgctgcacttagccaatccagaaggaagaggccatctctgcaggccatgccataatcgggagaaagctaaaggtcttggaaaatacatatgccaacggtgtcacctggtcattgatgagcagccattaatgttcagatcagacgcataccacccagaccatttcaactgtactcactgcggcaaggaattaacagctgaggcaagggaactgaagggggaactgtactgcctcccctgccatgacaagatgggggtgcctatctgcggcgcatgtcggcgacccatcgaaggacgggtggtcaacgcactggggaagcagtggcacgtggagcactttgtgtgtgcaaaatgtgagaagccctttctgggacacaggcactatgagaagaaaggtctcgcgtactgcgaaacacattataatcagctattcggggacgtgtgctacaactgctctcatgtgatcgagggcgacgtggtgagcgcgctgaataaggcttggtgcgtatcatgttttagctgttccacttgtaatagcaaactaacactcaagaataagttcgtggagtttgacatgaaacccgtttgcaagaggtgctatgagaaatttcctttagagctcaaaaaaagactcaaaaaactgtctgaactcacttctcgcaaagcgcaacccaaggccacagaccttaactccgcctag

SEQ ID NO: 286810 - protein, 1531 aa, Artificial Sequence
  derived and/or modified sequence
MGVLVVLTVLWLFSSVKADSKAITTSLTTKWFSTPLLLEASEFLAEDSQEKFWNFVEASQNIGSSDHDGTDYSYYHAILEAAFQFLSPLQQNLFKFCLSLRSYSATIQAFQQIAADEPPPEGCNSFFSVHGKKTCESDTLEALLLTASERPKPLLFKGDHRYPSSNPESPVVIFYSEIGSEEFSNFHRQLISKSNAGKINYVFRHYIFNPRKEPVYLSGYGVELAIKSTEYKAKDDTQVKGTEVNTTVIGENDPIDEVQGFLFGKLRDLHPDLEGQLKELRKHLVESTNEMAPLKVWQLQDLSFQTAARILASPVELALVVMKDLSQNFPTKARAITKTAVSSELRTEVEENQKYFKGTLGLQPGDSALFINGLHMDLDTQDIFSLFDVLRNEARVMEGLHRLGIEGLSLHNVLKLNIQPSEADYAVDIRSPAISWVNNLEVDSRYNSWPSSLQELLRPTFPGVIRQIRKNLHNMVFIVDPAHETTAELMNTAEMFLSNHIPLRIGFIFVVNDSEDVDGMQDAGVAVLRAYNYVAQEVDDYHAFQTLTHIYNKVRTGEKVKVEHVVSVLEKKYPYVEVNSILGIDSAYDRNRKEARGYYEQTGVGPLPVVLFNGMPFEREQLDPDELETITMHKILETTTFFQRAVYLGELPHDQDVVEYIMNQPNVVPRINSRILTAERDYLDLTASNNFFVDDYARFTILDSQGKTAAVANSMNYLTKKGMSSKEIYDDSFIRPVTFWIVGDFDSPSGRQLLYDAIKHQKSSNNVRISMINNPAKEISYENTQISRAIWAALQTQTSNAAKNFITKMAKEGAAEALAAGADIAEFSVGGMDFSLFKEVFESSKMDFILSHAVYCRDVLKLKKGQRAVISNGRIIGPLEDSELFNQDDFHLLENIILKTSGQKIKSHIQQLRVEEDVASDLVMKVDALLSAQPKGDPRIEYQFFEDRHSAIKLRPKEGETYFDVVAVVDPVTREAQRLAPLLLVLAQLINMNLRVFMNCQSKLSDMPLKSFYRYVLEPEISFTSDNSFAKGPIAKFLDMPQSPLFTLNLNTPESWMVESVRTPYDLDNIYLEEVDSVVAAEYELEYLLLEGHCYDITTGQPPRGLQFTLGTSANPVIVDTIVMANLGYFQLKANPGAWILRLRKGRSEDIYRIYSHDGTDSPPDADEVVIVLNNFKSKIIKVKVQKKADMVNEDLLSDGTSENESGFWDSFKWGFTGQKTEEVKQDKDDIINIFSVASGHLYERFLRIMMLSVLKNTKTPVKFWFLKNYLSPTFKEFIPYMANEYNFQYELVQYKWPRWLHQQTEKQRIIWGYKILFLDVLFPLVVDKFLFVDADQIVRTDLKELRDFNLDGAPYGYTPFCDSRREMDGYRFWKSGYWASHLAGRKYHISALYVVDLKKFRKIAAGDRLRGQYQGLSQDPNSLSNLDQDLPNNMIHQVPIKSLPQEWLWCETWCDDASKKRAKTIDLCNNPMTKEPKLEAAVRIVPEWQDYDQEIKQLQIRFQKEKETGALYKEKTKEPSREGPQKREEL

SEQ ID NO: 286811 - DNA, 80 bp, Artificial Sequence
  derived and/or modified sequence
caccgaatagaatcgaatggaacaatcatcgaatggactcaaatggaattatcctcaaatggaatcgaatggaattatcg

SEQ ID NO: 286812 - DNA, 357 bp, Artificial Sequence
  derived and/or modified sequence
atggccagcagcgccagagagcacctgctgttcgtgagaagaagaaacccccagatgagatacaccctgagccccgagaacctgcagagcctggccgcccagagcagcatgcccgagaacatgaccctgcagagagccaacagcgacaccgacctggtgaccagcgagagcagaagcagcctgaccgccagcatgtacgagtacaccctgggccaggcccagaacctgatcatcttctgggacatcaaggaggaggtggaccccagcgactggatcggcctgtaccacatcgacgagaacagccccgccaacttctgggacagcaagaacagaggcgtgaccggcacccagaagtag

SEQ ID NO: 286813 - DNA, 357 bp, Artificial Sequence
  derived and/or modified sequence
atggcttcaagcgcacgtgagcacctgttattcgtcagacgacgcaatccgcaaatgcgatatactctcagcccagaaaacctgcagagtctagctgctcaaagctccatgcccgaaaatatgactttacagcgagctaatagcgacaccgatctggttacaagtgagtccaggtcaagtctgaccgccagcatgtacgaatacactttggggcaggcccagaacctgattatattttgggacattaaggaagaagttgatccgtccgattggatcgggttatatcacatagatgaaaacagtcccgctaatttttgggactctaaaaatcggggggtgacaggaacgcaaaagtag

SEQ ID NO: 286814 - DNA, 357 bp, Artificial Sequence
  derived and/or modified sequence
atggccagcagcgcccgggagcacctgctgtttgtgagaagaagaaacccccagatgagatacaccctgagccctgagaacctgcagagcctggccgcccagagctccatgcctgagaacatgaccctgcagagggccaacagcgacacagacctggtgaccagcgagagccgcagcagcctgacagcctccatgtatgagtacaccctgggccaggcccagaacctgatcatcttctgggacatcaaggaggaggtggaccccagcgactggattggcctgtaccacattgatgagaacagccctgccaacttctgggacagcaagaacagaggagtgacaggcacccagaagtag

SEQ ID NO: 286815 - DNA, 357 bp, Artificial Sequence
  derived and/or modified sequence
atggccagcagcgcccgggagcacctgctgttcgtgcggcggcggaatccacagatgagatacacgctctccccggaaaacttgcagagcctggcagcgcaaagctcaatgcctgaaaatatgactttgcaaagagccaactcagacacagacctggtgacatccgagtctcggtcttccctcaccgccagtatgtacgaatacaccctcgggcaggcgcagaatctgatcatcttttgggatatcaaagaggaggtagatccatctgattggatcggtctttatcatatcgacgagaatagtccagccaacttctgggactccaagaatagaggcgtaaccggaacacaaaagtag

SEQ ID NO: 286816 - DNA, 357 bp, Artificial Sequence
  derived and/or modified sequence
atggccagttcggccagagagcacctcttgtttgtgagaagaaggaacccccaaatgcggtatacgctgagtccggagaatttgcagtctctcgctgctcaatctagcatgccagaaaatatgacgctgcagcgggcaaatagtgacaccgacttagttacgagcgagtcgcgttcatctttgactgctagtatgtatgagtacacactgggccaggctcaaaatctcattatcttctgggatattaaggaagaggttgatccatctgattggattggcctgtaccacatcgacgaaaattcccctgcgaatttctgggactcgaaaaaccgaggagttactggcacccagaaatag

SEQ ID NO: 286817 - DNA, 568 bp, Artificial Sequence
  derived and/or modified sequence
agatgccgccgaagcgtctagcgggaagggcgccggcgcggctggagggtctcagtacagggtctctgagcctgttgcccaatctggagtgcgatggtgcagtcacatctcactgcagccttgagctcctggactcaagtgattctccacctcagccttcctcatagctaggactacagctttgtaggcagccaatcccagagaagcagacgggatggctagttcagcccgggagcacctgctttttgtgaggcgtcgaaatccccagatgcggtacacattgagcccagagaacctccagagccttgccgcccagagctccatgccagagaacatgaccctgcagcgggccaacagcgacaccgacctggtgacttctgagagccgctccagcttaactgccagcatgtacgagtacacgctggggcaagcccagaacctcattatcttctgggacattaaagaggaggtggaccccagtgattggattggactttatcatatagatgagaattctccagccaacttctgggattctaagaacaggggtgtgactggaacacaaaaa

SEQ ID NO: 286818 - protein, 128 aa, Artificial Sequence
  derived and/or modified sequence
MAPPSPSTTSSNNNSSSSSNSGWDQLSKTNLYIRGLPPHTTDQDLVKLCQPYGKIVSTKAILDKTTNKCKGYGFVDFDSPAAAQKAVSALKASGVQAQMAKQQEQDPTNLYISNLPLSMDEQELENML

SEQ ID NO: 286819 - protein, 370 aa, Artificial Sequence
  derived and/or modified sequence
MAPPSPSTTSSNNNSSSSSNSGWDQLSKTNLYIRGLPPHTTDQDLVKLCQPYGKIVSTKAILDKTTNKCKGYGFVDFDSPAAAQKAVSALKASGVQAQMAKQQEQDPTNLYISNLPLSMDEQELENMLKPFGQVISTRILRDSSGTSRGVGFARMESTEKCEAVIGHFNGKFIKTPPGVSAPTEPLLCKFADGGQKKRQNPNKYIPNGRPWHREGEAGMTLTYDPTTAAIQNGFYPSPYSIATNRMITQTSITPYIASPVSAYQVQSPSWMQPQPYILQHPGAVLTPSMEHTMSLQPASMISPLAQQMSHLSLGSTGTYMPATSAMQGAYLPQYAHMQTTAVPVEEASGQQQVAVETSNDHSPYTFQPNK

SEQ ID NO: 286820 - DNA, 583 bp, Artificial Sequence
  derived and/or modified sequence
atttgccttctcttcacttggggagtatcaatttgccacagagcaagcaacagcgggtggtcctaggagacttctgtgtggtctagggagaccttgacacagtcgcctaagaatggaccgtgtttacagcctctaagaatggactgtgtttagaatgaggggcagcctgaaaaaggcagtctctggtcccagcccaccccatggcccctcccagtcccagcaccaccagcagtaataacaacagtagcagcagtagcaactcaggatgggatcagctcagcaaaacgaacctctatatccgaggactgcctccccacaccaccgaccaggacctggtgaagctctgtcaaccatatgggaaaatagtctccacaaaggcaattttggataagacaacgaacaaatgcaaaggttatggttttgtcgactttgacagccctgcagcagctcaaaaagctgtgtctgccctgaaggccagtggggttcaagctcaaatggcaaagcaacaggaacaagatcctaccaacctctacatttctaatttgccactctccatggatgagcaagaactagaaaatatgct

SEQ ID NO: 286821 - DNA, 1490 bp, Artificial Sequence
  derived and/or modified sequence
atttgccttctcttcacttggggagtatcaatttgccacagcagtctctggtcccagcccaccccatggcccctcccagtcccagcaccaccagcagtaataacaacagtagcagcagtagcaactcaggatgggatcagctcagcaaaacgaacctctatatccgaggactgcctccccacaccaccgaccaggacctggtgaagctctgtcaaccatatgggaaaatagtctccacaaaggcaattttggataagacaacgaacaaatgcaaaggttatggttttgtcgactttgacagccctgcagcagctcaaaaagctgtgtctgccctgaaggccagtggggttcaagctcaaatggcaaagcaacaggaacaagatcctaccaacctctacatttctaatttgccactctccatggatgagcaagaactagaaaatatgctcaaaccatttggacaagttatttctacaaggatactacgtgattccagtggtacaagtcgtggtgttggctttgctaggatggaatcaacagaaaaatgtgaagctgttattggtcattttaatggaaaatttattaagacaccaccaggagtttctgcccccacagaacctttattgtgtaagtttgctgatggaggacagaaaaagagacagaacccaaacaaatacatccctaatggaagaccatggcatagagaaggagaggctggaatgacacttacttacgacccaactacagctgctatacagaacggattttatccttcaccatacagtattgctacaaaccgaatgatcactcaaacttctattacaccctatattgcatctcctgtatctgcctaccaggtgcaaagtccttcgtggatgcaacctcaaccatatattctacagcaccctggtgccgtgttaactccctcaatggagcacaccatgtcactacagcccgcatcaatgatcagccctctggcccagcagatgagtcatctgtcactaggcagcaccggaacatacatgcctgcaacgtcagctatgcaaggagcctacttgccacagtatgcacatatgcagacgacagcggttcctgttgaggaggcaagtggtcaacagcaggtggctgtcgagacgtctaatgaccattctccatatacctttcaacctaataagtaactgtgagatgtacagaaaggtgttcttacatgaagaagggtgtgaaggctgaacaatcatggatttttctgatcaattgtgctttaggaaattattgacagttttgcacaggttcttgaaaacgttatttataatgaaatcaactaaaactatttttgctataagttctataaggtgcataaaacccttaaattcatctagtagctgttcccccgaacaggtttattttagtaaaaaaaaaaaaacaaaaaacaaaaacaaaagatttttatcaaatgttatgatgcaaaaaaagaaaaagaaaaaaaaaaa

SEQ ID NO: 286822 - protein, 384 aa, Artificial Sequence
  derived and/or modified sequence
MTSFHPRGLQAARAQKFKSKRPRSNSDCFQEEDLRQGFQWRKSLPFGAASSYLNLEKLGEGSYATVYKGISRINGQLVALKVISMNAEEGVPFTAIREASLLKGLKHANIVLLHDIIHTKETLTFVFEYMHTDLAQYMSQHPGGLHPHNVRLFMFQLLRGLAYIHHQHVLHRDLKPQNLLISHLGELKLADFGLARAKSIPSQTYSSEVVTLWYRPPDALLGATEYSSELDIWGAGCIFIEMFQGQPLFPGVSNILEQLEKIWEVLGVPTEDTWPGVSKLPNYNPEWFPLPTPRSLHVVWNRLGRVPEAEDLASQMLKGFPRDRVSAQEALVHDYFSALPSQLYQLPDEESLFTVSGVRLKPEMCDLLASYQKGHHPAQFSKCW

SEQ ID NO: 286823 - protein, 435 aa, Artificial Sequence
  derived and/or modified sequence
MGQELCAKTVQPGCSCYHCSEGGEAHSCRRSQPETTEAAFKLTDLKEASCSMTSFHPRGLQAARAQKFKSKRPRSNSDCFQEEDLRQGFQWRKSLPFGAASSYLNLEKLGEGSYATVYKGISRINGQLVALKVISMNAEEGVPFTAIREASLLKGLKHANIVLLHDIIHTKETLTFVFEYMHTDLAQYMSQHPGGLHPHNVRLFMFQLLRGLAYIHHQHVLHRDLKPQNLLISHLGELKLADFGLARAKSIPSQTYSSEVVTLWYRPPDALLGATEYSSELDIWGAGCIFIEMFQGQPLFPGVSNILEQLEKIWEVLGVPTEDTWPGVSKLPNYNPEWFPLPTPRSLHVVWNRLGRVPEAEDLASQMLKGFPRDRVSAQEALVHDYFSALPSQLYQLPDEESLFTVSGVRLKPEMCDLLASYQKGHHPAQFSKCW

SEQ ID NO: 286824 - DNA, 1308 bp, Artificial Sequence
  derived and/or modified sequence
atgggccaggagctgtgcgccaagaccgtgcagcccggctgcagctgctaccactgcagcgagggcggcgaggcccacagctgcagaagaagccagcccgagaccaccgaggccgccttcaagctgaccgacctgaaggaggccagctgcagcatgaccagcttccaccccagaggcctgcaggccgccagagcccagaagttcaagagcaagagacccagaagcaacagcgactgcttccaggaggaggacctgagacagggcttccagtggagaaagagcctgcccttcggcgccgccagcagctacctgaacctggagaagctgggcgagggcagctacgccaccgtgtacaagggcatcagcagaatcaacggccagctggtggccctgaaggtgatcagcatgaacgccgaggagggcgtgcccttcaccgccatcagagaggccagcctgctgaagggcctgaagcacgccaacatcgtgctgctgcacgacatcatccacaccaaggagaccctgaccttcgtgttcgagtacatgcacaccgacctggcccagtacatgagccagcaccccggcggcctgcacccccacaacgtgagactgttcatgttccagctgctgagaggcctggcctacatccaccaccagcacgtgctgcacagagacctgaagccccagaacctgctgatcagccacctgggcgagctgaagctggccgacttcggcctggccagagccaagagcatccccagccagacctacagcagcgaggtggtgaccctgtggtacagaccccccgacgccctgctgggcgccaccgagtacagcagcgagctggacatctggggcgccggctgcatcttcatcgagatgttccagggccagcccctgttccccggcgtgagcaacatcctggagcagctggagaagatctgggaggtgctgggcgtgcccaccgaggacacctggcccggcgtgagcaagctgcccaactacaaccccgagtggttccccctgcccacccccagaagcctgcacgtggtgtggaacagactgggcagagtgcccgaggccgaggacctggccagccagatgctgaagggcttccccagagacagagtgagcgcccaggaggccctggtgcacgactacttcagcgccctgcccagccagctgtaccagctgcccgacgaggagagcctgttcaccgtgagcggcgtgagactgaagcccgagatgtgcgacctgctggccagctaccagaagggccaccaccccgcccagttcagcaagtgctggtag

SEQ ID NO: 286825 - DNA, 1635 bp, Artificial Sequence
  derived and/or modified sequence
tgtggccagaacaagaaccttaactgtgccaaattttattctattcaataacagctgcctcgttttcagttgtgcacatctgaatgcaagcaatccctgtctgatgtggagtttcttgcactgataaggaaaaactgctgaagttgtgaggctgctccaggcagagccatcatctaacagacctaaaagaagcatcatgttccatgacttcatttcaccccaggggacttcaagctgcccgtgcccagaagttcaagagtaaaaggccacggagtaacagtgattgttttcaggaagaggatctgaggcagggttttcagtggaggaagagcctcccttttggggcagcctcatcttacttgaacttggagaagctgggtgaaggctcttatgcgacagtttacaaggggattagcagaataaatggacaactagtggctttaaaagtcatcagcatgaatgcagaggaaggagtcccatttacagctatccgagaagcttctctcctgaagggtttgaaacatgccaatattgtgctcctgcatgacataatccacaccaaagagacactgacattcgtttttgaatacatgcacacagacctggcccagtatatgtctcagcatccaggagggcttcatcctcataatgtcagacttttcatgtttcaacttttgcggggcctggcgtacatccaccaccaacacgttcttcacagggacctgaaacctcagaacttactcatcagtcacctgggagagctcaaactggctgattttggtcttgcccgggccaagtccattcccagccagacatactcttcagaagtcgtgaccctctggtaccggccccctgatgctttgctgggagccactgaatattcctctgagctggacatatggggtgcaggctgcatctttattgaaatgttccagggtcaacctttgtttcctggggtttccaacatccttgaacagctggagaaaatctgggaggtgctgggagtccctacagaggatacttggccgggagtctccaagctacctaactacaatccagaatggttcccactgcctacgcctcgaagccttcatgttgtctggaacaggctgggcagggttcctgaagctgaagacctggcctcccagatgctaaaaggctttcccagagaccgcgtctccgcccaggaagcacttgttcatgattatttcagcgccctgccatctcagctgtaccagcttcctgatgaggagtctttgtttacagtttcaggagtgaggctaaagccagaaatgtgtgaccttttggcctcctaccagaaaggtcaccacccagcccagtttagcaaatgctggtgaaaagaaagggcgagatcaccaaggttcttccagggctgtatttctgcagtttcggttttcatttgcttcagcttactaagaagcttcaaatctaactccatactgaacaaggggctttatgtcctcacctatgacctggaatagtttaaatatggtgttcaaggcaatagtacataatagtggaagaaaattcagtggaaggttattgctattgtcatttgcatagaatttaagtgattgatttaaaaaaactggacataaactaagtctaagaaga

SEQ ID NO: 286826 - DNA, 1584 bp, Artificial Sequence
  derived and/or modified sequence
atgggtcaagagctgtgtgcaaagactgtacagcctggatgcagctgctaccattgttcagagggaggcgaggcacacagctgtcggaggagtcagcctgagaccacggaggctgcgttcaagctaacagacctaaaagaagcatcatgttccatgacttcatttcaccccaggggacttcaagctgcccgtgcccagaagttcaagagtaaaaggccacggagtaacagtgattgttttcaggaagaggatctgaggcagggttttcagtggaggaagagcctcccttttggggcagcctcatcttacttgaacttggagaagctgggtgaaggctcttatgcgacagtttacaaggggattagcagaataaatggacaactagtggctttaaaagtcatcagcatgaatgcagaggaaggagtcccatttacagctatccgagaagcttctctcctgaagggtttgaaacatgccaatattgtgctcctgcatgacataatccacaccaaagagacactgacattcgtttttgaatacatgcacacagacctggcccagtatatgtctcagcatccaggagggcttcatcctcataatgtcagacttttcatgtttcaacttttgcggggcctggcgtacatccaccaccaacacgttcttcacagggacctgaaacctcagaacttactcatcagtcacctgggagagctcaaactggctgattttggtcttgcccgggccaagtccattcccagccagacatactcttcagaagtcgtgaccctctggtaccggccccctgatgctttgctgggagccactgaatattcctctgagctggacatatggggtgcaggctgcatctttattgaaatgttccagggtcaacctttgtttcctggggtttccaacatccttgaacagctggagaaaatctgggaggtgctgggagtccctacagaggatacttggccgggagtctccaagctacctaactacaatccagaatggttcccactgcctacgcctcgaagccttcatgttgtctggaacaggctgggcagggttcctgaagctgaagacctggcctcccagatgctaaaaggctttcccagagaccgcgtctccgcccaggaagcacttgttcatgattatttcagcgccctgccatctcagctgtaccagcttcctgatgaggagtctttgtttacagtttcaggagtgaggctaaagccagaaatgtgtgaccttttggcctcctaccagaaaggtcaccacccagcccagtttagcaaatgctggtgaaaagaaagggcgagatcaccaaggttcttccagggctgtatttctgcagtttcggttttcatttgcttcagcttactaagaagcttcaaatctaactccatactgaacaaggggctttatgtcctcacctatgacctggaatagtttaaatatggtgttcaaggcaatagtacataatagtggaagaaaattcagtggaaggttattgctattgtcatttgcatagaatttaagtgattgatttaaaaaaactggacataaactaagtctaagaag

SEQ ID NO: 286827 - DNA, 1780 bp, Artificial Sequence
  derived and/or modified sequence
agataaggcccagactgaacactgggtccactcaaattaggaagttgagcaggggaggaggaatcagcaaagatggttgcagaggagtccccagagaggcaggaggaaaaccaaggaagtgcccacttcacagaatcaaggaggctttcaaaaagggtggcatgattatggtgttaaatgccaccaaagagtaaagcaagctgcctcgttttcagttgtgcacatctgaatgcaagcaatccctgtctgatgtggagtttcttgcactgataaggaaaaactgctgaagttgtgaggctgctccaggcagagccatcatctaacagacctaaaagaagcatcatgttccatgacttcatttcaccccaggggacttcaagctgcccgtgcccagaagttcaagagtaaaaggccacggagtaacagtgattgttttcaggaagaggatctgaggcagggttttcagtggaggaagagcctcccttttggggcagcctcatcttacttgaacttggagaagctgggtgaaggctcttatgcgacagtttacaaggggattagcagaataaatggacaactagtggctttaaaagtcatcagcatgaatgcagaggaaggagtcccatttacagctatccgagaagcttctctcctgaagggtttgaaacatgccaatattgtgctcctgcatgacataatccacaccaaagagacactgacattcgtttttgaatacatgcacacagacctggcccagtatatgtctcagcatccaggagggcttcatcctcataatgtcagacttttcatgtttcaacttttgcggggcctggcgtacatccaccaccaacacgttcttcacagggacctgaaacctcagaacttactcatcagtcacctgggagagctcaaactggctgattttggtcttgcccgggccaagtccattcccagccagacatactcttcagaagtcgtgaccctctggtaccggccccctgatgctttgctgggagccactgaatattcctctgagctggacatatggggtgcaggctgcatctttattgaaatgttccagggtcaacctttgtttcctggggtttccaacatccttgaacagctggagaaaatctgggaggtgctgggagtccctacagaggatacttggccgggagtctccaagctacctaactacaatccagaatggttcccactgcctacgcctcgaagccttcatgttgtctggaacaggctgggcagggttcctgaagctgaagacctggcctcccagatgctaaaaggctttcccagagaccgcgtctccgcccaggaagcacttgttcatgattatttcagcgccctgccatctcagctgtaccagcttcctgatgaggagtctttgtttacagtttcaggagtgaggctaaagccagaaatgtgtgaccttttggcctcctaccagaaaggtcaccacccagcccagtttagcaaatgctggtgaaaagaaagggcgagatcaccaaggttcttccagggctgtatttctgcagtttcggttttcatttgcttcagcttactaagaagcttcaaatctaactccatactgaacaaggggctttatgtcctcacctatgacctggaatagtttaaatatggtgttcaaggcaatagtacataatagtggaagaaaattcagtggaaggttattgctattgtcatttgcatagaatttaagtgattgatttaaaaaaactggacataaactaagtctaagaag

SEQ ID NO: 286828 - DNA, 1308 bp, Artificial Sequence
  derived and/or modified sequence
atgggccaggagctgtgcgctaagactgtccagccaggctgttcttgctatcactgcagcgagggaggagaggcgcattcctgtcggaggtcccagcccgaaaccaccgaggcagcctttaagctgacagatctgaaagaggcttcatgctccatgaccagttttcacccaaggggtctgcaggccgctagagcccagaaatttaagagtaagcgtccaagatcgaactctgactgttttcaggaagaggaccttcgtcagggcttccaatggcggaagagcctgcccttcggggctgcatcgtcttacttaaacctcgagaaactgggggagggctcatatgctacagtctataagggcatctctcgcattaatgggcagctagtcgcactgaaagttatttcaatgaacgctgaagagggcgttccgttcacagctatccgggaggcctcactgttgaaggggcttaagcatgcgaatattgtcctgttgcatgacataatacacacaaaggagacactgacattcgtcttcgagtacatgcatacggacctggctcaatatatgagccaacatcccggcggactccaccctcataatgtgagactgttcatgtttcaactgctgagaggcctcgcctatatccaccaccagcacgtcctgcatagggatctcaaaccccagaacctgctgatctcacacctcggagagctcaaacttgcagacttcggtctggctcgggctaagtccattccatcgcaaacctactcatctgaggtggtgacactgtggtaccgtccccccgacgccctgctgggtgccacagaatattcaagcgagctggatatctggggggccggctgcattttcattgagatgttccagggacagccactgtttcctggagtgtcaaatattttggagcagctagagaagatctgggaggtgttaggggttccgacagaagatacctggcccggagtgagcaaacttcccaattataatccggagtggttcccactacctactcccagatcactccatgtggtgtggaatagacttgggagagtgcccgaggctgaggacctggccagtcagatgctaaagggcttcccgcgcgacagggtcagcgcccaagaagctctggtccacgattacttttctgccttgccaagccagttgtaccagttgcctgatgaggagtccctgttcactgtgtctggtgtgagactcaagcctgagatgtgcgatctgttagcgagctaccaaaaaggtcaccatccagctcagttttcgaaatgctggtag

SEQ ID NO: 286829 - DNA, 1308 bp, Artificial Sequence
  derived and/or modified sequence
atgggccaggagctgtgtgccaagacagtgcagcccggctgcagctgctaccactgcagcgagggcggggaggcccacagctgcagaagaagccagcctgagaccacagaggccgccttcaagctgacagacctgaaggaggccagctgcagcatgaccagcttccacccccggggcctgcaggccgcccgggcccagaagttcaagagcaagaggcccaggagcaacagcgactgcttccaggaggaggacctgcggcagggcttccagtggaggaagagcctgccctttggagctgccagcagctacctgaacctggagaagctgggggagggcagctatgccaccgtgtacaagggcatcagccgcatcaatggccagctggtggccctgaaggtgatctccatgaatgctgaggagggcgtgcccttcaccgccatccgggaggccagcctgctgaagggcctgaagcacgccaacatcgtgctgctgcatgacatcatccacaccaaggagaccctgacctttgtgtttgagtacatgcacacagacctggcccagtacatgagccagcaccctgggggcctgcacccccacaacgtgcggctcttcatgttccagctgctgcggggcctggcctacatccaccaccagcacgtgctgcaccgggacctgaagccccagaacctgctgatcagccacctgggggagctgaagctggccgactttggcctggcccgggccaagagcatccccagccagacctacagcagcgaggtggtgaccctgtggtacagacctccagatgccctgctgggcgccacagagtacagcagcgagctggacatctggggcgccggctgcatcttcatcgagatgttccagggccagcccctcttccctggggtgagcaacatcctggagcagctggagaagatctgggaggtgctgggcgtgcccacagaggacacctggccaggagtgtccaagctgcccaactacaaccctgagtggttccccctgcccacccccaggagcctgcacgtggtgtggaaccggctgggccgggtgcctgaggccgaggacctggccagccagatgctgaagggcttcccccgggacagagtgtctgcccaggaggccctggtgcatgactacttcagcgccctgcccagccagctgtaccagctgcctgatgaggagagcctcttcaccgtgtctggagtgcggctgaagccagagatgtgtgacctgctggccagctaccagaagggccaccacccagcccagttcagcaagtgctggtag

SEQ ID NO: 286830 - DNA, 1308 bp, Artificial Sequence
  derived and/or modified sequence
atgggccaggagctgtgcgccaagaccgtgcagcccggctgcagctgttatcattgtagcgaaggtggggaggcacacagttgcagaagatctcagcccgaaaccacggaggcggccttcaagctaactgacctgaaggaggccagctgttcaatgaccagcttccatcctcgcggcctgcaagccgccagagcacaaaagtttaaatcaaagcgtccgaggagtaatagtgattgtttccaggaagaggatctccgccagggtttccagtggaggaaatctttacccttcggagcggcctccagctacctgaacctggaaaagctgggcgagggcagttacgcaacagtttacaagggcattagtaggataaatggacaactggttgcactgaaggtgattagtatgaatgccgaagagggtgtaccgtttactgctattagagaagccagcttgcttaaagggctcaagcacgctaatatagtgctgctccatgatatcatccatacaaaggagaccctgacttttgttttcgaatatatgcatacagacctcgcacaatacatgagccagcacccaggcggtcttcatcctcacaatgtgagactattcatgttccagctcctgcggggcctcgcgtatatccatcatcaacatgttttgcatcgggacctgaagccacaaaatttgcttatcagtcatctcggcgaactaaagctcgccgacttcggcctagcccgggctaagtctataccttcccagacctattcctctgaagtcgtgacgctgtggtaccgtccacctgatgctctgctgggcgctacagagtattcgtccgagttagatatatggggcgccgggtgcatcttcatcgagatgttccagggccagcctctattccccggcgtcagtaacatactcgagcagcttgaaaaaatttgggaagtgctgggagttcccactgaagatacatggccaggcgtgagcaagctgccaaactacaatccagaatggtttccactgccaaccccaagatctctgcacgtggtatggaaccggctaggccgggtaccagaggccgaggacctcgccagccagatgctaaaaggattcccccgcgacagggtctctgctcaggaagccctcgtgcacgactatttttctgccctgccgagccagctctaccagctgcccgacgaggagagcctgtttacagtcagtggagtccgcctgaagcccgagatgtgcgatcttctagcttcttaccaaaaaggacatcaccctgcacaatttagtaagtgttggtag

SEQ ID NO: 286831 - DNA, 1308 bp, Artificial Sequence
  derived and/or modified sequence
atggggcaggaactgtgtgcaaagactgttcagcctggctgtagctgttatcactgttccgagggcggagaagcacattcatgtcggagaagtcaacctgagaccacagaagctgcgttcaaattgacagacctcaaggaagccagttgctccatgaccagtttccaccctcggggactacaggctgcccgagcccagaagttcaagagcaaaaggcctcgttccaattcagattgctttcaggaagaagatctgcgccagggatttcagtggcggaagtcactccccttcggtgcagcctcttcatacctgaatctggagaaactaggagagggctcctacgcgacagtttacaaggggatctcgcgaattaacggccaattagtggccctgaaggtcatttccatgaacgcagaggagggggtccctttcaccgctatccgggaggcaagcttgctgaaagggctaaaacacgctaatattgtcctgctgcacgacatcatacacactaaggaaacactgactttcgtctttgagtatatgcacactgaccttgctcaatatatgagccagcatcccggaggtcttcatcctcacaatgtgcggttgttcatgttccagctcctcaggggactggcctacatacaccatcaacatgtgctacatcgggatctgaagccccagaatttgctaatttcacatcttggagagcttaaactggccgacttcgggctggcaagagccaagagtattccttcccagacttactccagcgaagtcgtgactttgtggtaccggcctccggacgctctcctaggggcaacagaatactcctccgagcttgatatttggggggcaggctgcattttcatcgaaatgtttcagggccaaccactcttccctggcgtatctaacatactcgagcagttggagaagatctgggaggtgctaggcgtgcctaccgaggacacgtggcccggagtgagtaagctgcccaactataatcccgagtggttccccttgccaactccacggtcactacatgtggtgtggaacagacttggcagagtaccagaggctgaagaccttgccagtcagatgctcaaaggttttcctagggatcgcgtaagtgcccaggaagccttagttcacgactatttttctgccctgccaagtcagctgtaccaactccccgatgaggaatctttgtttactgttagcggggtcaggctgaaacctgaaatgtgtgatttactcgcctcttaccagaagggtcaccatccagcgcagttttcgaagtgttggtag

SEQ ID NO: 286832 - protein, 432 aa, Artificial Sequence
  derived and/or modified sequence
MVRCQLTATSTSQVPRTVLWLTIELAIVGSDMQEVIGTAIAFNLLSAGRIPLWGGVLITIVDTFFFLFLDNYGLRKLEAFFGLLITIMALTFGYEYVVARPEQGALLRGLFLPSCPGCGHPELLQAVGIVGAIIMPHNIYLHSALVKSREIDRARRADIREANMYFLIEATIALSVSFIINLFVMAVFGQAFYQKTNQAAFNICANSSLHDYAKIFPMNNATVAVDIYQGGVILGCLFGPAALYIWAIGLLAAGQSSTMTGTYAGQFVMEGFLRLRWSRFARVLLTRSCAILPTVLVAVFRDLRDLSGLNDLLNVLQSLLLPFAVLPILTFTSMPTLMQEFANGLLNKVVTSSIMVLVCAINLYFVVSYLPSLPHPAYFGLAALLAAAYLGLSTYLVWTCCLAHGATFLAHSSHHHFLYGLLEEDQKGETSG

SEQ ID NO: 286833 - DNA, 1299 bp, Artificial Sequence
  derived and/or modified sequence
atggtgcggtgtcagctgacagcaacatccacttcacaagtcccccggactgtcctgtggctgacaatagaattggctatagtgggaagtgacatgcaggaagtaatcggcacagccatagcattcaatctgctctctgctggacggattcctctttggggaggcgtactgataactattgtcgatacttttttcttcctgtttctggataactacggactgagaaagttggaggctttctttggactgttgattacgatcatggcgttgacgtttgggtacgaatacgtggtggcacgtccagaacagggcgccctgttacggggacttttcctgccatcctgcccgggctgcggacacccagagcttttacaggccgtaggtatcgtgggcgcaatcattatgcctcacaatatctatctgcatagcgcactggtaaaatccagagaaatagatagagcgagacgagctgacattcgtgaggccaacatgtatttcctcatcgaggctaccatcgcactgtcagtttccttcattatcaacctgtttgtcatggcagtgttcggtcaggccttctatcagaaaaccaatcaggcagcctttaacatatgcgccaatagttctctgcacgactatgcaaaaatcttccctatgaataatgcaacagtagcagtggatatctaccagggtggcgtcatcctgggttgtctgtttggacccgcagctctgtatatctgggccatcgggctgttggccgccggtcagtctagcacaatgactggcacgtacgcgggccagttcgtcatggagggatttttgcggctgagatggagtaggtttgctcgagtactgttgacaaggagctgcgcgatactgcctaccgtcctcgtcgccgttttccgtgatttgagagacttgagcggcttaaacgacttgctgaacgtgctgcagtcactgctgctcccttttgcagtgctccccatcctgacttttacaagcatgccgacgttaatgcaggagttcgcaaatgggctacttaacaaagtagtaacatcgtccatcatggttctcgtttgcgccatcaatctctattttgtggtgtcctaccttccttctttgccacaccccgcatacttcgggctggcggctctgctggcggctgcttacctaggcttaagcacatatttggtgtggacttgctgcctggctcacggggcgacttttttagcacattcctctcaccaccactttctgtacggcctccttgaagaggaccagaagggtgaaacatccggttag

SEQ ID NO: 286834 - DNA, 1299 bp, Artificial Sequence
  derived and/or modified sequence
atggtgcgctgccagctgacagccaccagcaccagccaggtgcccaggacagtgctgtggctgaccatcgagctggccatcgtgggcagtgacatgcaggaggtgattggaacagccatcgccttcaacctgctgtctgctggccgcatccccctgtggggcggcgtgctgatcaccatcgtggacaccttcttcttcctgttcctggacaactacggcctgaggaagctggaggccttcttcggcctgctgatcaccatcatggccctgaccttcggctatgaatatgtggtggcccggcctgagcagggcgccctgctgcggggcctcttcctgcccagctgccccggctgcggccaccctgagctgctgcaggccgtgggcatcgtgggcgccatcatcatgccccacaacatctacctgcacagcgccctggtgaagagccgggagattgaccgggccaggagagctgacatccgggaggccaacatgtacttcctgattgaggccaccatcgccctgtctgtgtccttcatcatcaacctgtttgtgatggctgtgtttggccaggccttctaccagaagaccaaccaggccgccttcaacatctgtgccaacagcagcctgcatgactatgccaagatcttccccatgaacaatgccaccgtggccgtggacatctaccagggcggcgtcatcctgggctgcctgtttggacctgctgccctgtacatctgggccatcggcctgctggccgccggccagagcagcaccatgacaggcacctacgccggccagtttgtgatggagggcttcctgcggctgcgctggagcagatttgcccgggtgctgctgaccaggagctgtgccatcctgcccaccgtgctggtggccgtgttccgggacctgcgggacctgagcggcctgaatgacctgctgaatgtgctgcagagcctgctgctgccctttgctgtgctgcccatcctgaccttcacctccatgcccaccctgatgcaggagtttgccaacggcctgctgaacaaggtggtgaccagcagcatcatggtgctggtgtgtgccatcaacctgtactttgtggtgtcctacctgcccagcctgccccacccagcctacttcggcctggccgccctgctggccgccgcctacctgggcctgagcacctacctggtgtggacctgctgcctggcccacggggccaccttcctggcccacagcagccaccaccacttcctgtatggcctgctggaggaggaccagaagggggagaccagcggctag

SEQ ID NO: 286835 - DNA, 1299 bp, Artificial Sequence
  derived and/or modified sequence
atggtgcggtgccagctgaccgccaccagcaccagccaggtgcccagaacggttctctggttgaccatagagcttgccatcgttggaagcgatatgcaggaggtcatcggcacggccatcgcctttaatctcctttccgccggacggatacctctgtggggaggggtgctgatcacaattgtagatacatttttcttcctctttttagacaactatggcctgcgcaaactggaagctttctttggcctcttaatcactataatggccctcactttcggttacgaatatgttgtggcccggcccgaacagggagccctgctgcgcgggctgttcttgccaagttgcccaggatgtggacatcccgaattgctgcaggctgtgggcattgttggcgcaattattatgcctcacaatatttacctccatagtgcactggtgaaatctagagagattgaccgggcaaggcgcgctgatatacgcgaagctaacatgtactttctaatcgaggcaactatcgccttaagtgtttcttttattatcaatctcttcgttatggctgtgttcggccaggccttttatcagaaaacaaaccaggcagcctttaacatctgcgcgaacagctctctgcatgattatgcaaagatcttcccgatgaacaatgcaacggtagctgtggatatctaccagggtggggtgattttgggatgtttattcggaccagctgccctgtatatatgggccattggactgctggctgctgggcagtccagcaccatgacgggcacctatgcagggcaattcgttatggagggctttttgagactgcggtggtccagattcgcccgcgtcttactgacacgctcctgcgccatcctgccgacggtgttagtggccgttttccgcgatctgcgggacctcagtggattaaacgacctgctgaacgtgctccagtctttgctgcttcccttcgcagtgctccccattctcacttttacctcaatgcccactctaatgcaggaattcgccaacggattactgaataaggtggtgacctcttccattatggtcctcgtctgcgccatcaatctgtacttcgtggtgtcctacctcccctcattgcctcacccagcctacttcggccttgcagcattgctcgcagcagcatatctgggccttagtacctacttggtttggacttgctgcctggctcacggcgcaacttttctagcccactccagtcaccaccatttcctgtatgggctgctcgaagaggaccagaaaggagagactagcggctag

SEQ ID NO: 286836 - DNA, 1299 bp, Artificial Sequence
  derived and/or modified sequence
atggttagatgccagcttactgcaactagtaccagccaagtgcccagaactgtgttgtggctaaccatagagctcgccatcgtgggaagcgatatgcaagaagtgatcggaaccgcgatagcatttaatttactttctgccggtcggatccctctgtggggaggtgtgcttatcactattgtcgatacattcttcttcttattcctggataactacggcctgcgcaaattggaggcattttttggactgttaattacgatcatggcattgacattcggatacgaatacgtggtagcacgacccgagcaaggagctctactgcggggattgtttctgcctagttgccctggatgcggacaccctgaacttttacaagccgtagggatagtgggagcaattataatgccacataacatttacctgcacagtgcactggttaaaagtagagagatagaccgcgctcggagagctgatatccgagaagccaatatgtactttctgatagaggctaccatagcccttagcgtatcctttattataaatttgtttgttatggccgtgtttgggcaggcattttaccagaaaaccaatcaagcagcgttcaacatatgcgcgaattcgtccctgcacgactacgccaagatcttcccgatgaataatgccaccgttgctgtcgatatctaccaaggtggtgtgatacttgggtgtctgtttggacccgcagccctttacatctgggcaatagggctactggccgcaggccagtcatccacgatgacaggtacctacgccggacaatttgtgatggaaggttttctacgcctgagatggagtaggtttgcaagggtgctgctgacaaggtcatgtgctattttaccaaccgttctggttgctgtgttcagggatctgagggatttgagtggccttaatgatctgctgaatgtgctgcagtccttgctactgcccttcgccgtattgccaatcctgacattcaccagtatgccgacattaatgcaagagttcgcaaatggactcttgaacaaagttgtgaccagctccatcatggttttggtttgcgcaattaacctgtactttgtagtgtcttaccttccctcactgccccatcctgcttactttgggttggcggctttactcgccgcagcatatctgggcctatccacatacctggtgtggacttgttgtttagcccatggcgctactttccttgcgcacagcagccaccatcactttctgtatggcctacttgaagaagatcagaagggggagacaagtgggtag

SEQ ID NO: 286837 - DNA, 2136 bp, Artificial Sequence
  derived and/or modified sequence
gatgggtaacagggcgtgggctggcacacttacttgcaccagtgcccagagagggggtgcaggctgaggagctgcccagagcaccgctcacactcccagagtacctgaagtcggcatttcaatgacaggtgacaagggtccccaaaggctaagcgggtccagctatggttccatctccagcccgaccagcccgaccagcccagggccacagcaagcacctcccagagagacctacctgagtgagaagatccccatcccagacacaaaaccgggcaccttcagcctgcggaagctatgggccttcacggggcctggcttcctcatgagcattgctttcctggacccaggaaacatcgagtcagatcttcaggctggcgccgtggcgggattcaaacttctctgggtgctgctctgggccaccgtgttgggcttgctctgccagcgactggctgcacgtctgggcgtggtgacaggcaaggacttgggcgaggtctgccatctctactaccctaagtcggagtctcgctccgtcgcccagtcaggagtgcaatggtgcgatgtcagctcactgcaacctctacctcccaggtgccccgcaccgtcctctggctgaccatcgagctagccattgtgggctccgacatgcaggaagtcatcggcacggccattgcattcaatctgctctcagctggacgaatcccactctggggtggcgtcctcatcaccatcgtggacaccttcttcttcctcttcctcgataactacgggctgcggaagctggaagctttttttggactccttataaccattatggccttgacctttggctatgagtatgtggtggcgcgtcctgagcagggagcgcttcttcggggcctgttcctgccctcgtgcccgggctgcggccaccccgagctgctgcaggcggtgggcattgttggcgccatcatcatgccccacaacatctacctgcactcggccctggtcaagtctcgagagatagaccgggcccgccgagcagacatcagagaagccaacatgtacttcctgattgaggccaccatcgccctgtccgtctcctttatcatcaacctctttgtcatggctgtctttgggcaggccttctaccagaaaaccaaccaggctgcgttcaacatctgtgccaacagcagcctccacgactacgccaagatcttccccatgaacaacgccaccgtggccgtggacatttaccaggggggcgtgatcctgggctgcctgttcggccccgcggccctctacatctgggccataggtctcctggcggctgggcagagctccaccatgacgggcacctacgcgggacagttcgtgatggagggcttcctgaggctgcggtggtcacgcttcgcccgtgtcctcctcacccgctcctgcgccatcctgcccaccgtgctcgtggctgtcttccgggacctgagggacttgtcgggcctcaatgatctgctcaacgtgctgcagagcctgctgctcccgttcgccgtgctgcccatcctcacgttcaccagcatgcccaccctcatgcaggagtttgccaatggcctgctgaacaaggtcgtcacctcttccatcatggtgctagtctgcgccatcaacctctacttcgtggtcagctatctgcccagcctgccccaccctgcctacttcggccttgcagccttgctggccgcagcctacctgggcctcagcacctacctggtctggacctgttgccttgcccacggagccacctttctggcccacagctcccaccaccacttcctgtatgggctccttgaagaggaccagaaaggggagacctctggctaggcccacaccagggcctggctgggagtggcatgtatgacgtgactggcctgctggatgtggagggggcgcgtgcaggcagcaggatagagtgggacagttcctgagaccagccaacctgggggctttagggacctgctgtttcctagcgcagccatgtgattaccctctgggtctcagtgtcctcatctgtaaaatggagacaccaccacccttgccatggaggttaagcactttaacacagtgtctggcacttgggacaaaaacaaacaaacgaaaaacatttcaaaa

SEQ ID NO: 286838 - DNA, 2043 bp, Artificial Sequence
  derived and/or modified sequence
ggctgaggagctgcccagagcaccgctcacactcccagagtacctgaagtcggcatttcaatgacaggtgacaagggtccccaaaggctaagcgggtccagctatggttccatctccagcccgaccagcccgaccagcccagggccacagcaagcacctcccagagagacctacctgagtgagaagatccccatcccagacacaaaaccgggcaccttcagcctgcggaagctatgggccttcacggggcctggcttcctcatgagcattgctttcctggacccaggaaacatcgagtcagatcttcaggctggcgccgtggcgggattcaaacttctctgggtgctgctctgggccaccgtgttgggcttgctctgccagcgactggctgcacgtctgggcgtggtgacaggcaaggacttgggcgaggtctgccatctctactaccctaagtcggagtctcgctccgtcgcccagtcaggagtgcaatggtgcgatgtcagctcactgcaacctctacctcccaggtgccccgcaccgtcctctggctgaccatcgagctagccattgtgggctccgacatgcaggaagtcatcggcacggccattgcattcaatctgctctcagctggacgaatcccactctggggtggcgtcctcatcaccatcgtggacaccttcttcttcctcttcctcgataactacgggctgcggaagctggaagctttttttggactccttataaccattatggccttgacctttggctatgagtatgtggtggcgcgtcctgagcagggagcgcttcttcggggcctgttcctgccctcgtgcccgggctgcggccaccccgagctgctgcaggcggtgggcattgttggcgccatcatcatgccccacaacatctacctgcactcggccctggtcaagtctcgagagatagaccgggcccgccgagcagacatcagagaagccaacatgtacttcctgattgaggccaccatcgccctgtccgtctcctttatcatcaacctctttgtcatggctgtctttgggcaggccttctaccagaaaaccaaccaggctgcgttcaacatctgtgccaacagcagcctccacgactacgccaagatcttccccatgaacaacgccaccgtggccgtggacatttaccaggggggcgtgatcctgggctgcctgttcggccccgcggccctctacatctgggccataggtctcctggcggctgggcagagctccaccatgacgggcacctacgcgggacagttcgtgatggagggcttcctgaggctgcggtggtcacgcttcgcccgtgtcctcctcacccgctcctgcgccatcctgcccaccgtgctcgtggctgtcttccgggacctgagggacttgtcgggcctcaatgatctgctcaacgtgctgcagagcctgctgctcccgttcgccgtgctgcccatcctcacgttcaccagcatgcccaccctcatgcaggagtttgccaatggcctgctgaacaaggtcgtcacctcttccatcatggtgctagtctgcgccatcaacctctacttcgtggtcagctatctgcccagcctgccccaccctgcctacttcggccttgcagccttgctggccgcagcctacctgggcctcagcacctacctggtctggacctgttgccttgcccacggagccacctttctggcccacagctcccaccaccacttcctgtatgggctccttgaagaggaccagaaaggggagacctctggctaggcccacaccagggcctggctgggagtggcatgtatgacgtgactggcctgctggatgtggagggggcgcgtgcaggcagcaggatagagtgggacagttcctgagaccagccaacctgggggctttagggacctgctgtttcctagcgcagccatgtgattaccctctgggtctcagtgtcctcatctgtaaaatggagacaccaccacccttgccatggaggttaagcactttaacacagtgtctggcacttggg

SEQ ID NO: 286839 - DNA, 1299 bp, Artificial Sequence
  derived and/or modified sequence
atggtgagatgccagctgaccgccaccagcaccagccaggtgcccagaaccgtgctgtggctgaccatcgagctggccatcgtgggcagcgacatgcaggaggtgatcggcaccgccatcgccttcaacctgctgagcgccggcagaatccccctgtggggcggcgtgctgatcaccatcgtggacaccttcttcttcctgttcctggacaactacggcctgagaaagctggaggccttcttcggcctgctgatcaccatcatggccctgaccttcggctacgagtacgtggtggccagacccgagcagggcgccctgctgagaggcctgttcctgcccagctgccccggctgcggccaccccgagctgctgcaggccgtgggcatcgtgggcgccatcatcatgccccacaacatctacctgcacagcgccctggtgaagagcagagagatcgacagagccagaagagccgacatcagagaggccaacatgtacttcctgatcgaggccaccatcgccctgagcgtgagcttcatcatcaacctgttcgtgatggccgtgttcggccaggccttctaccagaagaccaaccaggccgccttcaacatctgcgccaacagcagcctgcacgactacgccaagatcttccccatgaacaacgccaccgtggccgtggacatctaccagggcggcgtgatcctgggctgcctgttcggccccgccgccctgtacatctgggccatcggcctgctggccgccggccagagcagcaccatgaccggcacctacgccggccagttcgtgatggagggcttcctgagactgagatggagcagattcgccagagtgctgctgaccagaagctgcgccatcctgcccaccgtgctggtggccgtgttcagagacctgagagacctgagcggcctgaacgacctgctgaacgtgctgcagagcctgctgctgcccttcgccgtgctgcccatcctgaccttcaccagcatgcccaccctgatgcaggagttcgccaacggcctgctgaacaaggtggtgaccagcagcatcatggtgctggtgtgcgccatcaacctgtacttcgtggtgagctacctgcccagcctgccccaccccgcctacttcggcctggccgccctgctggccgccgcctacctgggcctgagcacctacctggtgtggacctgctgcctggcccacggcgccaccttcctggcccacagcagccaccaccacttcctgtacggcctgctggaggaggaccagaagggcgagaccagcggctag

SEQ ID NO: 286840 - protein, 398 aa, Artificial Sequence
  derived and/or modified sequence
MLRLYVLVMGVSAFTLQPAAHTGAARSCRFRGRHYKREFRLEGEPVALRCPQVPYWLWASVSPRINLTWHKNDSARTVPGEEETRMWAQDGALWLLPALQEDSGTYVCTTRNASYCDKMSIELRVFENTDAFLPFISYPQILTLSTSGVLVCPDLSEFTRDKTDVKIQWYKDSLLLDKDNEKFLSVRGTTHLLVHDVALEDAGYYRCVLTFAHEGQQYNITRSIELRIKKKKEETIPVIISPLKTISASLGSRLTIPCKVFLGTGTPLTTMLWWTANDTHIESAYPGGRVTEGPRQEYSENNENYIEVPLIFDPVTREDLHMDFKCVVHNTLSFQTLRTTVKEASSTFSWGIVLAPLSLAFLVLGGIWMHRRCKHRTGKADGLTVLWPHHQDFQSYPK

SEQ ID NO: 286841 - DNA, 1578 bp, Artificial Sequence
  derived and/or modified sequence
cccgtgaggaggaaaaggtgtgtccgctgccacccagtgtgagcgggtgacaccacccggttaggaaatcccagctcccaagagggtataaatccctgctttactgctgagctcctgctggaggtgaaagtctggcctggcagccttccccaggtgagcagcaacaaggccacgtgctgctgggtctcagtcctccacttcccgtgtcctctggaagttgtcaggagcaatgttgcgcttgtacgtgttggtaatgggagtttctgccttcacccttcagcctgcggcacacacaggggctgccagaagctgccggtttcgtgggaggcattacaagcgggagttcaggctggaaggggagcctgtagccctgaggtgcccccaggtgccctactggttgtgggcctctgtcagcccccgcatcaacctgacatggcataaaaatgactctgctaggacggtcccaggagaagaagagacacggatgtgggcccaggacggtgctctgtggcttctgccagccttgcaggaggactctggcacctacgtctgcactactagaaatgcttcttactgtgacaaaatgtccattgagctcagagtttttgagaatacagatgctttcctgccgttcatctcatacccgcaaattttaaccttgtcaacctctggggtattagtatgccctgacctgagtgaattcacccgtgacaaaactgacgtgaagattcaatggtacaaggattctcttcttttggataaagacaatgagaaatttctaagtgtgagggggaccactcacttactcgtacacgatgtggccctggaagatgctggctattaccgctgtgtcctgacatttgcccatgaaggccagcaatacaacatcactaggagtattgagctacgcatcaagaaaaaaaaagaagagaccattcctgtgatcatttcccccctcaagaccatatcagcttctctggggtcaagactgacaatcccgtgtaaggtgtttctgggaaccggcacacccttaaccaccatgctgtggtggacggccaatgacacccacatagagagcgcctacccgggaggccgcgtgaccgaggggccacgccaggaatattcagaaaataatgagaactacattgaagtgccattgatttttgatcctgtcacaagagaggatttgcacatggattttaaatgtgttgtccataataccctgagttttcagacactacgcaccacagtcaaggaagcctcctccacgttctcctggggcattgtgctggccccactttcactggccttcttggttttggggggaatatggatgcacagacggtgcaaacacagaactggaaaagcagatggtctgactgtgctatggcctcatcatcaagactttcaatcctatcccaagtgaaataaatggaatgaaataattcaaacacaaactccgtacgtcttctcttatggaagtggctgtgtctttttgagggactctgttctttgcctcagttgtctaccaaaggtgccacatttatagtggctttgtagtaaaggactaaagtctta

SEQ ID NO: 286842 - DNA, 1405 bp, Artificial Sequence
  derived and/or modified sequence
gtgggatgggagatactgttgtggtcacctctggaaaatacattctgctactcttaaaaactagtgacgctcatacaaatcaacagaaagagcttctgaaggaagactttaaagctgcttctgccacgtgctgctgggtctcagtcctccacttcccgtgtcctctggaagttgtcaggagcaatgttgcgcttgtacgtgttggtaatgggagtttctgccttcacccttcagcctgcggcacacacaggggctgccagaagctgccggtttcgtgggaggcattacaagcgggagttcaggctggaaggggagcctgtagccctgaggtgcccccaggtgccctactggttgtgggcctctgtcagcccccgcatcaacctgacatggcataaaaatgactctgctaggacggtcccaggagaagaagagacacggatgtgggcccaggacggtgctctgtggcttctgccagccttgcaggaggactctggcacctacgtctgcactactagaaatgcttcttactgtgacaaaatgtccattgagctcagagtttttgagaatacagatgctttcctgccgttcatctcatacccgcaaattttaaccttgtcaacctctggggtattagtatgccctgacctgagtgaattcacccgtgacaaaactgacgtgaagattcaatggtacaaggattctcttcttttggataaagacaatgagaaatttctaagtgtgagggggaccactcacttactcgtacacgatgtggccctggaagatgctggctattaccgctgtgtcctgacatttgcccatgaaggccagcaatacaacatcactaggagtattgagctacgcatcaagaaaaaaaaagaagagaccattcctgtgatcatttcccccctcaagaccatatcagcttctctggggtcaagactgacaatcccgtgtaaggtgtttctgggaaccggcacacccttaaccaccatgctgtggtggacggccaatgacacccacatagagagcgcctacccgggaggccgcgtgaccgaggggccacgccaggaatattcagaaaataatgagaactacattgaagtgccattgatttttgatcctgtcacaagagaggatttgcacatggattttaaatgtgttgtccataataccctgagttttcagacactacgcaccacagtcaaggaagcctcctccacgttctcctggggcattgtgctggccccactttcactggccttcttggttttggggggaatatggatgcacagacggtgcaaacacagaactggaaaagcagatggtctgactgtgctatggcctcatcatcaagactttcaatcctatcccaagtgaaataaatggaatgaaataattcaaa

SEQ ID NO: 286843 - protein, 70 aa, Artificial Sequence
  derived and/or modified sequence
MGKKLDLSKLTDEEAQHVLEVVQRDFDLRRKEEERLEALKGKIKKESSKRELLSDTAHLNETHCARCLQP

SEQ ID NO: 286844 - protein, 54 aa, Artificial Sequence
  derived and/or modified sequence
MEQSNDSLRVNHNDGEESKTSAQVFEHLICMDSRDSSFGQNDSPTVLPITTREA

SEQ ID NO: 286845 - protein, 21 aa, Artificial Sequence
  derived and/or modified sequence
MEQSNDSLRVNHNDGEESKTS

SEQ ID NO: 286846 - protein, 95 aa, Artificial Sequence
  derived and/or modified sequence
MEQSNDSLRVNHNDGEESKTSAQVFEHLICMDSRDSSFGQNDSPTVLPITTREANNSLISQNIPGPLTQTQTLSAEQFHLVDQNGQAIQYELQSL

SEQ ID NO: 286847 - protein, 131 aa, Artificial Sequence
  derived and/or modified sequence
MEQSNDSLRVNHNDGEESKTSAQVFEHLICMDSRDSSFGQNDSPTVLPITTREANNSLISQNIPGPLTQTQTLSAEQFHLVDQNGQAIQYELQSLGESNAQMMIVASPTENGQVLRVIPPTQTGMAQVIIP

SEQ ID NO: 286848 - DNA, 165 bp, Artificial Sequence
  derived and/or modified sequence
atggaacagtctaatgactctctgcgggtaaaccataacgacggcgaggaaagcaagacttctgctcaggttttcgagcatctaatttgtatggatagccgtgactcaagttttggccagaatgactcccccacagttttaccaataactactcgggaggcatag

SEQ ID NO: 286849 - DNA, 396 bp, Artificial Sequence
  derived and/or modified sequence
atggaacagtctaatgacagcctgagggtaaaccacaatgatggggaggagagtaagacttctgcgcaggtgttcgagcacctcatctgcatggatagtagagacagtagcttcggtcagaacgactctcccactgtcctgccgataactacacgtgaggctaataattctcttataagccaaaacattccaggtcctctgacccagactcagacgctcagtgccgaacagttccacctcgtggaccagaatggccaggccatccaatacgaactgcagagcctcggggaatccaacgcgcagatgatgatcgtagcatctcccaccgagaacggacaggtgcttcgggtgatccccccaacacagactggcatggcccaggtgattattccatag

SEQ ID NO: 286850 - DNA, 222 bp, Artificial Sequence
  derived and/or modified sequence
atggagcagagcaatgactcccttcgcgtgaatcacaatgacggtgaggagtctaaaacttccgcacaggttttcgagcatcttatttgcatggattctcgggatagctcattcgggcagaacgacagccccactgtcttgccgatcacgacaagggaggccaacaatagcctgatttctcagaatatccccggcccactgacccagacccaaacactgtag

SEQ ID NO: 286851 - DNA, 222 bp, Artificial Sequence
  derived and/or modified sequence
atggagcaatccaacgactccctacgcgttaaccacaatgacggtgaagagtccaagacttctgctcaagttttcgaacacctgatctgtatggacagccgtgattcttcatttggccagaatgactctccaacagtgctgcccatcaccactcgtgaggcaaataattccttaattagccagaacattcccggcccgttgacccagacccagaccttgtag

SEQ ID NO: 286852 - DNA, 288 bp, Artificial Sequence
  derived and/or modified sequence
atggaacaatccaacgacagtctgcgggtaaatcacaacgacggcgaagagagtaagacaagcgcccaggtattcgagcaccttatttgtatggactctcgtgactcctccttcggacagaacgattctcctacagtgcttcctataactacccgtgaggccaacaactctttaatctcccagaacattccgggccccctcacacagacgcagactctctccgcggagcaatttcacctcgtggatcagaacggccaagcaatccagtacgaacttcagagcctgtag

SEQ ID NO: 286853 - DNA, 624 bp, Artificial Sequence
  derived and/or modified sequence
atgctggaggcctggaatctgaacctgagccactatctgaagcaccttatctgtatggactcaagagacagcagcttcggccagaatgatagcccaactgtccttcccatcactactagagaggctaataatagcttaatcagccagaatatcccaggtcccctgacgcagacccagaccctctcagcagagcagttccatctcgtggaccagaatggacaggccattcagtacgagctgcagagcttaggcgaatctaacgcccaaatgatgattgtagcaagccccaccgaaaatggacaggtcctccgagtgattcctcctacccagaccggaatggcccaggtgattattccccaggggcagctggtggacgtcaatagcccaagggatgttccggaagaaaaacctagcaaccggaacctcccgaccgtgagagtcgacactctggcggacaatacctcgaactacatcctgcatccccagacctcctttccattgcccaaaaagtctgtcactgggatgttagaagaaccattgctcgggccattacaacccctgtcaagcaacactccgatttgggcttgtcgcctgagatcttgcgaaggcgtcgaactgtggtag

SEQ ID NO: 286854 - DNA, 165 bp, Artificial Sequence
  derived and/or modified sequence
atggagcagagcaatgacagcctgcgggtgaaccacaatgatggagaggagagcaagaccagcgcccaggtgtttgagcacctgatctgcatggacagccgggacagcagctttggccagaatgacagccccaccgtgctgcccatcaccacccgggaggcctag

SEQ ID NO: 286855 - DNA, 396 bp, Artificial Sequence
  derived and/or modified sequence
atggagcagagcaatgacagcctgcgggtgaaccacaatgatggagaggagagcaagaccagcgcccaggtgtttgagcacctgatctgcatggacagccgggacagcagctttggccagaatgacagccccaccgtgctgcccatcaccacccgggaggccaacaacagcctcatcagccagaacatccctggccccctgacccagacccagaccctgtctgctgagcagttccacctggtggaccagaatggccaggccatccagtatgagctgcagagcctgggggagagcaatgcccagatgatgattgtggccagccccacagaaaatggccaggtgctgcgggtcatcccccccacccagacaggcatggcccaggtgatcatcccctag

SEQ ID NO: 286856 - DNA, 222 bp, Artificial Sequence
  derived and/or modified sequence
atggagcagagcaatgacagcctgcgggtgaaccacaatgatggagaggagagcaagaccagcgcccaggtgtttgagcacctgatctgcatggacagccgggacagcagctttggccagaatgacagccccaccgtgctgcccatcaccacccgggaggccaacaacagcctcatcagccagaacatccctggccccctgacccagacccagaccctgtag

SEQ ID NO: 286857 - DNA, 288 bp, Artificial Sequence
  derived and/or modified sequence
atggagcagagcaatgacagcctgcgggtgaaccacaatgatggagaggagagcaagaccagcgcccaggtgtttgagcacctgatctgcatggacagccgggacagcagctttggccagaatgacagccccaccgtgctgcccatcaccacccgggaggccaacaacagcctcatcagccagaacatccctggccccctgacccagacccagaccctgtctgctgagcagttccacctggtggaccagaatggccaggccatccagtatgagctgcagagcctgtag

SEQ ID NO: 286858 - DNA, 624 bp, Artificial Sequence
  derived and/or modified sequence
atgctggaggcctggaacctgaacctgagccactacctgaagcacctgatctgcatggacagccgggacagcagctttggccagaatgacagccccaccgtgctgcccatcaccacccgggaggccaacaacagcctcatcagccagaacatccctggccccctgacccagacccagaccctgtctgctgagcagttccacctggtggaccagaatggccaggccatccagtatgagctgcagagcctgggggagagcaatgcccagatgatgattgtggccagccccacagaaaatggccaggtgctgcgggtcatcccccccacccagacaggcatggcccaggtgatcatcccccagggccagctggtggatgtgaacagccccagagatgtgcctgaggagaagcccagcaacagaaacctgcccaccgtgcgggtggacaccctggccgacaacaccagcaactacatcctgcacccccagaccagcttccccctgcccaagaagtctgtgacaggcatgctggaggagcccctgctgggccccctgcagcccctgagcagcaacacccccatctgggcctgccgcctgcggagctgtgaaggagtggagctgtggtag

SEQ ID NO: 286859 - DNA, 165 bp, Artificial Sequence
  derived and/or modified sequence
atggagcagagcaacgacagcctgcgggtgaaccacaacgacggcgaggagagtaagacatctgcacaagtatttgagcacctgatttgtatggactcgcgcgactcgagtttcggccagaacgattctcccacggtgctgcccataaccactagggaggcttag

SEQ ID NO: 286860 - DNA, 396 bp, Artificial Sequence
  derived and/or modified sequence
atggagcagagcaacgacagcctgcgggtgaaccacaacgacggcgaagagagcaagactagcgcacaggtgttcgaacacctcatttgcatggattctagagacagttcatttggacagaacgattccccaacggtccttcccatcacaaccagagaggcaaacaattcactcataagccaaaacatccctgggccattgactcagacgcagacactgagcgctgaacagtttcacttggttgaccagaacgggcaggcgatacaatacgagctgcagagcttgggagagtctaatgcccagatgatgattgtggcgtcccccacggaaaatggtcaggtgctgcgcgtgattccgcccacacagacgggaatggcccaggtgattataccttag

SEQ ID NO: 286861 - DNA, 222 bp, Artificial Sequence
  derived and/or modified sequence
atggagcagagcaacgacagcctgcgggtgaaccacaacgacggcgaggagtctaagactagcgctcaggtgtttgagcacctgatttgcatggactccagggacagctcttttggacaaaacgatagcccgactgtgttaccaataaccacgagagaggcaaacaattccctcatctcccagaatattcctggtcccttgacccaaacacagacactctag

SEQ ID NO: 286862 - DNA, 222 bp, Artificial Sequence
  derived and/or modified sequence
atggagcagagcaacgacagcctgcgggtgaaccacaacgacggcgaggagtccaagacctccgctcaggtctttgaacacctgatatgcatggacagtagggactccagttttgggcaaaatgatagtcctactgtacttccaatcactacacgggaagcaaacaatagcctgatatcacagaacattcctggcccactcacacagacacaaacgctttag

SEQ ID NO: 286863 - DNA, 288 bp, Artificial Sequence
  derived and/or modified sequence
atggagcagagcaacgacagcctgcgggtgaaccacaacgacggcgaggagagcaagacaagcgcccaggtgttcgagcatctaatatgtatggattctagggattcctcgtttggccagaacgatagccctacagtgctccctattacaacgcgggaggctaacaacagcctcatttcccagaacatcccagggccactgacacagacgcagaccctgtcagctgagcagtttcacttggtggaccaaaatggccaggctatccaatacgagctacagtccctgtag

SEQ ID NO: 286864 - DNA, 624 bp, Artificial Sequence
  derived and/or modified sequence
atgctggaggcctggaacctgaacctgagccactacctgaagcaccttatctgcatggatagccgtgattcctcctttgggcaaaatgacagccccaccgtgctgcccataacgactcgtgaggcaaacaacagcctgattagccagaacatacccggacccttaacccaaacccagacactgtctgccgaacagttccatctcgtcgatcagaatggacaagccatccagtatgagctgcagagcctaggagagtctaacgcccagatgatgattgtggcctctccaactgaaaacgggcaggttctgagggtcatccctccgactcagacaggcatggctcaagtcatcattccgcaggggcagctcgtggatgtgaacagtcccagggacgtacctgaggagaagccgagcaaccgtaatttaccgacagtacgcgtggatacccttgcggacaatacgtcaaactacatcctgcacccgcagacatccttccctcttcccaagaaaagcgtgaccggaatgctggaggaacccctactaggacccctgcagcctctatcttcaaacacccccatttgggcttgtaggctgcgaagctgtgagggagttgagctctggtag

SEQ ID NO: 286865 - DNA, 575 bp, Artificial Sequence
  derived and/or modified sequence
ggactgctctgcgcgctcccggtggggcgcgcctgcgcattatgctggtctccatggcggggcctcggagccaagacgagagaaaatgctgctgtgaagacccaattaaagctttcacataaatgaagctacagctatcatgatttagtgcccccaaaaggaagaacttcagtggacaagaaaggacatttctgggggtagtagaatgcttgaggcctggaatttaaacctgagccactatctgaagacggagtcttgccctgttgcccaggctagagtgccaaggcacgatcttggcttactgcaacctccacttcccagattcaagcagttttcgtgccttagtcacttgaggagctctggttacagctattaaataatagaagaaaatggaattgaatatgatgtcagcatggaacaatctaatgattcattaagagtcaaccataatgacggtgaagagtcaaaaaccagtgctcaagtatttgagcatctaatctgtatggactccagggattcttcctttggacaaaatgattctcctacagttttgcccatcactactcgtgaagcaa

SEQ ID NO: 286866 - DNA, 726 bp, Artificial Sequence
  derived and/or modified sequence
gcgcctgcgcattatgctggtctccatggcggggcctcggagccaagacgaggcattcgcttcaagagacaagcagtttagaatcaggcagaactggattgcaaaatttatgggcagaccgagaaaatgctgctgtgaagacccaattaaagctttcacataaatgaagctacagctatcatgatttagtgcccccaaaaggaagaacttcagtggacaagaaaggacatttctgggggtagtagaatgcttgaggcctggaatttaaacctgagccactatctgaagctattaaataatagaagaaaatggaattgaatatgatgtcagcatggaacaatctaatgattcattaagagtcaaccataatgacggtgaagagtcaaaaaccagtgctcaagtatttgagcatctaatctgtatggactccagggattcttcctttggacaaaatgattctcctacagttttgcccatcactactcgtgaagcaaataattcactcatatcacagaatataccagggcccctgactcagacacagactctttctgcagagcaattccatctagtggaccaaaatgggcaggctattcaatatgaacttcagtcattgggggaatccaatgcacaaatgatgatcgttgccagcccaacagaaaatggacaggtacttcgtgtaattccacctacccagacaggaatggcacaagtgattatacctca

SEQ ID NO: 286867 - DNA, 595 bp, Artificial Sequence
  derived and/or modified sequence
gcgcattatgctggtctccatggcggggcctcggagccaagacgagagaaaatgctgctgtgaagacccaattaaagctttcacataaatgaagctacagctatcatgatttagtgcccccaaaaggaagaacttcagtggacaagaaaggacatttctgggggtagtagaatgcttgaggcctggaatttaaacctgagccactatctgaaggtttaatatatctttgccaagtccaagggtacaaagattttctcctgtgttttcttctagaagttttatcatttgatagtctgtgatccatttcaagttgatttgctatctggtgtgagctattaaataatagaagaaaatggaattgaatatgatgtcagcatggaacaatctaatgattcattaagagtcaaccataatgacggtgaagagtcaaaaaccagtgctcaagtatttgagcatctaatctgtatggactccagggattcttcctttggacaaaatgattctcctacagttttgcccatcactactcgtgaagcaaataattcactcatatcacagaatataccagggcccctgactcagacacagactcttt

SEQ ID NO: 286868 - DNA, 572 bp, Artificial Sequence
  derived and/or modified sequence
gcgcattatgctggtctccatggcggggcctcggagccaagacgagagaaaatgctgctgtgaagacccaattaaagctttcacataaatgaagctacagctatcatgatttagtgcccccaaaaggaagaacttcagtggacaagaaaggacatttctgggggtagtagaatgcttgaggcctggaatttaaacctgagccactatctgaaggctggagtgcagtgctatgatcacagctgactgcagtcttaacctcccaggatcaagtgatcctcccacctcagccatctgattacctgggactgcagctattaaataatagaagaaaatggaattgaatatgatgtcagcatggaacaatctaatgattcattaagagtcaaccataatgacggtgaagagtcaaaaaccagtgctcaagtatttgagcatctaatctgtatggactccagggattcttcctttggacaaaatgattctcctacagttttgcccatcactactcgtgaagcaaataattcactcatatcacagaatataccagggcccctgactcagacacagactct

SEQ ID NO: 286869 - DNA, 597 bp, Artificial Sequence
  derived and/or modified sequence
attatgctggtctccatggcggggcctcggagccaagacgagagaaaatgctgctgtgaagacccaattaaagctttcacataaatgaagctacagctatcatgatttagtgcccccaaaaggaagaacttcagtggacaagaaaggacatttctgggggtagtagaatgcttgaggcctggaatttaaacctgagccactatctgaagaagttttatcatttgatagtctgtgatccatttcaagttgatttgctatctggtgtgagctattaaataatagaagaaaatggaattgaatatgatgtcagcatggaacaatctaatgattcattaagagtcaaccataatgacggtgaagagtcaaaaaccagtgctcaagtatttgagcatctaatctgtatggactccagggattcttcctttggacaaaatgattctcctacagttttgcccatcactactcgtgaagcaaataattcactcatatcacagaatataccagggcccctgactcagacacagactctttctgcagagcaattccatctagtggaccaaaatgggcaggctattcaatatgaacttcagtcattgg

SEQ ID NO: 286870 - DNA, 1136 bp, Artificial Sequence
  derived and/or modified sequence
atgctggtctccatggcggggcctcggagccaagacgagagaaaatgctgctgtgaagacccaattaaagctttcacataaatgaagctacagctatcatgatttagtgcccccaaaaggaagaacttcagtggacaagaaaggacatttctgggggtagtagaatgcttgaggcctggaatttaaacctgagccactatctgaagcatctaatctgtatggactccagggattcttcctttggacaaaatgattctcctacagttttgcccatcactactcgtgaagcaaataattcactcatatcacagaatataccagggcccctgactcagacacagactctttctgcagagcaattccatctagtggaccaaaatgggcaggctattcaatatgaacttcagtcattgggggaatccaatgcacaaatgatgatcgttgccagcccaacagaaaatggacaggtacttcgtgtaattccacctacccagacaggaatggcacaagtgattatacctcaggggcaacttgtggatgtgaatagtcctcgggatgtccctgaagagaaacccagtaacagaaacttaccaactgtaagagtggatactctagcagacaataccagcaattacattcttcatcctcaaacatccttcccattgcccaaaaagtcagtgaccggaatgctggaagaaccccttctggggcctcttcagccactttcttctaatacacctatatgggcctgccgtcttaggagctgtgagggagtagagctgtggtaatggagtgtcagtatgggccaagaagaaaaggtttccagttaaaaaaagtcagtgagcaggaaagcaggtcttgtcagctctacaaagccacttgtccagctcggatttacattaaaaaggtacagaagtttcctgaatatagagttcctacagaccccaaaattgacaagaaaattatcagaatggagcaggagaaagcttttaacatgctaaagaagaacttggtagatgctggtggtgttcttaggtggtatgtacagttacctacacagcaagctcatcagtatcatgaattagagactccctgcctcactttgtcaccttctccttttcctgtgtcttctcttg

SEQ ID NO: 286871 - DNA, 165 bp, Artificial Sequence
  derived and/or modified sequence
atggagcagtccaacgattctctgagagtcaatcacaatgacggggaggaaagtaagacatccgcgcaggtgttcgaacacttaatctgcatggactcccgagactcatcatttgggcagaatgactcccccaccgtgttacccattacaactcgcgaggcctag

SEQ ID NO: 286872 - DNA, 396 bp, Artificial Sequence
  derived and/or modified sequence
atggagcagagcaacgacagcctgcgggtgaatcacaacgacggtgaggagtccaaaacctcagcccaagtctttgaacatctgatctgcatggactctcgagactcctccttcggccagaatgacagtcccaccgtccttcccatcacgacccgggaggctaataatagcttgatctctcagaacattcctgggcctctcacccaaacccagaccctgtcagcagagcagttccacctcgtcgatcagaatggccaggctatccagtatgagcttcagagcctgggcgaatcaaatgctcaaatgatgatagtcgccagcccaaccgagaacggccaggtactgcgcgtgatcccccctacccagacaggcatggcccaggtgataatcccctag

SEQ ID NO: 286873 - DNA, 222 bp, Artificial Sequence
  derived and/or modified sequence
atggagcagtctaacgactccctccgcgtgaatcataatgatggggaagagtccaagacctcagctcaggtattcgaacatctaatctgcatggattctagggactcctctttcggtcagaacgacagcccgaccgtgctacccatcacgactcgagaggcaaacaacagtttaataagtcagaacatacctggaccactgacccagacgcagaccctatag

SEQ ID NO: 286874 - DNA, 222 bp, Artificial Sequence
  derived and/or modified sequence
atggaacagagcaacgacagcctccgtgtcaaccacaatgacggcgaggagtcaaaaaccagcgcccaagtgtttgaacacttaatttgcatggactctcgcgactcctctttcggacagaatgacagtccaaccgtcctgccaataaccactcgcgaagccaataattctctcatctctcagaacatccctggccctctgacccaaacccaaacattatag

SEQ ID NO: 286875 - DNA, 288 bp, Artificial Sequence
  derived and/or modified sequence
atggagcagagtaatgatagtttgcgtgtaaatcataacgacggcgaagaaagtaagacctccgcccaagtcttcgaacacctgatttgcatggactccagggattcatcgttcggccaaaatgactctccaacagtgctccccatcacaactcgcgaggctaataatagtctgatttcacaaaacattcccggaccccttactcaaactcagactctatccgctgagcagtttcacctggtggaccaaaacggtcaggctattcagtacgagctgcagagcctgtag

SEQ ID NO: 286876 - DNA, 624 bp, Artificial Sequence
  derived and/or modified sequence
atgttggaagcgtggaacctgaacctttctcactacttgaaacatctcatatgtatggactcccgcgattcatcttttggccagaatgatagtccaacagtgctccctataacaacccgcgaagcaaataattctctgattagccagaatatcccgggaccactgactcagactcaaaccctgagtgccgaacaattccatctcgtcgatcagaacgggcaggctatccagtatgaactgcaaagtcttggggagtcgaatgcgcagatgatgatcgtcgcaagtcccacagagaatgggcaggtgctcagagtgatccctcctacccagaccggaatggctcaagtcattattcctcaggggcagttagtggacgtaaactctccgagagatgttcccgaagagaagccctcgaatcggaatttgccaacagtccgggtcgataccctggccgataacacctctaattacatcctgcacccccagacctcattcccactgcccaaaaagagcgttaccggtatgcttgaagaacctctcctcggtccactgcagcctttgagctcaaacacgccgatatgggcttgccggttgaggtcgtgtgagggggtagaattatggtag

SEQ ID NO: 286877 - DNA, 165 bp, Artificial Sequence
  derived and/or modified sequence
atggagcagagcaacgacagcctgagagtgaaccacaacgacggcgaggagagcaagaccagcgcccaggtgttcgagcacctgatctgcatggacagcagagacagcagcttcggccagaacgacagccccaccgtgctgcccatcaccaccagagaggcctag

SEQ ID NO: 286878 - DNA, 396 bp, Artificial Sequence
  derived and/or modified sequence
atggagcagagcaacgacagcctgagagtgaaccacaacgacggcgaggagagcaagaccagcgcccaggtgttcgagcacctgatctgcatggacagcagagacagcagcttcggccagaacgacagccccaccgtgctgcccatcaccaccagagaggccaacaacagcctgatcagccagaacatccccggccccctgacccagacccagaccctgagcgccgagcagttccacctggtggaccagaacggccaggccatccagtacgagctgcagagcctgggcgagagcaacgcccagatgatgatcgtggccagccccaccgagaacggccaggtgctgagagtgatcccccccacccagaccggcatggcccaggtgatcatcccctag

SEQ ID NO: 286879 - DNA, 222 bp, Artificial Sequence
  derived and/or modified sequence
atggagcagagcaacgacagcctgagagtgaaccacaacgacggcgaggagagcaagaccagcgcccaggtgttcgagcacctgatctgcatggacagcagagacagcagcttcggccagaacgacagccccaccgtgctgcccatcaccaccagagaggccaacaacagcctgatcagccagaacatccccggccccctgacccagacccagaccctgtag

SEQ ID NO: 286880 - DNA, 288 bp, Artificial Sequence
  derived and/or modified sequence
atggagcagagcaacgacagcctgagagtgaaccacaacgacggcgaggagagcaagaccagcgcccaggtgttcgagcacctgatctgcatggacagcagagacagcagcttcggccagaacgacagccccaccgtgctgcccatcaccaccagagaggccaacaacagcctgatcagccagaacatccccggccccctgacccagacccagaccctgagcgccgagcagttccacctggtggaccagaacggccaggccatccagtacgagctgcagagcctgtag

SEQ ID NO: 286881 - DNA, 624 bp, Artificial Sequence
  derived and/or modified sequence
atgctggaggcctggaacctgaacctgagccactacctgaagcacctgatctgcatggacagcagagacagcagcttcggccagaacgacagccccaccgtgctgcccatcaccaccagagaggccaacaacagcctgatcagccagaacatccccggccccctgacccagacccagaccctgagcgccgagcagttccacctggtggaccagaacggccaggccatccagtacgagctgcagagcctgggcgagagcaacgcccagatgatgatcgtggccagccccaccgagaacggccaggtgctgagagtgatcccccccacccagaccggcatggcccaggtgatcatcccccagggccagctggtggacgtgaacagccccagagacgtgcccgaggagaagcccagcaacagaaacctgcccaccgtgagagtggacaccctggccgacaacaccagcaactacatcctgcacccccagaccagcttccccctgcccaagaagagcgtgaccggcatgctggaggagcccctgctgggccccctgcagcccctgagcagcaacacccccatctgggcctgcagactgagaagctgcgagggcgtggagctgtggtag

SEQ ID NO: 286882 - protein, 230 aa, Artificial Sequence
  derived and/or modified sequence
MEKPRLYQKYKISRVWWRLPVIPATGEAEDNRLNPEGRGCGEPRSRHCTPAWTTTAKLHLKTIISLQPLNMYQMEPGVGSIRTSPALQSPPALTRGPSAWDTAIRKALSFGVGLGVLVLVCLFYHFVTLAPILQFASLPCLLEAGAQMSRHPVTTQVCVMPARLSLGSGISRNLLRLSVCHFTLLLPFRSLRPCPLSSRDMVLSYELWLLCDFYIAPPDSSGSGICKKAI

SEQ ID NO: 286883 - protein, 80 aa, Artificial Sequence
  derived and/or modified sequence
AHHLRSGAGDQPGQHGETPSLLKIEKLAEHGGSCFSFQVLGRLRQENCLNPGGGGCSEPRLCHCTPAWATEQGSVSRKKE

SEQ ID NO: 286884 - DNA, 693 bp, Artificial Sequence
  derived and/or modified sequence
atggagaagccccggctgtaccagaagtacaagatcagccgggtgtggtggagactgcccgtcattcccgctaccggtgaagccgaagacaacagacttaacccagagggacggggttgcggggaaccgagatcgcgtcactgcacccccgcttggactaccaccgccaaacttcaccttaaaacaatcatctcacttcagccattaaacatgtatcagatggaacctggggttggatctattcgaactagtcccgcacttcagtctccacctgcactaacacggggccccagcgcatgggataccgcgatccgtaaagctttgtccttcggagtaggactgggtgtgctggttctcgtctgtttattctatcattttgttacactcgccccgatactgcagtttgcctctctgccctgcctgttggaagccggagcgcagatgagccggcaccccgtgaccacgcaggtttgcgtaatgcctgccaggctgagcctggggtccggaatctcaagaaacctccttagactgagtgtttgccacttcacacttctgctccccttccgttcactccgaccatgccccctttccagtagagatatggtattgtcatatgaactgtggttgctttgcgatttctacatcgcgcctcccgactcttccggaagcggcatttgcaaaaaggccatctag

SEQ ID NO: 286885 - DNA, 813 bp, Artificial Sequence
  derived and/or modified sequence
agacacagcaccacctgcttcgccgtgccctgcagcgtgcccagcagcaccttcttcacctgcagagacagcagagaccagcagaaggacatgccccccctgctgttcgaggtgagcagcctggagaacgccttccagatcggcggccacccctggcactacatcgtgacccccaacaagaagaagcagaagggcgtgttccacatctgcgccctgaaggacaacagcctggccaagaacggcatccaggagatggactgctgcagcctggagagcgactggatctacttccaccccgacgccagcggcagaatcatccacgtgggccccaaccaggtgaaggtgctgaagctgaccgagatcgagaacaacagcagccagcaccagatcagcgaggacttcgtgatcctggccaacagagagaaccacaagaacgagaacgtgctgaccgtgaccgccagcggcagagtggtgaagaagagcttcaacctgctggacgacgaccccgagcaggagaccttcaagatcgtggactacgaggacgagctggacctgctgagcgtggtggccgtgacccagatcgacgccgagggcaaggcccacctggacttccactgcaacgagtacggcaccctgctgaagagcatccccctggtggagagctgggacgtgacctacagccacgaggtgtacttcgacagagacctggtgctgcacatcgagcagaagcccaacagagtgttcagctgctacgtgtaccagatgatctgcgacaccggcgaggaggaggagaccatcaacagaagctgctag

SEQ ID NO: 286886 - DNA, 5613 bp, Artificial Sequence
  derived and/or modified sequence
actaggaactacatttcccggtgagagagcggctccggccggccgcgcggtaccggagcgtcgcactgtcagcggccagagagcctggggcagatcgaaaagggagtgcttcttcccttctctccgcgctctggcggtgcaagcggctctgctttccctcgccccgccgtcgggtgctccctgcccgcctccccgtgtcagctttccctgggccccgccgggaaagtctgggcctcgaaattcgaaggcagcggcggctgcccagcacgggagtgtggggcgcgccactcggcggcccagcctacccagggcccggcccgcgcctccatgggcccgacccggaagcccaacgtgtgcagccggctgagtcgccgggcgctgggctgcttctcgcgcgacgcaggcgtggtgcagaggaccaacctgggcatcctgcgggcgctggtgtgccaggaaagtactaaatttaagaatgtctggacaactcattccaggtcacctatagcctatgagagaggaagaatatattttgacaattatcggcgctgtgtcagcagtgttgcatctgagccaagaaaactttatgaaatgccaaaatgttccaaatcagaaaaaatagaggatgctttattatgggaatgcccagtgggagatatacttcccaattcatcagattataagtcctcactcatagcactgactgctcataattggctacttcgtatatcagcaactacgggaaaaatccttgagaaaatatatcttgcaccttattgcaaattcagatacttgagctgggacactcctcaagaagtcattgcagttaagtcagctcagaacagaggctcagcagtggcccggcaggcaggcattcaacaacatgttttgctgtaccttgcagtgttccgagttctacctttttcacttgtagggattctagagatcaacaaaaagacatgccaccactgctctttgaggtgtcatccctggagaatgcttttcagattggaggccatccttggcactacatcgtcacacctaataagaagaaacagaaaggagttttccatatttgtgccctaaaagacaattccctggcaaaaaatgggatccaagaaatggattgttgttctctagaatctgactggatctatttccatcctgatgcttctggtagaataatacatgttggtccaaatcaagtcaaagttttgaagctaactgaaatagaaaataatagttctcagcatcagatctctgaagattttgtcattttggccaacagggagaaccataaaaatgaaaatgtactcactgttacagcttctggacgggtggtaaaaaaaagttttaaccttctggatgatgacccagaacaagagactttcaaaattgtggactatgaagatgagttagatttgctttctgtggtagctgttactcaaatagatgctgaaggaaaagctcacctggatttccactgtaatgaatatggaactttacttaaaagcattccactagtggagtcatgggatgtgacatatagccatgaagtctactttgacagagacttggtgctacacatagagcagaaacccaacagagtcttcagctgctatgtttaccagatgatatgtgacactggggaagaagaagaaaccataaacagaagctgttaaaaagagtgagataattgtaacctaagagacttttagccaaacaccccagcagctgcgtccaatccattttattatctgcatggcacattctccagtattttccaaaaaagtcttgtgttgacttcagatgactatgacttcttttttaaactcttgctgtaaaagatggtgaggacttcattttttttaaaggttttttagaatactgttccaagaagtttagtgttttgcagctttgagctaggtggtaatgcaaatataaaatgctgggaacagaaaaggacaggttaattccaattgttgaggagttaagtcattgatggggtgggtcattgatgagttcttaaaggatggtatggaattttgtttgttaaggctaggaaagacagggagagacaaaagtaaacatgcagaaagaaatcttatatcctctataccaaactttgcttaaggatgagaaatgagatgtgttatgtgagaacattattttgagcccaaaatgtgtcatcacagtttttaaaaatcttatatatgtatttatatgtgtttcgtatttgtatatagtatcaggaattggttctagttcccaaattatcttttcttccttggttttgttctcttggcttgatgttcacattgaatatttgtgtttctatataggctaatgtaaaagattccaagcaaaccttaagtgaaattgttttctgatttgcatcctgtttagctcttaatgtatctaaggatgttctcatctcaccattctactcatttagtgagttttctgatcttgtttaggcaatatttgcatacttatgcaataagataaaggtacccttgcctgcagtagttctgtttcctgtagaaaagtggataaagagtcccagaagaagttcttactagcttgggagttacctgattaaccagagaaaatttttggcttacttatggaacaagcattatttcttctttgttaggaaagatctaaatatggtccttgacttttaataatcattctttagaatgttaaataaaggcaacccaagtaaagggagaaaatgtttctttgtgcttcctgtttgagaaattcagttgcttccatttcgcatgttctgcacatttatccgatgtaacctcaaaagaataactggtaataagggaaggaaacagcagcaacaatcattgctgattcaagtttaaggttaaaatatggaatttttagcttggatgatttatattaaaatctttccattttttttttcagttttggcttgatgccatgttaagaatgatgtgaattcttcccagttctgccctggtgctagacattgccccatactttcaattagacactagctgtatctaaatagtcccactcagtaaacttacatcttgaaaaacaagaccagtaagaggccagtgaaagtactaaagaaagaaaccaatgttgtgtgagtttcaaagcagctgcaatgctgtgtaaaagtagagtgttcattctccatttccaagagtgtttcagaataggatgtcttaagacttcagtcatgtcagagatttttttttttaggtgattattgagtttctccttctcctttaagtcatcaccttccttttatgaaatgatagtaaggaactcgtctattctgaaaggcatttgagaaatagctgaattcctggctgcttttttgctgggggtagatggtggaatacttctggtctagatataacttaccactaagaaacccccagtatgtcaccactgcctaaatctaactagaccagggtccaaatgccatccaggccaggcaggaaatatacctcatgtgaaagacagtaaggagttgtgggcagtgtaacaaacaggagagctatgccccaactaaaaggagcagctgctactgcttagtttcagccagttgcaacagtatgtgggaatgtaggctgcatggttgttaacaagatagatggtaaaaagatgccagaagatacagaagatagcaaagaatgtggggaatttggataccacacatagcgagagacaatgaagcatgcttcccagctcgccagagtgtcacacagctgctcattctgccacctgccagacattaatgtcttcctgccctacctaaaccccctctttacctgatattttaattcgagactctagctacatgcccacctacttaacaggtactagtgacaggtacaaaacattatgggtaacaattctgagtgtttaatgcaagcccaggtgaagcagggtagcttccatcagcaggtacagacgttacgctgaaaagaggtgcattctgcattgcactcctggatctaagtttctgcattctcagagcatcaatgcagcaagcttattgttcctcaattttttacaatatttatcacaactctgggagaaaacaaaacaaatcctatcctatttactatttgtgctacctagtgaggagataccgctctgtttagacaaattaaggcacttcacattcttccaccaattgaaagttttgtatcttacagttctttttttaaataatatatttattgagcactttctatctactagtcactgtgatacagtataagtaaagtgggttgtctcatttaatattcagaataaccacatgaagtatgaactgccattatctttcccctttgtacaaatgaggaaagtgaggctcacagaagttaattggcccagggtcccacaactagtcagtgcagaggtgggaaacataaccagatttgttcggcatgaacttgtgccaaatttcctccaaagttctcaaaaggcaaggcatgttattttatcccaatttagcataccaacaactataatactagatatgtaggaaagtgcttaataatcgttttttactgatgattcagtgtctaaattttgaacaaatttgggtaagatacaagtcacacataaattgacagaaaatgtagttcttcattcaatggttagcagtcattaaaaggtactttccctttgtttgtggtgataatcagtattagtagttttcatattatttggcttccatattaatcatttttatattttcttctccttcttaccatgtttacttatatcatccatcttttagaatcccagggagctaatttctggtccctgtgttgctatcaaatctgtatcttgcagaaagaataatttatttcaaacaagggacatacaatagaaagataagacctactgaggtctttttcccatcattttattatgaaaaatgttcaaacatacagtaaaattgaaagaattttatagtaaatactgaccacggggattctacatcttactctacttgttttattattttcctatccagcgtactttttgatggatttcaaaataaattgcagttgctgatatacttccccctagtacttcaactgcagattattaactagagtttagtatttatttagtttttaaatttttttgatttaagatttacctgcaataaaatgtacaaatcttaagtataaatttactgagttcttgcagacatatacacctgtgtaacccaaaccctttccaaaatttagaccattgcaatcatcttcagaaagtttcctaaatccctctcccagtctatcccctccccacccctcaggtataactactgttctcattcttttatatcaaaggttaaatttacctgttctaaacttcatatgagtgaaattatacaaaatgtaatgcttctttcacttagcataatgtttttgagatttattcatgttgttgcatgtgtcagtgattcatttctttttattgctgagtattctttcgtatgaatatatcacagtttgtttttttatctttctgttgatggacactgggctctttctgcttgttttttactgttatgaataaagctgctatgaacattcttag

SEQ ID NO: 286887 - DNA, 813 bp, Artificial Sequence
  derived and/or modified sequence
cggcatagtacgacgtgttttgctgtgccttgtagcgttccctcctcgacgttttttacgtgccgggatagcagggaccaacaaaaagacatgcctccgctgttgtttgaagtctctagcctggagaatgcttttcagattggcggacacccttggcattacatcgttacccccaacaaaaaaaagcaaaagggggtgtttcatatatgtgctttgaaggacaattccctggcgaaaaatggaatccaggagatggactgctgcagcctcgagtcagattggatctatttccatcccgatgccagcggtagaataattcatgtgggtcccaatcaggtcaaagtgctcaagctgactgagattgaaaacaactcctcccagcatcagattagtgaagatttcgtgattttagctaatagggagaatcataagaacgagaacgtgctaactgtaaccgcgagcggccgcgtcgtgaagaaatcatttaacctgctggatgacgaccccgagcaggaaacatttaaaatcgtcgactacgaagacgaactggatttgttgtctgtggtggcagtgacacaaatcgacgccgagggtaaggcacatctggactttcactgcaatgagtacggaacgcttttgaaaagcatccctctggtggaaagttgggatgtgacttacagtcacgaagtgtacttcgaccgcgacctggtgctgcacattgaacaaaagccaaaccgggtcttttcttgctatgtgtatcagatgatctgcgacacaggcgaggaagaggaaactatcaatagaagctgttag

SEQ ID NO: 286888 - DNA, 813 bp, Artificial Sequence
  derived and/or modified sequence
cgccacagcaccacctgctttgctgtgccctgcagcgtgcccagcagcaccttcttcacctgccgggacagccgggaccagcagaaggacatgccacccctgctgtttgaggtgagcagcctggagaatgccttccagattggaggccacccctggcactacatcgtgacccccaacaagaagaagcagaagggcgtcttccacatctgtgccctgaaggacaacagcctggccaagaatggcatccaggagatggactgctgcagcctggagagtgactggatctacttccacccagatgccagcggccgcatcatccacgtgggccccaaccaggtgaaggtgctgaagctgacagaaattgagaacaacagcagccagcaccagatcagcgaggactttgtgatcctggccaaccgggagaaccacaagaatgaaaatgtgctgactgtgacagccagcggccgggtggtgaagaagagcttcaacctgctggatgatgatcctgagcaggagaccttcaagatcgtggactatgaagatgagctggacctgctgtctgtggtggccgtgacccagattgatgctgagggcaaggcccacctggacttccactgcaatgaatatggcaccctgctgaagagcatccccctggtggagagctgggatgtgacctacagccatgaggtgtactttgaccgggacctggtgctgcacatcgagcagaagcccaacagagtcttcagctgctacgtgtaccagatgatctgtgacacaggagaggaggaggagaccatcaacagaagctgctag

SEQ ID NO: 286889 - DNA, 813 bp, Artificial Sequence
  derived and/or modified sequence
cggcacagcaccacctgcttcgccgtgccctgcagcgtgcccagcagtacttttttcacatgtcgcgatagccgggatcagcaaaaagacatgccaccactcctcttcgaagtctctagtctcgaaaacgccttccagattggcgggcatccttggcactacattgttacccctaacaaaaagaagcagaagggcgtgttccacatttgcgcgctaaaggacaatagcctggcaaagaacggaatccaggaaatggactgctgtagcctggagtctgactggatctacttccaccccgacgccagcgggcggatcattcacgtggggccaaaccaagtgaaagtgctcaaactaacagaaattgaaaacaattcaagccagcatcagatcagcgaagatttcgttattctggccaaccgagagaatcataagaatgagaacgtcctcacagtgacagcatcaggacgagtggtgaaaaagtcctttaatttgctggacgatgaccctgagcaggagacattcaagatcgtggactatgaggacgagctggatctgctttcagtcgtcgctgtcacacaaatcgatgcagaggggaaggctcatctcgacttccattgcaacgagtatggaacccttctgaagagcatcccactggtcgaatcatgggacgtaacctatagtcatgaagtttatttcgatcgggatctggtgttacacattgagcagaaacccaatcgtgtgttttcctgttatgtttatcagatgatctgtgatacgggcgaagaagaggaaaccatcaatagatcctgttag

SEQ ID NO: 286890 - DNA, 813 bp, Artificial Sequence
  derived and/or modified sequence
cggcatagcacaacatgttttgccgttccttgcagcgtgccctcttccaccttctttacatgcagggactctcgtgatcagcaaaaggacatgccacccctgctgttcgaggttagttcactcgagaatgcattccagatcggcggtcatccatggcattacatcgttacgccaaataagaagaaacagaagggtgtctttcacatctgcgcactgaaggacaattcactggctaagaacggaatccaggaaatggattgctgcagcctggagtctgattggatatattttcacccggatgcttccggcagaattatacacgtaggacctaaccaggtgaaagtcttgaagctcacggagattgagaataattcgtctcaacaccagatttctgaggattttgtaatactagccaacagggaaaaccacaaaaacgagaacgtgttgactgtgacagctagcgggcgtgtcgtgaagaagagctttaacttactcgacgacgacccggagcaggaaacattcaagatcgtagactatgaggacgagctggatctcctctccgtagttgccgtgacccagatcgacgccgagggcaaagcacaccttgacttccattgcaatgagtacgggactctcctgaagagtattcctctcgtagaatcatgggatgtgacatactcccacgaagtttacttcgaccgggatcttgtgctgcatatagagcaaaaaccgaatcgtgtgttctcctgctacgtgtaccaaatgatctgcgacactggcgaggaagaggaaaccatcaaccgctcttgttag

SEQ ID NO: 286891 - DNA, 701 bp, Artificial Sequence
  derived and/or modified sequence
ttctaagctgacagcttggattaacatttgtttccatggccccggatgcacactccacagtcctgcgcctccgctcctcactgaattggttttctccctgcaccgcgttttcccatatgtagctatattcccattcccgagcggtcttgactctaaaatcatatacacggtagagaaggagccctgaagctttacccagaaatacccaccagtaaagtttttatcagaaaaggatcggaaaagaattttgttgaccagatataccatctggcatctccagcctcccctccaaactacatgtataatcctatcaagacattaaagaccaatacgattgggacattaaacatgttggggctggcaaaacgagtcggtgcccgtctgctcctggcctccacatcggaggtgtatggagatcctgaagtccaccctcaaagtgaggattactggggccacgtgaatccaataggacctcgggcctgctacgatgaaggcaaacgtgttgcagagaccatgtgctatgcctacatgaagcaggaaggcgtggaagtgcgagtggccagaatcttcaacacctttgggccacgcatgcacatgaacgatgggcgagtagtcagcaacttcatcctgcaggcgctccagggggagccactcacggtatacggatccgggtctcagacaagggcgttccagtacgtcag

SEQ ID NO: 286892 - DNA, 502 bp, Artificial Sequence
  derived and/or modified sequence
agtttcctctcaaatgggaggatgcagcagtgccgctacttaactgaacgtctcgacagtctgatggggcggccctcagccttccggagcagcagtgggactgacctgtccagtgaggaagaaacactgaaccagatggaatggcctttggggatggaaaaaccccagtttacgctcatctcttctctcagctaacttttgtggagccctgttcccaaactggcctgggccagagcaccgtggaggggtatttgttgtaaatggaaggtttccaggcccgcctggaaatcctgaaggttgaccagatataccatctggcatctccagcctcccctccaaactacatgtataatcctatcaagacattaaagaccaatacgattgggacattaaacatgttggggctggcaaaacgagtcggtgcccgtctgctcctggcctccacatcggaggtgtatggagatcctgaagtccaccctcaaagtgaggattactggggcca

SEQ ID NO: 286893 - DNA, 800 bp, Artificial Sequence
  derived and/or modified sequence
ccggatgcacactccacagtcctgcgcctccgctcctcactgaattggttttctccctgcaccgcgttttcccatatgtagctatattcccattcccgagcggtcttgactctaaaatcatatacacggtagagaaggagccctgaagctttacccagaaatacccaccagtaaagtttttatcagaaaaggatcggaaaagaattttgataacaggaggcgcagggttcgtgggctcccatctaactgacaaactcatgatggacggccacgaggtgaccgtggtggacaatttcttcacgggcaggaagagaaacgtggagcactggatcggacatgagaacttcgagttgattaaccacgacgtggtggagcccctctacatcgaggttgaccagatataccatctggcatctccagcctcccctccaaactacatgtataatcctatcaagacattaaagaccaatacgattgggacattaaacatgttggggctggcaaaacgagtcggtgcccgtctgctcctggcctccacatcggaggtgtatggagatcctgaagtccaccctcaaagtgaggattactggggccacgtgaatccaataggacctcgggcctgctacgatgaaggcaaacgtgttgcagagaccatgtgctatgcctacatgaagcaggaaggcgtggaagtgcgagtggccagaatcttcaacacctttgggccacgcatgcacatgaacgatgggcgagtagtcagcaacttcatcctgcaggcgctccagggggagccactcacggta

SEQ ID NO: 286894 - protein, 496 aa, Artificial Sequence
  derived and/or modified sequence
MDCYRTSLSSSWIYPTVILCLFGFFSMMRPSEPFLIPYLSGPDKNLTSAEITNEIFPVWTYSYLVLLLPVFVLTDYVRYKPVIILQGISFIITWLLLLFGQGVKTMQVVEFFYGMVTAAEVAYYAYIYSVVSPEHYQRVSGYCRSVTLAAYTAGSVLAQLLVSLANMSYFYLNVISLASVSVAFLFSLFLPMPKKSMFFHAKPSREIKKSSSVNPVLEETHEGEAPGCEEQKPTSEILSTSGKLNKGQLNSLKPSNVTVDVFVQWFQDLKECYSSKRLFYWSLWWAFATAGFNQVLNYVQILWDYKAPSQDSSIYNGAVEAIATFGGAVAAFAVGYVKVNWDLLGELALVVFSVVNAGSLFLMHYTANIWACYAGYLIFKSSYMLLITIAVFQIAVNLNVERYALVFGINTFIALVIQTIMTVIVVDQRGLNLPVSIQFLVYGSYFAVIAGIFLMRSMYITYSTKSQKDVQSPAPSENPDVSHPEEESNIIMSTKL

SEQ ID NO: 286895 - protein, 395 aa, Artificial Sequence
  derived and/or modified sequence
MDFSRNLYDIGEQLDSEDLASLKFLSLDYIPQRKQEPIKDALMLFQRLQEKRMLEESNLSFLKELLFRINRLDLLITYLNTRKEEMERELQTPGRAQISAYRVMLYQISEEVSRSELRSFKFLLQEEISKCKLDDDMNLLDIFIEMEKRVILGEGKLDILKRVCAQINKSLLKIINDYEEFSKGALTTTFEELHFEIKPHDDCTVEQIYEILKIYQLMDHSNMDCFICCILSHGDKGIIYGTDGQEAPIYELTSQFTGLKCPSLAGKPKVFFIQACQGDNYQKGIPVETDSEEQPYLEMDLSSPQTRYIPDEADFLLGMATVNNCVSYRNPAEGTWYIQSLCQSLRERCPRGDDILTILTEVNYEVSNKDDKKNMGKQMPQPTFTLRKKLVFPSD

SEQ ID NO: 286896 - DNA, 1188 bp, Artificial Sequence
  derived and/or modified sequence
atggacttctccaggaacctgtatgatatcggagaacaactggatagcgaggatcttgccagcttaaaatttctaagcctggattacattcctcagcgcaagcaagaacctatcaaggatgctctaatgttatttcagcggctgcaagagaagagaatgctcgaggagtccaatctgtccttccttaaggagctcctgtttcgaatcaatagattggatttgctaattacgtatttgaacacaagaaaggaagagatggagcgcgagcttcagacacctggtagagctcagattagcgcatacagggtgatgctttaccagatttccgaggaagtctcgcggtccgagctgagatcctttaaatttctcttgcaagaggaaatctccaagtgtaagttggacgacgacatgaatctcctggacatttttattgagatggagaagcgggtgattttaggagagggtaagctcgacattctgaagagggtctgcgcccagatcaataagagcctattgaagatcattaacgattacgaggagttctccaagggcgccctcaccacaacttttgaggaactgcacttcgagatcaaaccgcacgatgattgtactgtagagcagatctacgagattctcaagatatatcagttgatggatcactccaacatggattgtttcatctgctgcatcttgtcccacggcgacaagggaatcatttatggaacagacggtcaagaagctcctatttatgaactcacctcccagtttacaggtctcaagtgtccttcactcgcgggaaagcctaaggtgttcttcattcaggcttgccagggggataactaccaaaaaggcataccagtagagaccgattccgaggagcagccctatctggagatggacctgtcctccccgcagaccagatacatacccgacgaggctgacttcctgttgggcatggcaaccgtgaacaactgcgtctcgtatcgcaatcccgcagaggggacatggtacattcagtctctttgtcaatcactgcgtgagaggtgccctcgcggggatgacatcttgacaatcttgaccgaagtcaattacgaggtgtcaaacaaggacgacaagaaaaacatgggaaaacagatgccccagcccacctttacccttaggaaaaaacttgtgttcccatccgattag

SEQ ID NO: 286897 - DNA, 1188 bp, Artificial Sequence
  derived and/or modified sequence
atggacttcagcaggaacctgtatgacatcggggagcagctggacagcgaggacctggccagcctgaagttcctgagcctggactacatcccccagaggaagcaggagcccatcaaggatgccctgatgctgttccagaggctgcaggagaagaggatgctggaggagagcaacctgtccttcctgaaggagctgctcttccgcatcaaccggctggacctgctgatcacctacctgaacaccaggaaggaggagatggagcgggagctgcagaccccaggccgggcccagatcagcgcctacagagtgatgctgtaccagatcagcgaggaggtgagccgctctgagctgcgctccttcaagttcctgctgcaggaggagatcagcaagtgcaagctggatgatgacatgaacctgctggacatcttcatcgagatggagaagagggtcatcctgggggagggcaagctggacatcctgaagagggtgtgtgcccagatcaacaagagcctgctgaagatcatcaatgactatgaggagttcagcaaaggagccctgaccaccacctttgaggagctgcactttgagatcaagccccatgatgactgcaccgtggagcagatctatgagatcctgaagatctaccagctgatggaccacagcaacatggactgcttcatctgctgcatcctgagccatggagacaagggcatcatctacggcacagatggccaggaggcccccatctatgagctgaccagccagttcaccggcctgaagtgccccagcctggccggcaagcccaaggtgttcttcatccaggcctgccagggcgacaactaccagaagggcatccctgtggagacagattctgaggagcagccctacctggagatggacctgagcagcccccagacccgctacatcccagatgaagctgacttcctgctgggcatggccaccgtgaacaactgtgtgtcctacagaaatcctgctgagggcacctggtacatccagagcctgtgccagagcctgcgggagcgctgccccagaggagatgacatcctgaccatcctgacagaggtgaactatgaggtgagcaacaaggatgacaagaagaacatgggcaagcagatgccccagcccaccttcaccctgaggaagaagctggtgttccccagcgactag

SEQ ID NO: 286898 - DNA, 1188 bp, Artificial Sequence
  derived and/or modified sequence
atggacttcagccggaacctgtacgacatcggcgagcagctggacagcgaggatctggcgagcctgaagtttctgtcccttgactatattccccagcggaagcaggagcctatcaaagacgcactgatgctctttcagcgtttacaggaaaaaagaatgttggaggaaagtaacctatcctttctgaaggagctgctgttcagaataaatagactggacctcctcattacatatttgaacactcgaaaggaggagatggaaagggagctgcaaactccggggcgcgcacaaataagcgcctatagagtaatgctgtatcagatctccgaggaagtctccaggtcagagctgcgatccttcaagttcctcctgcaagaagagattagtaagtgcaagttagatgatgatatgaacttgctcgatattttcattgaaatggaaaaacgggttattctaggtgaaggaaaactggacattctcaagcgggtctgcgctcagattaataaaagtcttctcaaaatcatcaatgattatgaagaattctccaagggggcccttactaccacctttgaggaactgcacttcgagattaagcctcacgacgactgcacggttgaacagatttacgagatactcaagatttaccaactgatggatcactctaatatggactgtttcatatgttgcatcttatcgcatggagacaaaggtatcatatacggcacagacgggcaggaggcccccatctacgagcttaccagccagttcaccggactaaaatgcccaagcctcgccggaaaaccaaaggtgttcttcattcaggcatgtcaaggcgataattatcaaaaaggaatcccagtggagacagactcagaggagcagccttacctggaaatggatttgagtagtcctcagacgaggtacattcctgacgaggccgactttctactgggcatggctaccgtgaacaattgtgtttcctaccgcaacccagccgaggggacttggtacattcaaagcttgtgccagtctctgcgcgaaaggtgtccacggggagatgatatcttgactatattaaccgaggtgaactatgaggtttctaacaaggacgacaaaaagaatatggggaaacagatgccacagcctacgtttactttgcggaaaaagctcgtgttccccagcgactag

SEQ ID NO: 286899 - DNA, 1188 bp, Artificial Sequence
  derived and/or modified sequence
atggatttctcccgaaacctgtacgacataggggagcagctggactcagaagatctggcaagcctgaaatttttgagtttagattacatcccgcaaaggaagcaggagcctataaaagatgctctaatgctgtttcagaggctgcaggagaaacggatgcttgaggagtccaacttaagctttttgaaggagctgctctttcggatcaacagattggatctgctgataacctatctgaacacgcgcaaggaggagatggaacgcgaactgcagaccccgggtagggctcagatctccgcatacagggtcatgctgtaccagatttcagaagaagtgagtcgctcagaactccgatcctttaagttccttctccaggaggaaatctctaaatgcaaactggatgacgacatgaatctgcttgacatatttattgagatggaaaaacgcgttattttaggcgaaggcaaattagatattttgaagcgggtgtgtgctcagataaataaatccctgctgaagattatcaacgactacgaagagtttagcaaaggtgcccttacgaccacattcgaagagctccatttcgagatcaagcctcacgatgactgcacggtggagcagatatatgaaatactgaagatataccagcttatggatcactctaatatggactgtttcatttgctgcatcctatctcacggcgacaagggtatcatctacgggaccgatggtcaagaagcacccatttacgaactgacgtctcagttcactggactgaagtgtccctccttggcagggaagcccaaggtctttttcattcaggcctgtcaaggtgacaactaccagaagggaattcccgtggagaccgactccgaagagcagccttacctggaaatggatttgagctccccgcaaactcgctacatccctgatgaagcggatttcctgcttggaatggctaccgtgaataactgcgtgagttataggaacccagccgaggggacctggtacatacagagcttgtgccaatctttgcgcgagagatgccctcgaggtgatgatatcctcacaattttaacagaagttaattatgaggtgtctaataaggacgacaaaaaaaacatgggcaagcaaatgccgcagcctaccttcactctgcggaagaagctggtcttccctagcgattag

SEQ ID NO: 286900 - DNA, 2540 bp, Artificial Sequence
  derived and/or modified sequence
gtgctctgagtttttggtttctgtttcaccttgtgtctgagctggtctgaaggctggttgttcagactgagcttcctgcctgcctgtaccccgccaacagcttcagaagaaggagcagcccctgggtgcgtccactttctgggcacgtgaggttgggccttggccgcctgagcccttgagttggtcacttgaaccttgggaatattgagattatattctcctgccttttaaaaagatggacttcagcagaaatctttatgatattggggaacaactggacagtgaagatctggcctccctcaagttcctgagcctggactacattccgcaaaggaagcaagaacccatcaaggatgccttgatgttattccagagactccaggaaaagagaatgttggaggaaagcaatctgtccttcctgaaggagctgctcttccgaattaatagactggatttgctgattacctacctaaacactagaaaggaggagatggaaagggaacttcagacaccaggcagggctcaaatttctgcctacagggtcatgctctatcagatttcagaagaagtgagcagatcagaattgaggtcttttaagtttcttttgcaagaggaaatctccaaatgcaaactggatgatgacatgaacctgctggatattttcatagagatggagaagagggtcatcctgggagaaggaaagttggacatcctgaaaagagtctgtgcccaaatcaacaagagcctgctgaagataatcaacgactatgaagaattcagcaaaggggctttgaccacgacctttgaagagcttcattttgagatcaagccccacgatgactgcacagtagagcaaatctatgagattttgaaaatctaccaactcatggaccacagtaacatggactgcttcatctgctgtatcctctcccatggagacaagggcatcatctatggcactgatggacaggaggcccccatctatgagctgacatctcagttcactggtttgaagtgcccttcccttgctggaaaacccaaagtgttttttattcaggcttgtcagggggataactaccagaaaggtatacctgttgagactgattcagaggagcaaccctatttagaaatggatttatcatcacctcaaacgagatatatcccggatgaggctgactttctgctggggatggccactgtgaataactgtgtttcctaccgaaaccctgcagagggaacctggtacatccagtcactttgccagagcctgagagagcgatgtcctcgaggcgatgatattctcaccatcctgactgaagtgaactatgaagtaagcaacaaggatgacaagaaaaacatggggaaacagatgcctcagcctactttcacactaagaaaaaaacttgtcttcccttctgattgatggtgctattttgtttgttttgttttgttttgtttttttgagacagaatctcgctctgtcgcccaggctggagtgcagtggcgtgatctcggctcaccgcaagctccgcctcccgggttcaggccattctcctgcctcagcctcccgagtagctgggactacaggggcccgccaccacacctggctaattttttaaaaatatttttagtagagacagggtttcactgtgttagccagggtggtcttgatctcctgacctcgtgatccacccacctcggcctcccaaagtgctgggattacaggcgtgagccaccgcgcctggccgatggtactatttagatataacactatgtttatttactaattttctagattttctactttattaattgttttgcacttttttataagagctaaagttaaataggatattaacaacaataacactgtctcctttctcttatgcttaaggctttgggaatgtttttagctggtggcaataaataccagacacgtacaaaatccagctatgaatatagagggcttatgattcagattgttatctatcaactataagcccactgttaatattctattaactttaattctctttcaaagctaaattccacactaccacattaaaaaaattagaaagtagccacgtatggtggctcatgtctataatcccagcactttgggaggttgaggtgggaggattgcttgaacccaagaggtcaaggctgcagtgagccatgttcacaccgctgcactcaagcttgggtgacagaacaagaccccgtctcaaaaaaaattttttttttaataaaacaaaatttgtttgaaatcttttaaaaattcaaatgatttttacaagttttaaataagctctccccaaacttgctttatgccttcttattgcttttatgatatatatatgcttggctaactatatttgctttttgctaacaatgctctggggtctttttatgcatttgcatttgctctttcatctctgcttggattattttaaatcattaggaattaagttatctttaaaatttaagtatcttttttcaaaaacattttttaatagaataaaatataatttgatcttatt

SEQ ID NO: 286901 - DNA, 1188 bp, Artificial Sequence
  derived and/or modified sequence
atggacttcagcagaaacctgtacgacatcggcgagcagctggacagcgaggacctggccagcctgaagttcctgagcctggactacatcccccagagaaagcaggagcccatcaaggacgccctgatgctgttccagagactgcaggagaagagaatgctggaggagagcaacctgagcttcctgaaggagctgctgttcagaatcaacagactggacctgctgatcacctacctgaacaccagaaaggaggagatggagagagagctgcagacccccggcagagcccagatcagcgcctacagagtgatgctgtaccagatcagcgaggaggtgagcagaagcgagctgagaagcttcaagttcctgctgcaggaggagatcagcaagtgcaagctggacgacgacatgaacctgctggacatcttcatcgagatggagaagagagtgatcctgggcgagggcaagctggacatcctgaagagagtgtgcgcccagatcaacaagagcctgctgaagatcatcaacgactacgaggagttcagcaagggcgccctgaccaccaccttcgaggagctgcacttcgagatcaagccccacgacgactgcaccgtggagcagatctacgagatcctgaagatctaccagctgatggaccacagcaacatggactgcttcatctgctgcatcctgagccacggcgacaagggcatcatctacggcaccgacggccaggaggcccccatctacgagctgaccagccagttcaccggcctgaagtgccccagcctggccggcaagcccaaggtgttcttcatccaggcctgccagggcgacaactaccagaagggcatccccgtggagaccgacagcgaggagcagccctacctggagatggacctgagcagcccccagaccagatacatccccgacgaggccgacttcctgctgggcatggccaccgtgaacaactgcgtgagctacagaaaccccgccgagggcacctggtacatccagagcctgtgccagagcctgagagagagatgccccagaggcgacgacatcctgaccatcctgaccgaggtgaactacgaggtgagcaacaaggacgacaagaagaacatgggcaagcagatgccccagcccaccttcaccctgagaaagaagctggtgttccccagcgactag

SEQ ID NO: 286902 - DNA, 469 bp, Artificial Sequence
  derived and/or modified sequence
cgggcgccctcgtcggccgcggaggagctgcagcctccaacagaagggaaaacggacacctgtggaggggaagaaacgtgtccaagatcattcacacagagcgtcagctctggggtcagaacccagctcccaaggctttccgtgtccagaccacctccctcacctggttggccagcctccacctgatgagccgggcaggctgcaagtggcaagttccctgggaaggtgtggtccctgccatgctatctgctctgctcagcgactgaaggtgcccgcatcccagctctgccaggaagcaaagttacagatgagaaaactgaagctcagagagtgaaaggacttgcctaaagacacacagctggttgtcacatcttcccaagccaggccagccaggagcgctgcatgcaaattctgccgtgggctaaggcacgctaaccagagccggcggcatggacttcgtcatgaagca

SEQ ID NO: 286903 - protein, 1042 aa, Artificial Sequence
  derived and/or modified sequence
MANDSPAKSLVDIDLSSLRDPAGIFELVEVVGNGTYGQVYKGRHVKTGQLAAIKVMDVTEDEEEEIKLEINMLKKYSHHRNIATYYGAFIKKSPPGHDDQLWLVMEFCGAGSITDLVKNTKGNTLKEDWIAYISREILRGLAHLHIHHVIHRDIKGQNVLLTENAEVKLDETEYEYSGSEEEEEEVPEQEGEPSSIVNVPGESTLRRDFLRLQQENKERSEALRRQQLLQEQQLREQEEYKRQLLAERQKRIEQQKEQRRRLEEQQRREREARRQQEREQRRREQEEKRRLEELERRRKEEEERRRAEEEKRRVEREQEYIRRQLEEEQRHLEVLQQQLLQEQAMLLECRWREMEEHRQAERLQRQLQQEQAYLLSLQHDHRRPHPQHSQQPPPPQQERSKPSFHAPEPKAHYEPADRAREVPVRTTSRSPVLSRRDSPLQGSGQQNSQAGQRNSTSSIEPRLLWERVEKLVPRPGSGSSSGSSNSGSQPGSHPGSQSGSGERFRVRSSSKSEGSPSQRLENAVKKPEDKKEVFRPLKPAVRIDLTALAKELRAVEDVRPPHKVTDYSSSSEESGTTDEEDDDVEQEGADESTSGPEDTRAASSLNLSNGETESVKTMIVHDDVESEPAMTPSKEGTLIVRQTQSASSTLQKHKSSSSFTPFIDPRLLQISPSSGTTVTSVVGFSCDGMRPEAIRQDPTRKGSVVNVNPTNTRPQSDTPEIRKYKKRFNSEILCAALWGVNLLVGTESGLMLLDRSGQGKVYPLINRRRFQQMDVLEGLNVLVTISGKKDKLRVYYLSWLRNKILHNDPEVEKKQGWTTVGDLEGCVHYKVVKYERIKFLVIALKSSVEVYAWAPKPYHKFMAFKSFGELVHKPLLVDLTVEEGQRLKVIYGSCAGFHAVDVDSGSVYDIYLPTHIQCSIKPHAIIILPNTDGMELLVCYEDEGVYVNTYGRITKDVVLQWGEMPTSVAYIRSNQTMGWGEKAIEIRSVETGHLDGVFMHKRAQRLKFLCERNDKVFFASVRSGGSSQVYFMTLGRTSLLSW

SEQ ID NO: 286904 - DNA, 3129 bp, Artificial Sequence
  derived and/or modified sequence
atggcaaacgattctcccgctaagtctctcgtggacattgacctgtcaagccttagagaccctgccggtattttcgagctagtcgaagtggtgggcaacgggacatacggccaagtttacaaaggccggcacgtaaaaacgggccagttagcggccattaaggttatggacgtgacagaagacgaagaggaggagatcaagcttgaaattaacatgctgaagaaatactcacaccatagaaacattgccacgtattacggcgcatttatcaaaaaaagcccccccggtcacgatgatcagctttggctggtaatggaattctgcggagcaggctccatcacagacctggtgaaaaacacgaagggtaacacgctcaaagaagactggattgcttatataagcagggagattcttcgggggcttgcccacttgcacattcaccacgtgatccatcgggacattaaaggccagaacgtattactgaccgaaaacgcagaagtgaagcttgatgagacagagtacgagtatagcggaagcgaggaggaagaggaggaggtccctgaacaggaaggagaaccctcctccattgtgaacgtgccgggggaatccactttgagacgggatttcctcaggttgcagcaggagaacaaggaacgcagcgaagccctgaggaggcagcagctcttgcaagagcaacagctccgtgaacaggaggaatataagcgtcagctattggctgaacgccagaagcgaatcgagcaacagaaggagcaacgccggcgattagaggaacagcaacggcgtgaacgcgaggcacgtagacagcaggaaagagagcaaaggcgacgtgaacaggaagagaaacgtcgtctggaggagttggaacggcggcgcaaggaagaagaggagcggcgaagggcagaagaagaaaagaggcgggttgaaagggaacaggaatacattcggagacagctggaagaggaacagcgacacctggaagttctccaacaacaactcctgcaggagcaggctatgctgctagagtgtagatggcgggaaatggaggagcaccgccaagccgaaagattgcagaggcagctgcaacaagagcaggcttacttattgtcgctgcagcacgatcataggagaccacatccccagcattcccagcaaccaccgccccctcagcaagagagatccaagccatctttccacgctcccgaaccaaaagctcactatgaacccgcagatcgagcaagggaggtgccggtgcgcactacatccagatcccctgtgctcagccgccgagattcccctctccaggggagtgggcaacagaactcccaagccggccagcgtaattcaaccagctccattgagccccgattattgtgggaacgggtggaaaagctggttccgaggcccggcagtggatcttctagcggatcctcaaactccggcagtcagcccggcagtcatccagggtcccagtccgggagcggggaaaggttccgcgttaggagttcatctaagtctgagggaagtcccagtcaacgactagagaacgccgtgaaaaagcccgaagacaaaaaggaagtgtttaggcctctgaaaccagcagtgcgaattgatctgacggcacttgccaaagagttgagagcagtggaggacgtccgccccccacacaaggtcaccgattacagtagcagttccgaagagtcaggaacaactgacgaagaggatgacgacgtggaacaggagggcgccgatgaatcaacatcgggacccgaggatacgcgtgcggcgagcagtctgaacctatctaatggagaaactgagtcagtcaagaccatgatagttcacgatgatgtcgaaagtgagcctgctatgaccccttcgaaggagggtaccttgatcgtccggcagacccagtcagcctcctctacattgcagaagcataaatcaagctcaagctttaccccatttattgatccgagactcctgcagatcagtcctagctcaggcacaaccgttactagcgtggtgggcttcagttgcgacgggatgcgtcccgaagcaattagacaggatcctactaggaagggatccgtggtcaacgttaaccctaccaacacacgaccccagagcgatacccctgaaatcagaaaatataagaagcgcttcaatagcgagattctgtgcgccgctttgtggggggtgaacctgctggtgggaacagaaagtggcctgatgttgctcgaccgtagtggtcaaggcaaagtttacccattaatcaacaggcggaggtttcaacagatggacgtccttgaaggacttaatgtgcttgtcacgatatctgggaaaaaagacaagctgcgggtgtattatctgagctggttgaggaacaaaatccttcataacgacccagaagtcgaaaaaaagcaagggtggacaacagtgggtgatttagagggctgtgtccattacaaggtggtaaaatacgaaagaatcaaatttctggtgatcgccttgaagtctagcgtcgaagtgtacgcatgggcccctaaaccgtaccacaagttcatggctttcaaatcctttggggaattggttcacaagcccttgctggtggacctaacggtggaagaaggccagcggctcaaagtgatctatggtagctgtgctggcttccacgctgtggatgtggatagcggctctgtgtacgacatttatcttcccacgcatattcaatgttccattaaaccacacgccatcattatacttcctaacacggatggaatggaactgctggtatgttatgaggacgagggagtctatgtcaacacttatggcagaatcaccaaggacgttgttctacaatggggggagatgcctacttcagtggcctacatacgtagcaatcagaccatgggatggggcgaaaaggcgatcgaaataaggtcagttgaaaccggccaccttgacggtgttttcatgcacaagagagcacagagactgaaatttctgtgcgagcgcaacgacaaggtgttctttgcctccgtcagaagcggtggatcctcacaggtttactttatgacattagggcggacctcactgctgtcatggtag

SEQ ID NO: 286905 - DNA, 3129 bp, Artificial Sequence
  derived and/or modified sequence
atggccaatgacagccctgccaagagcctggtggacatcgacctgagcagcctgcgggaccctgctggcatctttgagctggtggaggtggtgggcaatggcacctacggccaggtgtacaagggccgccacgtgaagacaggccagctggccgccatcaaggtgatggatgtgacagaagatgaggaggaggagatcaagctggagatcaacatgctgaagaagtacagccaccacaggaacatcgccacctactacggggccttcatcaagaagagccccccaggccatgatgaccagctgtggctggtgatggagttctgtggggccggcagcatcacagacctggtgaagaacaccaagggcaacaccctgaaggaggactggatcgcctacatcagccgggagatcctgcggggcctggcccacctgcacatccaccacgtgatccaccgggacatcaagggccagaatgtgctgctgacagaaaatgctgaggtgaagctggatgaaacagaatatgagtacagcggcagcgaggaggaggaggaggaggtgcctgagcaggagggggagcccagcagcatcgtgaatgtgcctggagagagcaccctgcggcgggacttcctgcggctgcagcaggagaacaaggagaggtctgaggccctgcggcggcagcagctgctgcaggagcagcagctgcgggagcaggaggagtacaagaggcagctgctggccgagcggcagaagagaattgagcagcagaaggagcagaggcggcggctggaggagcagcagaggcgggagcgggaggcccggcggcagcaggagcgggagcagaggcggcgggagcaggaggagaagaggcggctggaggagctggagaggaggaggaaggaggaggaggagaggagaagagctgaggaggagaagagaagagtggagcgggagcaggagtacatccggcggcagctggaggaggagcagaggcacctggaggtgctgcagcagcagctgctgcaggagcaggccatgctgctggagtgccgctggagggagatggaggagcaccggcaggccgagcggctgcagaggcagctgcagcaggagcaggcctacctgctgagcctgcagcacgaccaccggcggccccacccccagcacagccagcagcccccaccaccccagcaggagaggagcaagcccagcttccacgcccctgagcccaaggcccactatgagcctgctgaccgggcccgggaggtgcctgtgaggaccaccagccgcagccctgtgctgagcagaagagacagccccctgcagggcagcggccagcagaacagccaggccggccagaggaacagcaccagcagcattgagccccggctgctgtgggagcgggtggagaagctggtgcccaggcctggcagcggcagcagcagcggcagcagcaacagcggcagccagcccggcagccaccctggcagccagagcggcagcggggagcgcttccgggtgcgcagcagcagcaagtctgagggcagccccagccagaggctggagaatgctgtgaagaagccagaggacaagaaggaggtgttccggcccctgaagccagctgtgagaattgacctgacagccctggccaaggagctgcgggctgtggaggatgtgcggcccccccacaaggtgacagactacagcagcagcagcgaggagagcggcaccacagatgaggaggatgatgatgtggagcaggagggcgcagatgagagcaccagcggccctgaggacaccagggctgccagcagcctgaacctgagcaatggagaaacagagagcgtgaagaccatgattgtgcatgatgatgtggagagcgagcccgccatgacccccagcaaggagggcaccctgattgtgcggcagacccagagcgccagcagcaccctgcagaagcacaagagcagcagcagcttcacccccttcatcgacccccggctgctgcagatcagccccagcagcggcaccaccgtgacctctgtggtgggcttcagctgtgatggcatgaggcctgaggccatccggcaggaccccaccaggaaaggatctgtggtgaatgtgaaccccaccaacacccggccccagagcgacaccccagagatcaggaagtacaagaagcgcttcaacagcgagatcctgtgtgccgccctgtggggcgtgaacctgctggtgggcacagagagcggcctgatgctgctggacaggagcggccagggcaaggtgtaccccctcatcaacagaagacgcttccagcagatggatgtgctggagggcctgaatgtgctggtgaccatcagcggcaagaaggacaagctgcgggtgtactacctgtcctggctgaggaacaagatcctgcacaatgaccctgaggtggagaagaagcagggctggaccaccgtgggggacctggagggctgtgtgcactacaaggtggtgaagtatgaaagaatcaagttcctggtgattgccctgaagagctctgtggaggtgtatgcctgggcccccaagccctaccacaagttcatggccttcaagagctttggagagctggtgcacaagcccctgctggtggacctgactgtggaggagggccagaggctgaaggtgatctacggcagctgtgccggcttccacgctgtggatgtggacagcggctctgtgtatgacatctacctgcccacccacatccagtgcagcatcaagccccacgccatcatcatcctgcccaacacagatggcatggagctgctggtgtgctatgaagatgagggcgtgtatgtgaacacctacggccgcatcaccaaggatgtggtgctgcagtggggcgagatgcccacctctgtggcctacatccgcagcaaccagaccatgggctggggcgagaaggccatcgagatccgctctgtggagaccggccacctggatggagtcttcatgcacaagagggcccagaggctgaagttcctgtgtgaaagaaatgacaaggtgttctttgcctctgtgcgcagcggcggcagcagccaggtgtacttcatgaccctgggccgcaccagcctgctgtcctggtag

SEQ ID NO: 286906 - DNA, 3129 bp, Artificial Sequence
  derived and/or modified sequence
atggccaacgacagccccgccaagagcctggtggacatcgacctgtcctctctgcgtgatcccgctggtatctttgagctcgtggaggtagttggcaatgggacctatggccaggtttacaaaggaagacatgtgaagactggccagctggctgcaatcaaagttatggacgttacagaggacgaagaggaggagatcaaactggaaatcaatatgctgaagaaatactcacatcatcgaaatattgcgacctattatggcgcttttatcaaaaagtcaccaccaggccacgacgaccaactctggctggtgatggagttttgcggtgcgggttctatcacagatctagtcaaaaacacaaagggcaataccctgaaagaagattggattgcctatatttccagggaaattttgaggggactggcccatttacatattcatcatgtgattcaccgcgacatcaaggggcaaaatgtgttgctgaccgagaacgcagaagttaagctcgacgaaacagaatatgagtactccggctcagaagaggaggaggaggaagtgcctgagcaagaaggagaaccgagcagtattgtcaacgtcccgggtgagagcactttgcgcagggactttctgagacttcagcaggagaacaaggagcggagcgaagcgctgaggagacagcaacttctgcaggaacagcaactcagagagcaggaagaatataagagacaactgttagcagagcgacagaagaggattgaacaacagaaggagcagcgccggaggttggaggagcaacagaggcgagaaagagaggctcgcagacaacaggaaagggagcagaggaggagagaacaggaagagaagcgccgtctcgaggaattggaacgacggcgaaaggaagaagaagagagaaggcgggcagaggaggagaaaagaagagtcgagagagaacaggagtacatccgtcgccagttggaagaggagcagcgccatctagaggtgttgcaacagcagctcctgcaggagcaagctatgcttctggaatgtcggtggagagagatggaggaacaccgccaggctgaacgcctccagcgacagctacagcaggagcaggcatatttgctgagcctgcaacatgaccataggagaccccacccacagcacagccagcagcccccgccaccccagcaggagagatctaagccctcatttcatgcccccgaacctaaggcccactatgaacctgctgatcgggctcgggaggtgccagtgcgcacgactagccgctctcccgttctgagtcggcgggattccccactgcagggttccgggcagcagaactctcaggctggacaaagaaactctacatcttccattgaacctcggctgctttgggaaagggtcgagaagctagtgcccagacccgggtcgggctcaagtagcggctcaagcaactctggctcacagcccggatcccaccccgggagccagtccggctccggtgaacggttccgggttaggtcatcctctaaaagtgaagggagcccttcccaaaggctggagaacgccgtaaagaaaccagaagacaaaaaagaagttttccggcccttgaagcccgccgttcgtatagaccttaccgcgctggcaaaagaactgcgggctgtggaagacgttagacccccacataaagtgacagactactcctcatcttctgaagagtctggtaccactgatgaggaagacgatgacgtggaacaggagggagctgacgagtcaaccagcgggccagaggacactagggctgcttcatctctcaacttaagtaacggggaaactgagagcgttaagaccatgatcgtgcatgacgacgtagagagtgagcctgcaatgaccccatccaaagaaggtacattgatcgtgcgccagacacagtctgcatcttccaccctgcagaagcacaagagcagttcaagtttcactccctttattgatcccagattgctgcaaatttctcctagcagtggcacaacggtgacatccgtggtcggatttagctgcgacggcatgaggccagaagcaattagacaggacccaacacgcaaggggagcgtggtgaacgtgaacccaactaacactagaccccaatcggataccccagaaatcagaaagtataaaaaaaggttcaattcagaaatcctgtgtgccgccttgtggggggtgaatctgctcgttggaacagaatccggactgatgctcctcgatcgttccgggcagggaaaagtctatccgctgatcaatagacggaggttccagcagatggatgtgctggaggggctcaacgtgctggtgacgatctccggtaaaaaagacaagctgagagtgtattatctctcttggctgcggaacaaaatacttcataatgacccggaggtagaaaagaagcaagggtggaccactgttggtgatctcgagggttgtgtccactacaaggtagtgaaatatgaacgcattaaatttctggtaatcgccttaaaatcttcagtggaggtgtacgcatgggcacccaaaccttatcacaaatttatggctttcaaaagctttggcgagctggtgcacaagccattgctagttgatctgactgtggaggagggacaaaggctgaaggtcatttacggcagttgcgccgggttccatgccgtggacgtagatagtgggagtgtttatgacatttatttgcctacacatatacagtgcagcattaagccccacgcaatcatcatcttacccaacacggatggaatggagcttctcgtctgctacgaggacgaaggtgtttacgtgaacacttacggtcggattacaaaggacgtagtactgcaatggggcgaaatgcccacctctgtcgcttatatccgctctaatcagactatgggatggggggagaaggccattgagattcggagtgtagagaccggacacctagacggggtttttatgcataaaagggcacagcggttaaagttcctgtgtgagcgaaacgacaaagtgttttttgcatccgtgcgctccggaggcagctcccaggtgtatttcatgactcttggtaggacatcattgttgagctggtag

SEQ ID NO: 286907 - DNA, 3129 bp, Artificial Sequence
  derived and/or modified sequence
atggcaaatgattctcccgctaagtctctcgttgacatcgatctgagcagtctcagggacccagctggaatctttgagctggttgaggttgtgggaaatggaacatacgggcaagtatacaaagggagacacgtgaaaaccggacagctagctgcaattaaggtcatggatgtgacagaagacgaagaagaagagatcaagctggaaattaatatgctgaaaaaatatagccatcacagaaatatcgcgacctactacggggcttttatcaaaaagagccctcctgggcacgacgaccagttgtggcttgtgatggaattttgtggcgctggcagcataacagacctggttaagaatactaagggaaacacacttaaagaggactggatcgcctacataagcagagaaattctacgtggcttagctcatctgcacatacaccacgtgatccacagggatattaagggacaaaacgttctactgactgaaaacgctgaggtcaagctggacgagacggaatatgaatactctggtagtgaggaggaggaggaagaggtgcctgaacaggagggggagccatcatctattgttaatgtccctggagaatccaccctgagaagggactttcttcggctccagcaagagaataaggaacggagcgaggctttaagaaggcagcagcttttgcaagaacaacagctaagagagcaggaagagtataaaaggcagttgttggcagagagacaaaagaggattgaacagcagaaggagcagagaaggcgcttagaggagcagcagcggagggaaagggaggccagacggcagcaagagcgagagcagaggaggcgtgagcaagaagaaaagcgacgtctggaggaacttgaaaggcgaagaaaggaggaagaagagagaaggagggccgaagaggagaagcgaagagtcgagagagaacaagagtatattcgtaggcagttagaggaggagcaacgtcaccttgaagtactgcaacagcaactgctccaggagcaagccatgcttctggaatgcaggtggagggagatggaagaacaccgccaggctgaaagactgcaacggcaactccagcaggagcaagcatatttacttagtctccagcacgaccacagaaggccgcacccccagcacagtcagcagcctcccccaccacaacaagagaggagcaaaccaagttttcacgcgcctgaaccaaaggctcattacgagcccgctgacagggcaagggaagtgcccgtgagaaccacctccaggagccctgtgctgagccgtcgggattcacctctgcaaggatccggacagcagaacagccaggccggtcagcggaactcaacaagctctattgagccgcgattgctgtgggaacgggtggaaaaactggtgcctcggccaggttcaggctcgtcttccggcagctcaaactcaggtagccaaccagggagtcatcccggttctcaaagtggctcaggtgaacgcttccgagtcagaagctcctctaagtccgaggggagcccctcgcagcgtctcgagaatgctgtcaagaagcctgaggacaagaaagaagtgttcaggcctctgaagcctgccgtgaggattgacctcacggctctggcgaaggagctgagagcggttgaggatgtgcggccaccacacaaagtgactgactattcttcgtcctctgaagaatcagggacaaccgatgaagaagatgacgatgtcgaacaggaaggagctgatgaatccacatccgggccagaggatacgcgggcagccagttctctgaacctgtctaatggagagacagaaagcgttaaaacaatgatcgtgcacgatgacgtcgaatcagaacccgctatgaccccgagtaaggaaggcactctgattgttagacaaacccaatccgctagtagtacactccaaaagcataaatcatcgagcagtttcactcctttcatcgatccaaggctcttacaaatctctccatcctccggaactacagtgacctctgttgttggattctcatgcgacgggatgcgaccggaggctatcaggcaagaccctacacgaaaaggcagtgtggtgaacgtgaatccaactaatactaggccccagtccgacacaccagagattcgaaagtacaagaagcgcttcaattccgagatcctgtgcgcagcactctggggcgtgaacttgctggttggaacagagagcggattaatgcttctagataggagcggtcaggggaaagtgtacccattgatcaaccgcagacggtttcagcagatggatgtcctggaaggtctcaacgtgcttgtgacaatcagcggcaaaaaagataagctaagggtgtattaccttagctggctgcgaaacaagatattacacaatgacccggaggtcgagaaaaagcagggctggacaaccgttggcgacttggaaggttgcgttcattataaagtagtgaagtacgagagaataaaattcctggtcatcgctttgaaaagtagcgtcgaagtctacgcatgggcaccaaagccctaccacaagttcatggcctttaagtctttcggtgaacttgtccataagcctctcctagtagaccttacggtcgaagagggtcagagactaaaggtcatatatggctcttgcgctggctttcatgccgttgacgtagattccggctcagtgtacgacatctacctccctacacacatccagtgcagtataaagcctcacgcaatcattatccttcccaacacggatgggatggagcttctggtctgttatgaagacgagggagtctacgttaatacgtacggtcggataaccaaagacgtcgtgctgcaatggggagaaatgccaacttctgtggcctatattcggagtaatcagacaatgggttggggcgagaaggctattgaaatcaggagcgtagagacaggccacctggacggggtattcatgcataagagagcacagaggctcaagttcttgtgtgagcgcaacgataaggtgttcttcgccagtgtgcgcagtggcggttcatcccaggtgtactttatgaccctgggaaggacaagcctcctcagttggtag

SEQ ID NO: 286908 - DNA, 3282 bp, Artificial Sequence
  derived and/or modified sequence
ctggtctgcggctgagatacacagagcgacagagacatttattgttatttgttttttggtggcaaaaagggaaaatggcgaacgactcccctgcaaaaagtctggtggacatcgacctctcctccctgcgggatcctgctgggatttttgagctggtggaagtggttggaaatggcacctatggacaagtctataagggtcgacatgttaaaacgggtcagttggcagccatcaaagttatggatgtcactgaggatgaagaggaagaaatcaaactggagataaatatgctaaagaaatactctcatcacagaaacattgcaacatattatggtgctttcatcaaaaagagccctccaggacatgatgaccaactctggcttgttatggagttctgtggggctgggtccattacagaccttgtgaagaacaccaaagggaacacactcaaagaagactggatcgcttacatctccagagaaatcctgaggggactggcacatcttcacattcatcatgtgattcaccgggatatcaagggccagaatgtgttgctgactgagaatgcagaggtgaaacttgatgaaactgagtatgagtacagtgggagtgaggaagaagaggaggaagtgcctgaacaggaaggagagccaagttccattgtgaacgtgcctggtgagtctactcttcgccgagatttcctgagactgcagcaggagaacaaggaacgttccgaggctcttcggagacaacagttactacaggagcaacagctccgggagcaggaagaatataaaaggcaactgctggcagagagacagaagcggattgagcagcagaaagaacagaggcgacggctagaagagcaacaaaggagagagcgggaagctagaaggcagcaggaacgtgaacagcgaaggagagaacaagaagaaaagaggcgtctagaggagttggagagaaggcgcaaagaagaagaggagaggagacgggcagaagaagaaaagaggagagttgaaagagaacaggagtatatcaggcgacagctagaagaggagcagcggcacttggaagtccttcagcagcagctgctccaggagcaggccatgttactggagtgccgatggcgggagatggaggagcaccggcaggcagagaggctccagaggcagttgcaacaagaacaagcatatctcctgtctctacagcatgaccataggaggccgcacccgcagcactcgcagcagccgccaccaccgcagcaggaaaggagcaagccaagcttccatgctcccgagcccaaagcccactacgagcctgctgaccgagcgcgagaggttcctgtgagaacaacatctcgctcccctgttctgtcccgtcgagattccccactgcagggcagtgggcagcagaatagccaggcaggacagagaaactccaccagcagtattgagcccaggcttctgtgggagagagtggagaagctggtgcccagacctggcagtggcagctcctcagggtccagcaactcaggatcccagcccgggtctcaccctgggtctcagagtggctccggggaacgcttcagagtgagatcatcatccaagtctgaaggctctccatctcagcgcctggaaaatgcagtgaaaaaacctgaagataaaaaggaagttttcagacccctcaagcctgctgtaaggattgatctgaccgcactggccaaagagcttcgagcagtggaagatgtacggccacctcacaaagtaacggactactcctcatccagtgaggagtcggggacgacggatgaggaggacgacgatgtggagcaggaaggggctgacgagtccacctcaggaccagaggacaccagagcagcgtcatctctgaatttgagcaatggtgaaacggaatctgtgaaaaccatgattgtccatgatgatgtagaaagtgagccggccatgaccccatccaaggagggcactctaatcgtccgccagactcagtccgctagtagcacactccagaaacacaaatcttcctcctcctttacaccttttatagaccccagattactacagatttctccatctagcggaacaacagtgacatctgtggtgggattttcctgtgatgggatgagaccagaagccataaggcaagatcctacccggaaaggctcagtggtcaatgtgaatcctaccaacactaggccacagagtgacaccccggagattcgtaaatacaagaagaggtttaactctgagattctgtgtgctgccttatggggagtgaatttgctagtgggtacagagagtggcctgatgctgctggacagaagtggccaagggaaggtctatcctcttatcaaccgaagacgatttcaacaaatggacgtacttgagggcttgaatgtcttggtgacaatatctggcaaaaaggataagttacgtgtctactatttgtcctggttaagaaataaaatacttcacaatgatccagaagttgagaagaagcagggatggacaaccgtaggggatttggaaggatgtgtacattataaagttgtaaaatatgaaagaatcaaatttctggtgattgctttgaagagttctgtggaagtctatgcgtgggcaccaaagccatatcacaaatttatggcctttaagtcatttggagaattggtacataagccattactggtggatctcactgttgaggaaggccagaggttgaaagtgatctatggatcctgtgctggattccatgctgttgatgtggattcaggatcagtctatgacatttatctaccaacacatatccagtgtagcatcaaaccccatgcaatcatcatcctccccaatacagatggaatggagcttctggtgtgctatgaagatgagggggtttatgtaaacacatatggaaggatcaccaaggatgtagttctacagtggggagagatgcctacatcagtagcatatattcgatccaatcagacaatgggctggggagagaaggccatagagatccgatctgtggaaactggtcacttggatggtgtgttcatgcacaaaagggctcaaagactaaaattcttgtgtgaacgcaatgacaaggtgttctttgcctctgttcggtctggtggcagcagtcaggtttatttcatgaccttaggcaggacttctcttctgagctggtagaagcagtgtgatccagggattactggcctccagagtcttcaagatcctgagaacttggaattccttgtaactggagctc

SEQ ID NO: 286909 - DNA, 3129 bp, Artificial Sequence
  derived and/or modified sequence
atggccaacgacagccccgccaagagcctggtggacatcgacctgagcagcctgagagaccccgccggcatcttcgagctggtggaggtggtgggcaacggcacctacggccaggtgtacaagggcagacacgtgaagaccggccagctggccgccatcaaggtgatggacgtgaccgaggacgaggaggaggagatcaagctggagatcaacatgctgaagaagtacagccaccacagaaacatcgccacctactacggcgccttcatcaagaagagcccccccggccacgacgaccagctgtggctggtgatggagttctgcggcgccggcagcatcaccgacctggtgaagaacaccaagggcaacaccctgaaggaggactggatcgcctacatcagcagagagatcctgagaggcctggcccacctgcacatccaccacgtgatccacagagacatcaagggccagaacgtgctgctgaccgagaacgccgaggtgaagctggacgagaccgagtacgagtacagcggcagcgaggaggaggaggaggaggtgcccgagcaggagggcgagcccagcagcatcgtgaacgtgcccggcgagagcaccctgagaagagacttcctgagactgcagcaggagaacaaggagagaagcgaggccctgagaagacagcagctgctgcaggagcagcagctgagagagcaggaggagtacaagagacagctgctggccgagagacagaagagaatcgagcagcagaaggagcagagaagaagactggaggagcagcagagaagagagagagaggccagaagacagcaggagagagagcagagaagaagagagcaggaggagaagagaagactggaggagctggagagaagaagaaaggaggaggaggagagaagaagagccgaggaggagaagagaagagtggagagagagcaggagtacatcagaagacagctggaggaggagcagagacacctggaggtgctgcagcagcagctgctgcaggagcaggccatgctgctggagtgcagatggagagagatggaggagcacagacaggccgagagactgcagagacagctgcagcaggagcaggcctacctgctgagcctgcagcacgaccacagaagaccccacccccagcacagccagcagcccccccccccccagcaggagagaagcaagcccagcttccacgcccccgagcccaaggcccactacgagcccgccgacagagccagagaggtgcccgtgagaaccaccagcagaagccccgtgctgagcagaagagacagccccctgcagggcagcggccagcagaacagccaggccggccagagaaacagcaccagcagcatcgagcccagactgctgtgggagagagtggagaagctggtgcccagacccggcagcggcagcagcagcggcagcagcaacagcggcagccagcccggcagccaccccggcagccagagcggcagcggcgagagattcagagtgagaagcagcagcaagagcgagggcagccccagccagagactggagaacgccgtgaagaagcccgaggacaagaaggaggtgttcagacccctgaagcccgccgtgagaatcgacctgaccgccctggccaaggagctgagagccgtggaggacgtgagacccccccacaaggtgaccgactacagcagcagcagcgaggagagcggcaccaccgacgaggaggacgacgacgtggagcaggagggcgccgacgagagcaccagcggccccgaggacaccagagccgccagcagcctgaacctgagcaacggcgagaccgagagcgtgaagaccatgatcgtgcacgacgacgtggagagcgagcccgccatgacccccagcaaggagggcaccctgatcgtgagacagacccagagcgccagcagcaccctgcagaagcacaagagcagcagcagcttcacccccttcatcgaccccagactgctgcagatcagccccagcagcggcaccaccgtgaccagcgtggtgggcttcagctgcgacggcatgagacccgaggccatcagacaggaccccaccagaaagggcagcgtggtgaacgtgaaccccaccaacaccagaccccagagcgacacccccgagatcagaaagtacaagaagagattcaacagcgagatcctgtgcgccgccctgtggggcgtgaacctgctggtgggcaccgagagcggcctgatgctgctggacagaagcggccagggcaaggtgtaccccctgatcaacagaagaagattccagcagatggacgtgctggagggcctgaacgtgctggtgaccatcagcggcaagaaggacaagctgagagtgtactacctgagctggctgagaaacaagatcctgcacaacgaccccgaggtggagaagaagcagggctggaccaccgtgggcgacctggagggctgcgtgcactacaaggtggtgaagtacgagagaatcaagttcctggtgatcgccctgaagagcagcgtggaggtgtacgcctgggcccccaagccctaccacaagttcatggccttcaagagcttcggcgagctggtgcacaagcccctgctggtggacctgaccgtggaggagggccagagactgaaggtgatctacggcagctgcgccggcttccacgccgtggacgtggacagcggcagcgtgtacgacatctacctgcccacccacatccagtgcagcatcaagccccacgccatcatcatcctgcccaacaccgacggcatggagctgctggtgtgctacgaggacgagggcgtgtacgtgaacacctacggcagaatcaccaaggacgtggtgctgcagtggggcgagatgcccaccagcgtggcctacatcagaagcaaccagaccatgggctggggcgagaaggccatcgagatcagaagcgtggagaccggccacctggacggcgtgttcatgcacaagagagcccagagactgaagttcctgtgcgagagaaacgacaaggtgttcttcgccagcgtgagaagcggcggcagcagccaggtgtacttcatgaccctgggcagaaccagcctgctgagctggtag

SEQ ID NO: 286910 - DNA, 306 bp, Artificial Sequence
  derived and/or modified sequence
atggccagcgccggcacccagcactacagcatcggcctgagacagaagaacagcttcaagcagagcggccccagcggcaccgtgcccgccaccccccccgagaagcccagcgagggcagagtgtggccccaggcccaccagcaggtgaagcccatctggaagctggagaagaagcaggtggagaccctgagcgccggcctgggccccggcctgctgggcgtgcccccccagcccgcctacttcttctgccccagcaccctgtgcagcagcggcaccaccgccgtgatcgccggccacagcagctag

SEQ ID NO: 286911 - DNA, 303 bp, Artificial Sequence
  derived and/or modified sequence
atggccagcgccggcacccagcactacagcatcggcctgagacagaagaacagcttcaagcagagcggccccagcggcaccgtgcccgccaccccccccgagaagcccagcgagggcagagtgtggccccaggcccaccagcaggtgaagcccatctggaagctggagaagaagcaggtggagaccctgagcgccggcctgggccccggcctgctgggcgtgcccccccagcccgcctacttcttctgccccagcaccctgtgcagcagcggcaccaccgccgtgatcgccggccacagctag

SEQ ID NO: 286912 - DNA, 525 bp, Artificial Sequence
  derived and/or modified sequence
atggccagcgccggcacccagcactacagcatcggcctgagacagaagaacagcttcaagcagagcggccccagcggcaccgtgcccgccaccccccccgagaagcccagcgagggcagagtgtggccccaggcccaccagcaggtgaagcccatctggaagctggagaagaagcaggtggagaccctgagcgccggcctgggccccggcctgctgggcgtgcccccccagcccgcctacttcttctgccccagcaccctgtgcagcagcggcaccaccgccgtgatcgccggccacagcagcagctgctacctgcacagcctgcccgacctgttcaacagcaccctgctgtacagaagaagcagctacagacagaagccctaccagcagctggagagcttctgcctgagaagcagccccagcgagaagagccccttcagcctgccccagaagagcctgcccgtgagcctgaccgccaacaaggccaccagcagcatggtgttcagcatggcccagcccatgtag

SEQ ID NO: 286913 - DNA, 306 bp, Artificial Sequence
  derived and/or modified sequence
atggctagcgcaggcacgcaacattactccatcggattgagacagaaaaactccttcaaacaaagcgggcctagcggaacggtaccagccacacctcctgaaaagccaagcgagggacgggtttggcctcaagcccatcaacaggtaaagcccatctggaagcttgagaagaagcaggtcgagacgctcagcgcaggcctcggacctggactgctgggtgtccctccgcagcctgcatactttttttgcccttcaactctctgtagcagcggaacgacagccgtaatcgcaggtcactcgagctag

SEQ ID NO: 286914 - DNA, 303 bp, Artificial Sequence
  derived and/or modified sequence
atggcctctgccggaactcagcactactcgattggtctaagacagaaaaattccttcaaacagagcggaccaagcggcacagtgcccgcaacacccccagagaaaccctccgagggcagggtttggccacaagcccaccaacaggtgaagccgatttggaagctggagaaaaaacaggtagagacgctctctgccggtcttggaccgggtctcctgggcgtgcccccccagccagcctacttcttttgccccagtaccctgtgtagctccggcacaacagccgtgattgcggggcattcctag

SEQ ID NO: 286915 - DNA, 525 bp, Artificial Sequence
  derived and/or modified sequence
atggcttccgccggtacacagcactactcaatcgggctcaggcagaagaacagtttcaaacaatctggtccttccggtacagtccccgccaccccaccagagaagccatctgaagggagagtgtggcctcaggcccaccaacaagtgaagcctatctggaagttggaaaagaagcaggtcgagacgctgtcagccggcctcgggcctggactcctcggagtgccccctcagcctgcatatttcttctgtccttccacactctgttcctccggcaccactgctgtgatcgccggtcactcctccagctgttatctgcactctctcccagatctgttcaactctacgcttctctaccggaggagtagctaccgacagaagccctaccagcaactcgagtcattctgcctgcgaagttcccccagtgaaaaaagcccattttctctgccccagaaaagtctgcctgttagcctgacggccaacaaggcaacgagcagcatggtgttctccatggcgcagccaatgtag

SEQ ID NO: 286916 - DNA, 306 bp, Artificial Sequence
  derived and/or modified sequence
atggccagcgctggcacccagcactacagcatcggcctgcggcagaagaacagcttcaagcagagcggccccagcggcaccgtgcctgccaccccacctgagaagcccagcgagggccgggtgtggccccaggcccaccagcaggtgaagcccatctggaagctggagaagaagcaggtggagaccctgtctgctggcctgggccctggcctgctgggcgtgcccccccagcctgcctacttcttctgccccagcaccctgtgcagcagcggcaccacagctgtgattgctggccacagcagctag

SEQ ID NO: 286917 - DNA, 303 bp, Artificial Sequence
  derived and/or modified sequence
atggccagcgctggcacccagcactacagcatcggcctgcggcagaagaacagcttcaagcagagcggccccagcggcaccgtgcctgccaccccacctgagaagcccagcgagggccgggtgtggccccaggcccaccagcaggtgaagcccatctggaagctggagaagaagcaggtggagaccctgtctgctggcctgggccctggcctgctgggcgtgcccccccagcctgcctacttcttctgccccagcaccctgtgcagcagcggcaccacagctgtgattgctggccacagctag

SEQ ID NO: 286918 - DNA, 525 bp, Artificial Sequence
  derived and/or modified sequence
atggccagcgctggcacccagcactacagcatcggcctgcggcagaagaacagcttcaagcagagcggccccagcggcaccgtgcctgccaccccacctgagaagcccagcgagggccgggtgtggccccaggcccaccagcaggtgaagcccatctggaagctggagaagaagcaggtggagaccctgtctgctggcctgggccctggcctgctgggcgtgcccccccagcctgcctacttcttctgccccagcaccctgtgcagcagcggcaccacagctgtgattgctggccacagcagcagctgctacctgcacagcctgcctgacctcttcaacagcaccctgctgtacagaagaagcagctaccggcagaagccctaccagcagctggagagcttctgcctgcggagcagccccagcgagaagagccccttcagcctgccccagaagagcctgcctgtgtccctgacagccaacaaggccaccagctccatggtgttctccatggcccagcccatgtag

SEQ ID NO: 286919 - DNA, 306 bp, Artificial Sequence
  derived and/or modified sequence
atggccagcgccggcacccagcactacagcatcggcctgcggcagaagaacagcttcaagcagtccggccccagcggcacagttccagctacccctcccgagaaaccatccgaggggcgagtatggccacaggcccatcaacaggtcaaacccatctggaagttagagaagaaacaggtcgagaccttatctgctggtctgggccccgggctgttgggtgtgcctcctcagccagcgtacttcttctgcccaagcacactgtgttctagcggaaccaccgctgtgattgctgggcattcaagttag

SEQ ID NO: 286920 - DNA, 303 bp, Artificial Sequence
  derived and/or modified sequence
atggccagcgccggcacccagcactacagcatcggcctgcggcagaagaattccttcaagcagtccggtcccagcggcaccgtgcccgctacaccaccagagaagccgtccgagggtcgggtatggcctcaagcccaccagcaggtgaagcctatttggaagctcgagaaaaagcaggtcgaaacactctctgcggggctggggccaggtctattgggagtgcctccacagcccgcttacttcttttgccccagcaccctgtgtagctctggtacgacagccgtaattgccggccacagctag

SEQ ID NO: 286921 - DNA, 525 bp, Artificial Sequence
  derived and/or modified sequence
atggccagcgccggcacccagcactacagcatcggcctgcggcagaagaactccttcaagcagagcgggccttccggcactgttccagccaccccacccgaaaagcccagtgagggtcgagtgtggcctcaggcccaccagcaagtgaaacctatctggaaactcgaaaaaaagcaggtggaaacgctctctgctggacttgggccaggtcttttgggggtccctcctcaaccagcttacttcttctgcccttccaccctctgttcgtctgggaccaccgctgtcatcgccggacacagcagtagttgctatctgcatagtttgccagacctgtttaattccaccctgctctataggaggagtagttatagacagaaaccctaccaacagctggagtccttttgtcttcggtcatctcctagcgaaaagagccctttcagcttgcctcagaagagtttacctgtgtcccttaccgccaacaaagccacaagctcgatggtcttttcaatggcacaaccgatgtag

SEQ ID NO: 286922 - DNA, 712 bp, Artificial Sequence
  derived and/or modified sequence
tctcggtctgtccgctgggggcgcgcgcggtgtgtggcaggcggcagcggcgctggcggccgagtgcgcttgtcacgcgtggcggtgcgtggttgctaggggcgcctgaggctgccgggtagcccagcaggccgagggaggaagtagcgtggagccggtgccgagccggggcgaagctggatcccctagatagactgtcttcaagctcactgatattttcctctgcttgatccattgtgctgttgagagcctctagtaaatttttcaggtcactacctctttttcaacactagatggcatcttggccccagactgacagacttcaaggatgcagctgctactaccggaggtgtgtggcaccttacctcagcaaggccatgagaccgtgtggccatgatgtgggcccctcatggcctcagcaggaacacagcactatagtattggcctccgccagaaaaacagcttcaagcagagtggtccctcaggcacagtacctgccacgccacctgagaaaccctcggagggcagagtctggcctcaggcccatcagcaagtgaagccaatctggaagctggaaaagaagcaagtggagacactgtcagcagggttgggcccaggcctcttgggcgtcccaccccagccagcatatttcttttgccccagcactttatgtagctctgggaccacggctgtcattgcaggccacagcagt

SEQ ID NO: 286923 - DNA, 588 bp, Artificial Sequence
  derived and/or modified sequence
agcgtggagccggtgccgagccggggcgaagctggatcccctagatagactgtcttcaagctcactgatattttcctctgcttgatccattgtgctgttgagagcctctagtaaatttttcagatgctgccatgaaagcaggcccacctttccttactggagaatattttgtgaatttgatttagaaaactgacagacttcaaggatgcagctgctactaccggaggtgtgtggcaccttacctcagcaaggccatgagaccgtgtggccatgatgtgggcccctcatggcctcagcaggaacacagcactatagtattggcctccgccagaaaaacagcttcaagcagagtggtccctcaggcacagtacctgccacgccacctgagaaaccctcggagggcagagtctggcctcaggcccatcagcaagtgaagccaatctggaagctggaaaagaagcaagtggagacactgtcagcagggttgggcccaggcctcttgggcgtcccaccccagccagcatatttcttttgccccagcactttatgtagctctgggaccacggctgtcattgcaggccacagcag

SEQ ID NO: 286924 - DNA, 306 bp, Artificial Sequence
  derived and/or modified sequence
atggcaagcgcaggcactcagcattatagtattggactgcggcagaagaactctttcaaacagtccggcccaagcgggaccgttccggcaacacccccagagaaaccgtccgagggacgagtttggcctcaggctcaccagcaggtcaaacccatctggaaactcgagaaaaaacaggttgagactttaagcgcaggtcttgggcctggtttgcttggtgtcccccctcaacccgcatattttttctgcccctccacactctgcagctcaggtacaacggccgtgatcgccggtcacagtagttag

SEQ ID NO: 286925 - DNA, 303 bp, Artificial Sequence
  derived and/or modified sequence
atggcttccgcgggaacccagcattactccatcggtctgagacagaagaatagcttcaaacagagcggtccctcgggtaccgttcccgcaaccccacctgagaaacccagcgaaggtcgtgtgtggccccaggctcatcagcaggttaaacctatatggaagctagagaagaagcaggtggagaccttatctgctgggctgggccctgggttactcggagttcctcctcagcccgcttattttttttgcccctcaaccctctgtagctccgggactaccgcagtaatcgcagggcacagctag

SEQ ID NO: 286926 - DNA, 525 bp, Artificial Sequence
  derived and/or modified sequence
atggcttccgccggtactcagcactactcaataggacttcgtcaaaagaacagcttcaagcaatcaggccctagtggtacggtacccgctactcctccagaaaagccatctgagggacgcgtgtggccacaggcccatcagcaggtgaagccgatctggaagttggagaagaagcaggtggagaccctgtccgccggactgggcccaggcctcctgggcgtccctccacagcctgcctactttttctgccctagcactctctgtagttcaggaactaccgctgttatcgcaggccatagcagctcatgttatctgcactccttgcctgacttgtttaactccacactgctatacaggagaagcagttaccgtcagaagccgtaccagcagctggagagtttttgcctacgctcaagccccagtgaaaagagtcccttcagccttcctcagaagtcgctgccagtgagtcttacagcgaacaaggctacttcttccatggtattctctatggcccaaccaatgtag

SEQ ID NO: 286927 - DNA, 747 bp, Artificial Sequence
  derived and/or modified sequence
gtgcgcttgtcacgcgtggcggtgcgtggttgctaggggcgcctgaggctgccgggtagcccagcaggccgagggaggaagtagcgtggagccggtgccgagccggggcgaagctggatcccctagactgacagacttcaaggatgcagctgctactaccggaggtgtgtggcaccttacctcagcaaggccatgagaccgtgtggccatgatgtgggcccctcatggcctcagcaggaacacagcactatagtattggcctccgccagaaaaacagcttcaagcagagtggtccctcaggcacagtacctgccacgccacctgagaaaccctcggagggcagagtctggcctcaggcccatcagcaagtgaagccaatctggaagctggaaaagaagcaagtggagacactgtcagcagggttgggcccaggcctcttgggcgtcccaccccagccagcatatttcttttgccccagcactttatgtagctctgggaccacggctgtcattgcaggccacagcagttcctgttacctacactctctcccggacttgttcaacagcaccctgctataccgccgctccagctataggcaaaaaccgtaccagcaactggagtctttctgcttgcgttcgagcccgtcagaaaaaagccctttttctctccctcaaaagagcctccctgtcagtctcactgccaacaaggccacttcttccatggtcttctccatggcccagcccatgg

SEQ ID NO: 286928 - protein, 668 aa, Artificial Sequence
  derived and/or modified sequence
MVLLEQPPAQAPLVTGLGALPLHAQSLVGADRVSPSIHKLRQHRPLGRTQSAPLPQNAQALQHLVIQQQHQQFLEKHKQQFQQQQLQMNKIIPKPSEPARQPESHPEETEEELREHQALLDEPYLDRLPGQKEAHAQAGVQVKQEPIESDEEEAEPPREVEPGQRQPSEQELLFRQQALLLEQQRIHQLRNYQASMEAAGIPVSFGGHRPLSRAQSSPASATFPVSVQEPPTKPRFTTGLVYDTLMLKHQCTCGSSSSHPEHAGRIQSIWSRLQETGLRGKCECIRGRKATLEELQTVHSEAHTLLYGTNPLNRQKLDSKKLLGSLASVFVRLPCGGVGVDSDTIWNEVHSAGAARLAVGCVVELVFKVATGELKNGFAVVRPPGHHAEESTPMGFCYFNSVAVAAKLLQQRLSVSKILIVDWDVHHGNGTQQAFYSDPSVLYMSLHRYDDGNFFPGSGAPDEVGTGPGVGFNVNMAFTGGLDPPMGDAEYLAAFRTVVMPIASEFAPDVVLVSSGFDAVEGHPTPLGGYNLSARCFGYLTKQLMGLAGGRIVLALEGGHDLTAICDASEACVSALLGNELDPLPEKVLQQRPNANAVRSMEKVMEIHSKYWRCLQRTTSTAGRSLIEAQTCENEEAETVTAMASLSVGVKPAEKRPDEEPMEEEPPL

SEQ ID NO: 286929 - protein, 907 aa, Artificial Sequence
  derived and/or modified sequence
MLETYNSLVSLQELVSFEEVAVHFTWEEWQDLDDAQRTLYRDVMLETYSSLVSLGHYITKPEMIFKLEQGAEPWIVEETPNLRLSAVQIIDDLIERSHESHDRFFWQIVITNSNTSTQERVELGKTFNLNSNHVLNLIINNGNSSGMKPGQFNDCQNMLFPIKPGETQSGEKPHVCDITRRSHRHHEHLTQHHKIQTLLQTFQCNEQGKTFNTEAMFFIHKRVHIVQTFGKYNEYEKACNNSAVIVQVITQVGQPTCCRKSDFTKHQQTHTGEKPYECVECEKPSISKSDLMLQCKMPTEEKPYACNWCEKLFSYKSSLIIHQRIHTGEKPYGCNECGKTFRRKSFLTLHERTHTGDKPYKCIECGKTFHCKSLLTLHHRTHSGEKPYQCSECGKTFSQKSYLTIHHRTHTGEKPYACDHCEEAFSHKSRLTVHQRTHTGEKPYECNECGKPFINKSNLRLHQRTHTGEKPYECNECGKTFHRKSFLTIHQWTHTGEKPYECNECGKTFRCKSFLTVHQRTHAGEKPYACNECGKTYSHKSYLTVHHRTHTGEKPYECNECGKSFHCKSFLTIHQRTHAGKKPYECNECEKTFINKLNLGIHKRTHTGERPYECNECGKTFRQKSNLSTHQGTHTGEKPYVCNECGKTFHRKSFLTIHQRTHTGKNRMDVMNVEKLFVRNHTLLYIRELTPGKSPMNVMNVENPFIRRQIFRSIKVFTRGRNPMNVANVEKPCQKSVLTVHHRTHTGEKPYECNECGKTFCHKSNLSTHQGTHSGEKPYECDECRKTFYDKTVLTIHQRTHTGEKPFECKECRKTFSQKSKLFVHHRTHTGEKPFRCNECRKTFSQKSGLSIHQRTHTGEKPYECKECGKTFCQKSHLSRHQQTHIGEKSDVAEAGYVFPQNHSFFP

SEQ ID NO: 286930 - DNA, 2724 bp, Artificial Sequence
  derived and/or modified sequence
atgctggagacctacaacagcctggtgagcctgcaggagctggtgagcttcgaggaggtggccgtgcacttcacctgggaggagtggcaggacctggacgacgcccagagaaccctgtacagagacgtgatgctggagacctacagcagcctggtgagcctgggccactacatcaccaagcccgagatgatcttcaagctggagcagggcgccgagccctggatcgtggaggagacccccaacctgagactgagcgccgtgcagatcatcgacgacctgatcgagagaagccacgagagccacgacagattcttctggcagatcgtgatcaccaacagcaacaccagcacccaggagagagtggagctgggcaagaccttcaacctgaacagcaaccacgtgctgaacctgatcatcaacaacggcaacagcagcggcatgaagcccggccagttcaacgactgccagaacatgctgttccccatcaagcccggcgagacccagagcggcgagaagccccacgtgtgcgacatcaccagaagaagccacagacaccacgagcacctgacccagcaccacaagatccagaccctgctgcagaccttccagtgcaacgagcagggcaagaccttcaacaccgaggccatgttcttcatccacaagagagtgcacatcgtgcagaccttcggcaagtacaacgagtacgagaaggcctgcaacaacagcgccgtgatcgtgcaggtgatcacccaggtgggccagcccacctgctgcagaaagagcgacttcaccaagcaccagcagacccacaccggcgagaagccctacgagtgcgtggagtgcgagaagcccagcatcagcaagagcgacctgatgctgcagtgcaagatgcccaccgaggagaagccctacgcctgcaactggtgcgagaagctgttcagctacaagagcagcctgatcatccaccagagaatccacaccggcgagaagccctacggctgcaacgagtgcggcaagaccttcagaagaaagagcttcctgaccctgcacgagagaacccacaccggcgacaagccctacaagtgcatcgagtgcggcaagaccttccactgcaagagcctgctgaccctgcaccacagaacccacagcggcgagaagccctaccagtgcagcgagtgcggcaagaccttcagccagaagagctacctgaccatccaccacagaacccacaccggcgagaagccctacgcctgcgaccactgcgaggaggccttcagccacaagagcagactgaccgtgcaccagagaacccacaccggcgagaagccctacgagtgcaacgagtgcggcaagcccttcatcaacaagagcaacctgagactgcaccagagaacccacaccggcgagaagccctacgagtgcaacgagtgcggcaagaccttccacagaaagagcttcctgaccatccaccagtggacccacaccggcgagaagccctacgagtgcaacgagtgcggcaagaccttcagatgcaagagcttcctgaccgtgcaccagagaacccacgccggcgagaagccctacgcctgcaacgagtgcggcaagacctacagccacaagagctacctgaccgtgcaccacagaacccacaccggcgagaagccctacgagtgcaacgagtgcggcaagagcttccactgcaagagcttcctgaccatccaccagagaacccacgccggcaagaagccctacgagtgcaacgagtgcgagaagaccttcatcaacaagctgaacctgggcatccacaagagaacccacaccggcgagagaccctacgagtgcaacgagtgcggcaagaccttcagacagaagagcaacctgagcacccaccagggcacccacaccggcgagaagccctacgtgtgcaacgagtgcggcaagaccttccacagaaagagcttcctgaccatccaccagagaacccacaccggcaagaacagaatggacgtgatgaacgtggagaagctgttcgtgagaaaccacaccctgctgtacatcagagagctgacccccggcaagagccccatgaacgtgatgaacgtggagaaccccttcatcagaagacagatcttcagaagcatcaaggtgttcaccagaggcagaaaccccatgaacgtggccaacgtggagaagccctgccagaagagcgtgctgaccgtgcaccacagaacccacaccggcgagaagccctacgagtgcaacgagtgcggcaagaccttctgccacaagagcaacctgagcacccaccagggcacccacagcggcgagaagccctacgagtgcgacgagtgcagaaagaccttctacgacaagaccgtgctgaccatccaccagagaacccacaccggcgagaagcccttcgagtgcaaggagtgcagaaagaccttcagccagaagagcaagctgttcgtgcaccacagaacccacaccggcgagaagcccttcagatgcaacgagtgcagaaagaccttcagccagaagagcggcctgagcatccaccagagaacccacaccggcgagaagccctacgagtgcaaggagtgcggcaagaccttctgccagaagagccacctgagcagacaccagcagacccacatcggcgagaagagcgacgtggccgaggccggctacgtgttcccccagaaccacagcttcttcccctag

SEQ ID NO: 286931 - DNA, 2724 bp, Artificial Sequence
  derived and/or modified sequence
atgctggaaacttataattctctggtgagtttacaggaactggttagcttcgaagaagtggctgtgcattttacctgggaagagtggcaggatttggacgacgctcagcgaactctgtatcgggatgtgatgttggaaacctacagctccctggtatcccttggccattatatcacaaaacctgagatgatctttaaactcgagcaaggtgcagaaccttggatcgtggaggagaccccaaatctgcgattgtcagcagtgcaaatcatcgacgacttaattgagaggtcccacgagagccacgacaggtttttttggcagatcgtcatcacaaatagtaacaccagcacccaagaacgtgtagagctagggaagacgtttaacctaaactctaatcatgtactgaacctgatcatcaataacgggaacagtagcggtatgaaacccgggcagtttaacgattgccaaaatatgttgttccctattaagcccggcgagacgcagagtggcgaaaaaccccatgtctgtgacattactcgtagatcacacagacaccacgaacaccttacccaacatcacaagattcagaccctgttacaaactttccagtgcaacgagcagggtaaaacttttaataccgaggcaatgtttttcattcacaaacgtgtccatattgtccaaacattcggaaagtacaacgagtacgaaaaggcttgcaacaactccgcagtaatcgtgcaggtgattacacaggtgggccagcccacatgttgccggaagtctgacttcacaaagcatcagcagacccacactggcgagaaaccctatgagtgcgtggagtgcgaaaagccgtctatttctaagagtgacctaatgttgcagtgtaaaatgccaaccgaggagaagccttacgcctgcaactggtgcgaaaagctgttttcttataaaagttctctgattatccaccagcgtatccacacaggtgagaagccgtatgggtgtaacgaatgcggcaagaccttccgcaggaagtcattcctcaccctgcatgaacgcacccacacaggggacaaaccttacaaatgcatcgaatgcgggaagaccttccactgcaagagcctcctgacactgcaccacaggacacattctggggaaaagccctaccaatgctcagaatgtggcaaaactttctcgcagaagagctacctgacaatacaccaccgcacccacacgggtgagaagccctacgcatgtgaccactgcgaggaggctttttcccataagagccgactgaccgtgcatcagcgcactcacactggcgagaagccttacgaatgtaatgaatgtggaaagccattcatcaacaagagcaatctgagactccaccaacggacccataccggcgaaaaaccatacgaatgtaacgagtgcgggaaaacttttcatcgcaagagctttctgaccattcaccaatggacacacacgggcgagaaaccatacgagtgcaatgagtgcggtaagacgttccggtgtaaatcctttctcacggtgcaccagcgaacacatgccggggagaagccatacgcatgtaatgaatgtggcaaaacttattcccacaaatcttacctgaccgtgcatcatcggactcatactggcgagaagccttacgagtgcaacgagtgtggtaagtcctttcattgcaagtcttttctgactatccaccaacgtacacacgccgggaaaaaaccttacgaatgcaacgagtgtgaaaaaaccttcataaataagttgaacttggggatccataaaaggacccatactggtgagcggccttacgagtgcaacgaatgcgggaagacctttcgccagaagagcaatcttagtacgcaccagggaactcacacgggagagaagccgtatgtctgcaatgagtgtggaaagacattccataggaagagcttcctgacaatccaccagcggactcacaccggtaagaacaggatggatgtcatgaacgtcgaaaaactgttcgtccgtaaccacacgttgctctacatcagggagttgactccggggaagtctccaatgaacgtcatgaacgtagaaaacccctttattcggagacagattttccgaagcatcaaggtctttactaggggacgaaacccaatgaacgtcgccaacgtcgaaaaaccgtgtcaaaagtcagtcctcaccgtgcaccacagaactcataccggggagaagccctacgaatgcaatgagtgtggcaaaacattttgtcacaaaagcaacttgtctacacaccaaggtactcactcaggcgaaaagccatacgagtgtgacgaatgccggaagacattctacgacaagaccgtgctaaccatacatcaacgcacgcataccggcgagaaaccattcgagtgtaaggagtgtcgaaaaacgttctctcaaaagagcaaactgttcgtgcaccacagaactcacaccggcgaaaagccgtttcgttgcaatgagtgccgcaagacatttagccagaagtccgggctgtctattcaccagcggacacataccggggaaaaaccttatgagtgtaaggagtgtggcaagactttttgtcagaagtctcacctcagccggcatcaacagacccacattggcgaaaagtcagacgtagccgaagcaggctacgtgttcccccagaatcactcgttttttccctag

SEQ ID NO: 286932 - DNA, 2724 bp, Artificial Sequence
  derived and/or modified sequence
atgctggagacctacaacagcctggtgtccctgcaggagctggtgtcctttgaggaggtggccgtgcacttcacctgggaggagtggcaggacctggatgatgcccagaggaccctgtacagagatgtgatgctggagacctacagcagcctggtgtccctgggccactacatcaccaagccagagatgatcttcaagctggagcagggcgctgagccctggatcgtggaggagacccccaacctgcggctgtctgctgtgcagatcattgatgacctgattgaaagaagccatgagagccatgaccgcttcttctggcagatcgtcatcaccaacagcaacaccagcacccaggagcgggtggagctgggcaagaccttcaacctgaacagcaaccacgtgctgaacctgatcatcaacaatggaaacagcagcggcatgaagccaggccagttcaatgactgccagaacatgctgttccccatcaagccaggagagacccagagcggggagaagccccacgtgtgtgacatcacccggcgcagccaccgccaccacgagcacctgacccagcaccacaagatccagaccctgctgcagaccttccagtgcaatgagcagggcaagaccttcaacacagaggccatgttcttcatccacaagagggtgcacatcgtgcagaccttcggcaagtacaatgaatatgagaaggcctgcaacaacagcgctgtgattgtgcaggtgatcacccaggtgggccagcccacctgctgcaggaagagtgacttcaccaagcaccagcagacccacactggagagaagccctatgaatgtgtggagtgtgagaagcccagcatcagcaagagtgacctgatgctgcagtgcaagatgcccacagaggagaagccctatgcctgcaactggtgtgagaagctgttctcctacaagagcagcctcatcatccaccagaggatccacactggagagaagccctacggctgcaatgaatgtgggaagaccttccggaggaagagcttcctgaccctgcacgagaggacccacactggagacaagccctacaagtgcattgaatgtgggaagaccttccactgcaagagcctgctgaccctgcaccacaggacccacagcggggagaagccctaccagtgcagtgaatgtgggaagaccttcagccagaagagctacctgaccatccaccacaggacccacactggagagaagccctatgcctgtgaccactgtgaggaggccttcagccacaagagccggctgactgtgcaccagaggacccacactggagagaagccctatgaatgtaatgaatgtgggaagcccttcatcaacaagagcaacctgcggctgcaccagaggacccacactggagagaagccctatgaatgtaatgaatgtgggaagaccttccacaggaagagcttcctgaccatccaccagtggacccacactggagagaagccctatgaatgtaatgaatgtgggaagaccttccgctgcaagagcttcctgactgtgcaccagaggacccatgctggggagaagccctatgcctgcaatgaatgtgggaagacctacagccacaagagctacctgactgtgcaccacaggacccacactggagagaagccctatgaatgtaatgaatgtgggaagagcttccactgcaagagcttcctgaccatccaccagaggacccatgctgggaagaagccctatgaatgtaatgaatgtgagaagaccttcatcaacaagctgaacctgggcatccacaagaggacccacactggagagcggccctatgaatgtaatgaatgtgggaagaccttccggcagaagagcaacctgagcacccaccagggcacccacactggagagaagccctacgtgtgcaatgaatgtgggaagaccttccacaggaagagcttcctgaccatccaccagaggacccacacaggcaagaacaggatggatgtgatgaatgtggagaagctgtttgtgaggaaccacaccctgctgtacatccgggagctgaccccaggcaagagccccatgaatgtgatgaatgtggagaaccccttcatccggcggcagatcttccgcagcatcaaggtgttcacccggggcaggaaccccatgaatgtggccaacgtggagaagccctgccagaagtctgtgctgactgtgcaccacaggacccacactggagagaagccctatgagtgcaatgaatgtgggaagaccttctgccacaagagcaacctgagcacccaccagggcacccacagcggggagaagccctatgaatgtgatgaatgtaggaagaccttctatgacaagacagtgctgaccatccaccagaggacccacactggagagaagccctttgagtgcaaggaatgtaggaagaccttcagccagaagagcaagctgtttgtgcaccacaggacccacactggagagaagcccttccgctgcaatgaatgtaggaagaccttcagccagaagagcggcctgagcatccaccagaggacccacactggagagaagccctatgagtgcaaggaatgtgggaagaccttctgccagaagagccacctgagccgccaccagcagacccacatcggggagaagagtgatgtggccgaggccggctacgtgttcccccagaaccacagcttcttcccctag

SEQ ID NO: 286933 - DNA, 2724 bp, Artificial Sequence
  derived and/or modified sequence
atgctggagacctacaacagcctggtgagcctgcaggagctggtgtcatttgaggaagtcgctgttcacttcacctgggaagaatggcaagatctggacgacgcccagagaactctttaccgcgatgtcatgctcgaaacctactcctctctcgtaagcctcgggcattacatcacaaaacctgagatgatttttaagctggagcagggcgccgaaccatggatcgtcgaagagacccctaatctgagactgagtgccgtgcaaatcatcgatgatttgattgaacgctcacacgagagtcatgaccggtttttttggcaaattgtgattactaattccaatacgagcacccaagaaagggtcgagctaggaaaaacatttaacctcaatagtaaccatgttctcaacctaataatcaataacgggaattcgtctggaatgaagcctggtcagttcaacgactgccagaatatgctcttccccatcaagccaggggaaacacaatcaggagagaagcctcacgtgtgtgatatcacaagaaggtcccatcgacaccacgagcacctgactcaacaccacaagatccagaccctgcttcagaccttccagtgcaatgagcaaggcaagacattcaacactgaggcaatgttcttcatccacaaacgcgtgcacatagtgcaaacgtttggcaaatataacgagtacgagaaagcttgtaataattcagctgtgattgtacaggttatcacacaggtgggtcaacccacctgctgccggaaaagtgattttaccaaacatcagcaaactcataccggagaaaaaccctatgagtgtgtcgaatgcgaaaagccttccatctccaaaagcgatctaatgctccaatgtaaaatgccgactgaagagaagccctacgcctgtaactggtgcgaaaagctcttctcttataagagctctctgatcatccatcagcgcatccacacaggtgaaaagccttacggctgcaacgaatgtggaaagacctttaggcggaagtcctttctgactctgcatgagcggacccatacaggtgataaaccatacaagtgcattgagtgtggcaaaacgttccattgtaagagtttgctgacccttcaccaccgaacccactcaggggagaagccgtaccagtgttcagaatgcggcaaaactttctcacagaaatcctatctaaccatccaccatcggacacacaccggcgagaagccctatgcatgtgatcattgcgaagaggccttttcccataaaagccggttgaccgtgcatcagaggacccacactggcgagaagccatatgagtgtaacgaatgcggcaagccgtttatcaacaagtcaaacttacggctgcatcagaggactcacacgggggaaaagccctatgaatgcaatgaatgcggcaaaacttttcatcggaagtcttttcttacgattcaccagtggacccacacaggcgagaagccatacgaatgtaacgaatgtggaaagacattccgatgcaagtccttcctgactgtgcaccagcggacccatgccggcgaaaagccttacgcttgtaatgagtgtggaaagacatactcacacaaaagttacctcacagtgcatcacaggacccatacgggggaaaaaccatatgagtgcaatgagtgtggaaagtcctttcattgtaaatcttttctgactattcaccagcggacgcacgccggaaagaaaccctatgagtgcaacgaatgtgaaaaaaccttcataaacaagctgaacctggggatccataaaagaacacacacaggcgaaagaccttacgagtgtaacgagtgcggcaaaacgtttcgccagaagagtaatctgtctacgcaccagggcacccacacaggtgagaagccctacgtttgcaacgagtgcggtaaaactttccatcgtaagtcatttcttaccatccatcagcggacgcataccggaaagaatagaatggacgtgatgaatgtagaaaagttgttcgttcgtaatcacacgctactgtatatccgagagctcactccaggaaagagcccaatgaacgtgatgaacgtggagaatcccttcattagacggcagatttttcgttccattaaagtcttcaccaggggaaggaatcccatgaatgtcgccaatgtggaaaaaccatgtcagaagtcggtgctgacggtgcaccaccgcacccacacaggggagaaaccttatgaatgcaacgagtgtggcaagacattctgccacaaaagtaatttatccacacatcaaggcacacacagcggtgaaaaaccatatgagtgtgacgaatgccgcaaaaccttctatgataaaacagttctcacgatacaccagcgcacccacactggcgagaagccattcgagtgtaaagaatgtcggaagaccttctcacagaagtctaagctgttcgtacaccaccgcacacacactggcgagaagcctttccgatgtaatgagtgcagaaagacgtttagccagaagtcaggcttgagtatccaccaaagaactcataccggggaaaagccatacgagtgtaaggaatgcggcaaaactttctgccaaaaaagccatctatcccggcatcagcagacacatattggggagaagtcagacgtggccgaagctgggtatgtgttccctcagaaccactcattctttccttag

SEQ ID NO: 286934 - DNA, 2724 bp, Artificial Sequence
  derived and/or modified sequence
atgctggagacctataatagtttagtttctctgcaggagttggtttcctttgaagaagttgctgtccatttcacttgggaggagtggcaggacttggacgacgcccagcgcacactataccgcgacgtgatgcttgagacatactctagtctcgtatctcttggacactacataactaaacctgaaatgatattcaaactcgagcaaggagctgaaccctggatcgtggaagagacacctaacttgcggctctctgcagtccaaatcatagacgatttgatagaacgatcgcatgaaagccacgatcgctttttttggcagatcgtgattactaattccaacactagcactcaagaacgcgtcgagttgggtaaaaccttcaatcttaactctaatcacgtgcttaatctgataatcaacaacggaaatagctcaggtatgaaaccgggtcagttcaacgattgccagaacatgcttttccctattaagccgggagagacccaatccggcgaaaagcctcatgtctgtgatatcacaagacggagccacaggcatcacgagcatctcacacagcaccataaaatacaaacactactgcagaccttccagtgtaatgagcaggggaaaacctttaatactgaagccatgttttttattcacaaacgagtccatatcgtgcagacattcggaaagtacaatgagtacgagaaggcttgtaacaattccgccgtgatcgtgcaagtcatcacgcaggtggggcagccaacttgctgtaggaaatctgactttaccaagcaccagcagacacacacaggagaaaagccatacgagtgtgtggaatgcgagaaaccatctatatctaagagcgacctgatgctgcaatgcaagatgcctactgaagagaaaccttatgcttgcaactggtgtgagaagctgtttagctataagtcgtctctcatcatccaccaaaggatccacacgggagaaaagccttacggttgcaacgaatgtggcaaaaccttcagacgcaagtctttcttgacactgcatgaacggacacacactggcgataagccttacaagtgtattgagtgcggaaagacgttccactgcaaatccctgcttacgctgcaccatcgtacacattcgggagagaagccctatcagtgcagcgaatgcggcaagactttttctcagaagtcctatttgaccattcatcataggacccatacaggggagaaaccatatgcctgcgatcactgcgaggaggcgttctcacataagagtcgcctgactgttcaccagagaacgcacacaggtgagaagccatatgagtgtaatgagtgtggaaagccctttatcaataagtctaacctgaggctacaccagaggactcacactggagaaaagccttatgagtgtaatgagtgcggcaagacctttcaccggaaaagctttctgaccatccaccaatggactcatactggagagaaaccatacgagtgcaacgaatgcggcaagaccttcagatgcaaaagtttcctcacagttcaccagaggacccatgcaggtgaaaaaccctatgcatgcaacgaatgcggcaaaacctatagtcacaagagctacctgaccgtccatcaccgcacacacaccggcgagaagccatacgagtgtaatgaatgtggaaagtcctttcactgcaaatccttcctgaccattcaccagaggacccatgccggtaaaaaaccttatgaatgcaacgagtgcgagaaaacattcattaataagctgaacctgggaatccacaagagaacacatactggagaaaggccttatgagtgtaatgagtgcggaaagacgttcaggcagaaatccaatctttccacacatcaggggactcatacaggggaaaaaccttatgtgtgcaacgagtgcggaaagacctttcatagaaaatcattcttaaccatccaccagcgcactcacacaggcaaaaaccgtatggatgtgatgaacgtcgagaaacttttcgtgaggaaccacactctgctgtacattcgggagcttactccgggtaagagccccatgaacgtaatgaatgtggagaacccctttattcggaggcagattttccgatccataaaggtgttcacccgagggcgtaacccgatgaacgttgcaaatgtggaaaagccctgtcagaagagcgtcttaaccgttcatcaccgcacacacacgggcgaaaaaccctatgagtgcaatgagtgtggcaaaaccttttgtcacaagtctaatctgagtactcaccaggggacgcacagcggcgaaaagccgtacgaatgcgacgagtgtaggaagaccttttacgacaaaacagtattgacgatacaccagcgcacccataccggtgaaaagccattcgaatgcaaggagtgcagaaagacattctcacagaaaagtaaactttttgtacatcataggacccacaccggagaaaagccctttagatgcaatgagtgtaggaagaccttctctcaaaagtcagggttatccatacatcagagaacacatacgggggaaaaaccctatgaatgcaaagaatgcggcaaaacattttgtcagaaatcccacctctcaaggcatcagcaaacgcatattggagagaagtccgacgtggctgaagcaggttacgtatttcctcagaatcatagtttttttccgtag

SEQ ID NO: 286935 - DNA, 3012 bp, Artificial Sequence
  derived and/or modified sequence
ctatgtccctgcgggtcggtgcgagggcgaagaggaacccgtgggcccgggggatcccggggggccggaccagtgttccccagttgtgggagcagacgcgtgggcgcatcgcgggcgggcagggcctgaagtgcagctatgtttccagtgttctctggctgtttccaagagctacaagaaaagaataaatctctggggttggtgtcctttgaagatgtggctgtgcacttcacctgggaggagtggcaggacgtggatgatgcttagaggaccctgtacaggaacgtgatgctggagacctacaacagcctggtatcattacaggagttggtgtcctttgaggaggtagctgtgcacttcacctgggaggagtggcaggacctggatgatgctcagaggaccctgtacagggacgtgatgctggagacctacagcagcctggtatcattggggcattacattaccaaacctgagatgatcttcaagctagagcaaggagcagagccatggatagtagaagaaaccccaaacctgagactttcagctgtccagatcattgatgaccttattgaaaggagccatgaaagtcatgatagatttttctggcaaattgtaatcaccaacagcaacacatcaactcaggagagagttgaattaggaaaaacatttaatttgaactcaaaccatgttttaaatctgattataaataatggaaacagttcaggaatgaagcctgggcagtttaatgattgccagaacatgcttttccctattaagcctggggagacacagtctggagagaaacctcatgtctgtgatataaccaggagatcccacagacatcatgaacatcttactcagcatcacaagattcaaactctgctgcagacttttcaatgtaatgaacaagggaaaaccttcaacacggaggcaatgttctttatacataagagggttcatatagtacagacctttggtaaatataatgaatatgagaaagcctgtaataactcagctgttattgtccaagtgataactcaggtaggacagccaacttgctgtagaaagtctgacttcactaaacatcagcagacacacacaggagagaaaccctatgaatgtgttgaatgtgagaaaccctccattagcaaatcagaccttatgctacagtgcaagatgcctactgaggaaaaaccttatgcctgtaactggtgtgaaaaattgttcagctataagtccagcctcattatccatcagagaattcacacaggggaaaagccctatggatgcaatgaatgtggtaaaacctttcgccgtaagtcattcctcactttacatgagagaactcacacaggggataaaccctacaaatgtattgaatgtggaaaaacttttcactgtaagtcacttctcactttacatcacagaactcactcaggggaaaagccctatcagtgtagtgaatgtggaaaaacctttagccagaagtcatacctcacaatacatcatagaactcacacaggggaaaagccctatgcatgtgaccattgtgaagaagcatttagccataagtcaaggcttactgtccatcagagaacacacacaggggaaaaaccgtatgaatgtaatgagtgtggaaaaccctttatcaataagtcaaacctcaggttacatcagagaactcacacaggggaaaaaccctatgaatgcaatgaatgtgggaaaacgtttcaccgtaagtcattcctcactatccatcaatggactcacacaggggaaaaaccctacgaatgcaatgaatgtgggaaaacctttcgctgtaagtcattcctcactgtccatcagagaactcatgctggggaaaaaccatacgcatgtaacgaatgtggaaaaacatatagccacaagtcataccttacagtacatcacagaactcacacaggggaaaaaccctatgaatgtaatgaatgtggaaaatcctttcactgtaagtcattcctaactatacatcagagaactcatgctggcaaaaaaccctatgaatgtaatgaatgtgagaaaacctttatcaataagttaaaccttgggatacacaagagaactcacacaggggaaagaccctatgaatgtaatgaatgtggaaaaacctttcgtcagaagtcaaatctcagcacccatcagggaactcacacaggagagaaaccttacgtatgtaatgaatgtggaaaaacctttcatcgcaagtcattcctcaccatacaccagagaactcacacggggaaaaaccgtatggatgtaatgaatgtggaaaaactttttgtcagaaatcataccttattatacatcagagaactcacaccggggaaaagccctatgaatgtaatgaatgtggaaaatcctttcatcagaaggcaaatcttcagaagcatcaaggtattcacacgggggagaaaccctatgaatgtagcaaatgtggaaaaaccttgtcagaagtcagtcctcactgtacatcatagaacccataccggagaaaaaccttatgaatgtaatgagtgtgggaaaaccttttgtcacaagtcaaacctcagtacgcatcaggggactcactcaggagagaaaccctatgaatgtgatgaatgtaggaaaactttttacgataagacagttctcaccatacatcagagaactcacacaggtgagaagccatttgaatgtaaagaatgtaggaaaaccttctcccagaagtcaaaactctttgtacatcacagaactcacacaggggaaaaaccctttagatgtaatgaatgtaggaaaactttctcccagaagtcaggcctcagtatacatcagagaacacacacaggagaaaaaccttatgaatgtaaggaatgtgggaaaaccttttgccagaagtcacacctcagcaggcatcaacaaacccatataggagagaaatctgacgtagctgaggcaggctatgtgttccctcaaaatcactcttttttcccttga

SEQ ID NO: 286936 - protein, 601 aa, Artificial Sequence
  derived and/or modified sequence
MIQDKEVTLEYVSSLDFWYCKRCKANIGGHRSSCSFCKNPREVTEAKQELITYPQPQKTSIPAPLEKQPNQPLRPADKEPEPRKREEGQESRLGHQKREAERYLPPSRREGPTFRRDRERESWSGETRQDGESKTIMLKRIYRSTPPEVIVEVLEPYVRLTTANVRIIKNRTGPMGHTYGFIDLDSHAEALRVVKILQNLDPPFSIDGKMVAVNLATGKRRNDSGDHSDHMHYYQGKKYFRDRRGGGRNSDWSSDTNRQGQQSSSDCYIYDSATGYYYDPLAGTYYDPNTQQEVYVPQDPGLPEEEEIKEKKPTSQGKSSSKKEMSKRDGKEKKDRGVTRFQENASEGKAPAEDVFKKPLPPTVKKEESPPPPKVVNPLIGLLGEYGGDSDYEEEEEEEQTPPPQPRTAQPQKREEQTKKENEEDKLTDWNKLACLLCRRQFPNKEVLIKHQQLSDLHKQNLEIHRKIKQSEQELAYLERREREGKFKGRGNDRREKLQSFDSPERKRIKYSRETDSDRKLVDKEDIDTSSKGGCVQQATGWRKGTGLGYGHPGLASSEEAEGRMRGPSVGASGRTSKRQSNETYRDAVRRVMFARYKELD

SEQ ID NO: 286937 - protein, 991 aa, Artificial Sequence
  derived and/or modified sequence
MDYRGGDGTSMDYRGREAPHMNYRDRDAHAVDFRGRDAPPSDFRGRGTYDLDFRGRDGSHADFRGRDLSDLDFRAREQSRSDFRNRDVSDLDFRDKDGTQVDFRGRGSGTTDLDFRDRDTPHSDFRGRHRSRTDQDFRGREMGSCMEFKDREMPPVDPNILDYIQPSTQDREHSGMNVNRREESTHDHTIERPAFGIQKGEFEHSETREGETQGVAFEHESPADFQNSQSPVQDQDKSQLSGREEQSSDAGLFKEEGGLDFLGRQDTDYRSMEYRDVDHRLPGSQMFGYGQSKSFPEGKTARDAQRDLQDQDYRTGPSEEKPSRLIRLSGVPEDATKEEILNAFRTPDGMPVKNLQLKEYNTGYDYGYVCVEFSLLEDAIGCMEANQGTLMIQDKEVTLEYVSSLDFWYCKRCKANIGGHRSSCSFCKNPREVTEAKQELITYPQPQKTSIPAPLEKQPNQPLRPADKEPEPRKREEGQESRLGHQKREAERYLPPSRREGPTFRRDRERESWSGETRQDGESKTIMLKRIYRSTPPEVIVEVLEPYVRLTTANVRIIKNRTGPMGHTYGFIDLDSHAEALRVVKILQNLDPPFSIDGKMVAVNLATGKRRNDSGDHSDHMHYYQGKKYFRDRRGGGRNSDWSSDTNRQGQQSSSDCYIYDSATGYYYDPLAGTYYDPNTQQEVYVPQDPGLPEEEEIKEKKPTSQGKSSSKKEMSKRDGKEKKDRGVTRFQENASEGKAPAEDVFKKPLPPTVKKEESPPPPKVVNPLIGLLGEYGGDSDYEEEEEEEQTPPPQPRTAQPQKREEQTKKENEEDKLTDWNKLACLLCRRQFPNKEVLIKHQQLSDLHKQNLEIHRKIKQSEQELAYLERREREGKFKGRGNDRREKLQSFDSPERKRIKYSRETDSDRKLVDKEDIDTSSKGGCVQQATGWRKGTGLGYGHPGLASSEEAEGRMRGPSVGASGRTSKRQSNETYRDAVRRVMFARYKELD

SEQ ID NO: 286938 - DNA, 2976 bp, Artificial Sequence
  derived and/or modified sequence
atggactaccggggcggggatggcacttcaatggactaccgcgggcgagaggccccccacatgaattaccgggatagggacgcccacgcagtggattttcgcgggagggacgctccacctagcgacttcagaggccgagggacttacgacctcgattttaggggccgagatggctcacacgccgacttccgcggcagggacctgtccgacctggattttagagcacgcgagcaatcacggagcgacttcaggaacagagacgtcagcgacctggatttccgggacaaggacggaacccaggtggatttccgagggagagggtctggcacaaccgacctcgatttccgcgaccgagacacaccccatagcgatttcagaggaaggcatagaagtcggactgatcaagatttcagaggaagggagatgggctcttgcatggagtttaaagaccgcgaaatgccgccggtcgaccctaatatattggactacattcagcccagcacccaagatagagaacattccggcatgaacgtgaaccggagagaggagtcaacacatgatcacaccatcgagcgaccggcctttgggatccaaaaaggagaatttgagcacagtgaaactcgagagggggagacacagggcgtggcttttgagcacgaaagtcccgcggacttccagaactcccaatctcctgtgcaagaccaggataagtcacagttgtccggtcgggaagagcagtcctcagacgctggactttttaaggaggaagggggactggattttctcgggaggcaagataccgattatagatcgatggaatacagagacgttgaccaccggctccctggcagccagatgttcggctatggacaatctaagtcattccctgaaggcaaaacagcgcgggatgcccagagagacctgcaagatcaggattacaggaccggtccatccgaggaaaagcccagcagactcattagactctctggcgttcctgaggacgcaaccaaagaggagatcctgaacgcattccggacacctgatgggatgccggtgaagaatctccagctaaaggagtacaacactggatacgactatggatatgtttgtgtcgaattttctcttttggaagatgctattggatgcatggaagctaaccagggaacgctgatgatccaagataaagaggtaacactcgaatatgtctcctcactcgacttctggtactgtaagcggtgtaaggcaaacattggcggacacaggtcgagctgttctttttgtaagaaccccagggaggtgaccgaagccaagcaagagctcatcacttatccacagccccaaaaaacctctattccggcccctttagaaaaacagcccaaccagccactgcgcccagcagataaggaacctgagcctcgtaaacgcgaggaggggcaagagtcccgactgggacatcaaaaacgggaggctgaacgctacctgcccccctcccggagagagggccccacattccggcgggaccgggagagagagagctggtctggagagacccggcaggacggggagtcaaagactataatgctgaagcgcatctatcggtccacacctccagaggtgatcgtggaggtgctcgaaccatatgtgcgactcaccacagcaaacgtgcgcatcatcaagaatcggaccggacccatgggccacacgtacggctttatagacttggattctcacgcggaggctctccgcgtggtcaagattcttcagaatttagaccccccgttctccatcgacggcaagatggtggccgtgaatttagccacaggaaagcgtcgtaacgactcaggtgaccacagtgatcatatgcactactatcaaggcaagaagtattttcgcgaccggaggggaggaggtcgaaactccgactggtcctcggataccaaccgtcaaggccaacaatctagttccgactgttacatttatgatagcgcgactgggtactattacgatcctctggccggcacttactatgaccctaatacgcagcaggaggtgtatgtccctcaggatccggggcttcctgaggaggaagagattaaggagaagaagccgaccagccaggggaagtcaagctccaagaaggaaatgagtaaacgggatggcaaggaaaagaaggaccggggggtgactagattccaggaaaacgcgagcgaaggcaaggcaccagcagaggacgtcttcaagaaacctttgcctcctacagttaagaaagaagaaagtcctccaccccctaaagtcgtgaatcctctgataggactgttgggtgagtacggcggagactcagattatgaggaagaggaagaggaagagcagaccccaccaccacaaccacgcaccgcgcaacctcagaagcgtgaagaacaaaccaagaaggagaatgaggaggacaagctgactgactggaacaaactcgcgtgcctgctgtgtagacggcagtttccaaacaaagaggtacttatcaaacaccagcaactgtcagatttgcacaagcagaatctggaaattcacagaaagattaagcagtccgagcaagaactcgcttatctcgaacgccgggaaagggaaggcaagttcaaaggaagaggaaacgatcgccgggaaaagctccagagctttgactcacccgaacgaaaacgcatcaaatactctagggagactgatagtgaccggaaactggtggacaaggaagatatcgatacttcttcaaagggaggctgtgtccagcaggccaccgggtggagaaagggcacgggacttgggtacgggcaccctgggctggcttcttctgaagaggcggagggaagaatgcgcgggccatcggtgggagctagcggaagaactagcaagaggcagtccaacgagacctacagagacgctgtgcgacgcgttatgtttgcaaggtacaaagaacttgattag

SEQ ID NO: 286939 - DNA, 2976 bp, Artificial Sequence
  derived and/or modified sequence
atggactacagaggaggagatggcacctccatggactaccggggccgggaggccccccacatgaactacagagacagagatgcccatgctgtggacttccggggcagagatgcccccccaagtgacttccggggccggggcacctatgacctggacttccggggcagagatggcagccatgctgacttccggggccgggacctgagtgacctggacttccgggcccgggagcagagcagaagtgacttcaggaacagagatgtgtctgacctggacttccgggacaaggatggcacccaggtggacttccggggccggggcagcggcaccacagacctggacttccgggaccgggacaccccccacagcgacttccggggccgccacaggagcaggacagaccaggacttccggggccgggagatgggcagctgcatggagttcaaggaccgggagatgcctcctgtggaccccaacatcctggactacatccagcccagcacccaggaccgggagcacagcggcatgaatgtgaacagaagagaggagagcacccatgaccacaccatcgagaggcctgccttcggcatccagaagggggagtttgagcacagcgagacccgggagggggagacccagggcgtggcctttgaacatgagagccctgctgacttccagaacagccagagccctgtgcaggaccaggacaagagccagctgagcggccgggaggagcagagcagtgatgctggcctcttcaaggaggagggcggcctggacttcctgggccggcaggacacagactaccgctccatggagtacagagatgtggaccaccggctgcccggcagccagatgtttggctacggccagagcaagagcttccctgagggcaagacagccagagatgcccagagggacctgcaggaccaggactacagaacaggccccagcgaggagaagcccagccgcctcatccggctgtctggagtgcctgaagatgccaccaaggaggagatcctgaatgccttccgcaccccagatggcatgcctgtgaagaacctgcagctgaaggagtacaacacaggctatgactatggctacgtgtgtgtggagttcagcctgctggaggatgccatcggctgcatggaggccaaccagggcaccctgatgatccaggacaaggaggtgaccctggagtatgtgagcagcctggacttctggtactgcaagcgctgcaaggccaacattggaggccacaggagcagctgcagcttctgcaagaacccccgggaggtgacagaggccaagcaggagctgatcacctacccccagccccagaagaccagcatcccagcccccctggagaagcagcccaaccagcccctgcggcctgctgacaaggagcctgagcccaggaagcgggaggagggccaggagagccggctgggccaccagaagcgggaggccgagcgctacctgccccccagccggcgggagggccccaccttcagaagagaccgggagcgggagagctggagcggggagacccggcaggatggagagagcaagaccatcatgctgaagaggatctaccgcagcaccccacctgaggtgattgtggaggtgctggagccctacgtgcggctgaccacagccaacgtgcgcatcatcaagaacagaacaggccccatgggccacacctacggcttcatcgacctggacagccacgccgaggccctgcgggtggtgaagatcctgcagaacctggacccccccttcagcattgatggcaagatggtggccgtgaacctggccaccgggaagagaagaaatgacagcggggaccacagcgaccacatgcactactaccagggcaagaagtacttccgggacagaagaggaggcggcaggaacagcgactggagcagtgacaccaaccggcagggccagcagagcagcagtgactgctacatctatgacagcgccaccggctactactatgaccccctggccggcacctactatgaccccaacacccagcaggaggtgtatgtgccccaggaccccggcctgcctgaggaggaggagatcaaggagaagaagcccaccagccagggcaagagcagcagcaagaaggagatgagcaagagagatggcaaggagaagaaggacagaggagtgacccgcttccaggagaatgccagcgagggcaaggccccagcagaagatgtgttcaagaagcccctgcccccaacagtgaagaaggaggagagccccccaccacccaaggtggtgaaccccctcatcggcctgctgggggagtatggaggagacagcgactatgaggaggaggaggaggaggagcagaccccaccaccccagcccaggacagcccagccccagaagcgggaggagcagaccaagaaggaaaatgaggaggacaagctgacagactggaacaagctggcctgcctgctgtgccggcggcagttccccaacaaggaggtgctgatcaagcaccagcagctgagtgacctgcacaagcagaacctggagatccacaggaagatcaagcagagcgagcaggagctggcctacctggagcggcgggagcgggagggcaagttcaagggcagaggaaatgaccggcgggagaagctgcagagctttgacagccctgagaggaagaggatcaagtacagccgggagacagacagcgacaggaagctggtggacaaggaggacatcgacaccagcagcaagggcggctgtgtgcagcaggccaccggctggaggaagggcaccggcctgggctacggccaccctggcctggccagcagcgaggaggccgagggccgcatgaggggccccagcgtgggcgccagcggccgcaccagcaagaggcagagcaatgagacctacagagatgctgtgcggcgggtgatgtttgcccgctacaaggagctggactag

SEQ ID NO: 286940 - DNA, 2976 bp, Artificial Sequence
  derived and/or modified sequence
atggactaccggggcggcgacggcaccagcatggactaccggggccgtgaagcccctcatatgaactatcgggaccgcgatgctcatgctgtggattttcgggggcgggacgctcctccgtcagattttagaggaagggggacctatgacctagacttccgtggccgcgacgggtcccacgctgatttccgaggtcgcgacctatccgacctcgacttccgcgcccgcgaacaaagcaggagcgacttcagaaaccgggacgtttcagacttagattttagagacaaggacgggacccaggtggactttagaggtcggggttcgggtacgaccgatctcgacttccgcgacagggacacaccacattctgatttccggggcagacatcgaagcagaaccgatcaggacttcagaggccgcgaaatgggatcttgcatggaatttaaggaccgcgagatgcccccagtggacccgaatatcctggactatatacaacccagtacccaggatcgtgaacactcaggaatgaatgtgaataggcgggaggagagcactcacgaccataccatcgagcgcccggccttcggtatccagaaaggagagtttgagcactctgagacgagggaaggagagacacagggagtggcgttcgaacacgagtctccggctgatttccagaatagccagtccccggtgcaggaccaggacaaaagccaactaagcgggagagaggaacagtcttcagacgcagggctctttaaagaggagggaggcctggactttctaggcaggcaggacactgactaccgctctatggagtatcgcgatgtagaccatagactgccagggtctcagatgtttggatacggtcaatcaaaatcatttcctgagggcaagacagctcgggacgctcagagggatcttcaggatcaggattatagaacaggcccatctgaggagaagccaagtcggctgatcagattgtcaggggtacccgaagacgcaaccaaggaggagatcctgaatgcattccgcacaccagacgggatgccggtaaagaacctacagctgaaagagtataatacggggtatgactatggctacgtctgcgtggagttcagcctgctcgaagatgccatcggatgcatggaagccaaccagggtaccctcatgatccaggacaaagaggtcaccttggaatacgtttcctcattagatttctggtactgtaagcgatgtaaagctaacatcggaggccataggtcgtcatgcagcttctgcaagaacccccgggaggtgaccgaggcaaaacaagaactcatcacgtatccccagccgcagaagacatcaatacccgcccctctggaaaagcagcccaatcagccattgagaccggccgacaaagagcccgagccaaggaagcgggaagaagggcaagagagccgcctgggccaccagaaacgagaggccgagaggtatttgcccccatcaaggagggaagggccaaccttcaggcgtgatcgagagcgcgaatcttggagcggggagactagacaggacggagaatccaagaccatcatgcttaagcgcatttacagatctacacctcctgaagtcatcgtggaggtgttggaaccttacgtcagactgacaactgcaaacgtgagaattataaagaataggaccgggcccatgggccacacctatggcttcattgaccttgacagccatgcggaggcactgagagtggtcaaaattttacagaacctggaccctcctttctccatagatggaaaaatggtcgctgtgaacctggctactgggaaaaggcgcaatgattcaggggaccacagtgatcacatgcactactaccaggggaagaaatacttccgcgacagaagaggcggaggcaggaattccgattggtctagtgacaccaaccgccaaggtcagcagagctcctccgattgttatatctatgacagcgccactggttattactatgacccccttgccggcacctattacgaccccaatacgcagcaggaggtgtatgtcccacaggaccctggcctgcctgaggaagaagaaatcaaggagaaaaagccgacctctcagggcaaatcctcatctaaaaaggagatgagcaagcgggacgggaaggaaaaaaaggaccgcggagtcacccgatttcaggagaacgcatcagagggcaaggctccggctgaggacgtttttaagaaaccactgcccccaaccgtcaagaaggaggagagtccacccccaccaaaggtggtaaacccgctcataggactgcttggagaatacggaggagactctgattacgaagaggaggaggaggaagaacagaccccaccgcctcaacctcggacagcacaacctcaaaagagagaagagcagacgaagaaagaaaacgaagaggataagcttacagactggaataagctggcatgtttgctttgtcggcgccagtttccgaataaggaagtcctgatcaaacatcagcagctcagtgatttgcacaagcaaaatctagagattcatcgaaagatcaaacaaagcgaacaagagctagcttatctggaacgtcgggaaagggagggcaaattcaagggccgagggaacgaccgccgggaaaagctgcagagtttcgattctcctgagagaaaacgaataaagtactcaagagagactgactcagatcgaaaactggttgacaaggaggacattgatacttcgagtaaggggggctgtgtccaacaagctactgggtggcgcaagggcaccggactcggttatggccatcccggcctcgctagctccgaagaggccgaaggcaggatgcggggtccatctgtgggcgcctccggacgcacgagtaaaaggcaatccaatgaaacatacagagacgccgttcggagagtcatgttcgccagatacaaagagctagactag

SEQ ID NO: 286941 - DNA, 2976 bp, Artificial Sequence
  derived and/or modified sequence
atggattaccgaggtggcgatggtacgagtatggactaccgcggaagagaggctccgcatatgaactaccgggatagagacgcccacgccgtggatttccgaggacgagatgccccaccatctgattttcgagggagagggacatacgatctcgatttccggggacgcgacgggtcacatgcggacttcaggggacgagatctgtcagatctggacttcagggcccgtgagcagagccgatccgactttcgtaatagagacgtgtcggacttggattttagggataaggatggtactcaagtagacttccgcggaagggggtcagggacaaccgatctagattttcgggatcgggacacaccccactcagacttcagagggcgtcatcgatcacggaccgatcaggactttcggggtagagagatgggctcctgcatggaattcaaagatcgtgagatgccccctgtggaccccaatattctggattacatacaaccttcaacccaggaccgggagcactccggaatgaacgttaaccgacgcgaagaatctacacatgatcatacaatcgaaaggcccgctttcggtatccagaagggggaatttgagcactccgaaactcgcgaaggagaaactcaaggtgtagcttttgagcacgagagtcctgccgacttccagaactcacagtcaccagttcaagaccaggacaaatcccaattatccggtagagaagaacaatctagtgacgcagggctcttcaaagaagagggcggtttggacttcttgggacggcaggacaccgattatagaagcatggagtatagagatgtggatcatagactccctggctctcagatgtttggctatggccaaagcaagagcttcccagagggaaagacagctagagacgcccagcgggacttgcaggaccaggactatcggacgggaccttcagaagagaagcccagcaggctaatccgcctgagcggggtgccggaagacgctacaaaagaagagatactcaacgcattcagaaccccagacggtatgccagttaaaaacttgcagttgaaggaatataacactgggtatgattacggctacgtttgtgtggagttctctctccttgaggacgcaataggttgtatggaggcaaatcagggtactctgatgatccaggacaaggaggtgacgcttgagtatgtgtcctcgctcgatttctggtattgtaaaaggtgcaaagccaatatcgggggacaccgttcatcttgctcattctgtaaaaatccacgagaggtaaccgaagccaagcaggagctgatcacataccctcaaccacaaaaaacatctatccccgctcctctggagaaacaacccaatcagcctctgcgtccagcagataaagaacctgagccacggaaaagggaagaaggtcaagagtctcgcctggggcatcagaaacgggaggccgagcggtacctacctccttccaggcgcgaaggaccaacattcagaagggaccgtgaacgcgaaagctggagcggggaaaccagacaagatggggaatctaaaaccatcatgctgaaacggatttatagaagcactcccccagaagtgatcgtggaggtgctagagccttatgtgcgtctcactacagcaaatgtacgtattattaagaatcgcaccggaccgatgggccatacatatggttttattgacctggactcccatgccgaggccctccgcgtggtgaagattctacagaacctggacccaccctttagcatcgatgggaagatggtggccgtaaacttggccaccggcaaaagacgcaatgactccggggatcattccgatcacatgcactactaccagggaaaaaagtacttccgtgataggcgaggcggtggaagaaacagcgattggtctagcgacaccaacagacagggtcaacagagcagctctgactgttatatttacgactctgcgactggatactattatgatcctctagcaggcacatactacgatcctaatacacagcaggaggtatacgtcccacaggatcccggactgcctgaggaggaggaaatcaaagaaaagaagccaaccagtcagggcaagtccagtagtaagaaggaaatgagcaagagggacggcaaagagaagaaggaccgtggagtgacccggttccaggagaacgctagcgagggcaaggctccggctgaggatgtttttaagaagcctctccctccaactgtcaagaaagaagaatctccacctccaccaaaggtcgtgaaccctcttatcggcctcttgggagagtacgggggagactcagattacgaagaggaggaggaggaagagcagactcctcccccacaaccccgaactgcccaaccccagaagagagaggaacagaccaagaaagaaaacgaggaggacaagttgaccgattggaacaaattggcctgcctcctgtgcagaaggcagtttcccaataaggaggtgctgattaagcaccagcagctcagtgaccttcataagcaaaatctggaaatccataggaaaattaagcagtcagagcaggagctggcctatctggaacgcagggagcgggagggtaagtttaaaggtcgcggtaatgatagacgtgaaaagcttcagagcttcgactccccagaaagaaagagaatcaaatacagccgcgagacagactctgaccgaaaattagtggacaaagaggatatcgataccagtagtaagggtggttgtgtgcagcaggccacaggatggagaaagggcacgggcctgggatacggccatcccggactggctagttcagaagaggctgagggacgcatgagagggccatcagtcggcgctagcggacggacgagcaaacggcagtcaaatgagacgtaccgcgacgccgtgcgaagagttatgtttgcgcgatataaggaactggattag

SEQ ID NO: 286942 - DNA, 2976 bp, Artificial Sequence
  derived and/or modified sequence
atggactacagaggcggcgacggcaccagcatggactacagaggcagagaggccccccacatgaactacagagacagagacgcccacgccgtggacttcagaggcagagacgccccccccagcgacttcagaggcagaggcacctacgacctggacttcagaggcagagacggcagccacgccgacttcagaggcagagacctgagcgacctggacttcagagccagagagcagagcagaagcgacttcagaaacagagacgtgagcgacctggacttcagagacaaggacggcacccaggtggacttcagaggcagaggcagcggcaccaccgacctggacttcagagacagagacaccccccacagcgacttcagaggcagacacagaagcagaaccgaccaggacttcagaggcagagagatgggcagctgcatggagttcaaggacagagagatgccccccgtggaccccaacatcctggactacatccagcccagcacccaggacagagagcacagcggcatgaacgtgaacagaagagaggagagcacccacgaccacaccatcgagagacccgccttcggcatccagaagggcgagttcgagcacagcgagaccagagagggcgagacccagggcgtggccttcgagcacgagagccccgccgacttccagaacagccagagccccgtgcaggaccaggacaagagccagctgagcggcagagaggagcagagcagcgacgccggcctgttcaaggaggagggcggcctggacttcctgggcagacaggacaccgactacagaagcatggagtacagagacgtggaccacagactgcccggcagccagatgttcggctacggccagagcaagagcttccccgagggcaagaccgccagagacgcccagagagacctgcaggaccaggactacagaaccggccccagcgaggagaagcccagcagactgatcagactgagcggcgtgcccgaggacgccaccaaggaggagatcctgaacgccttcagaacccccgacggcatgcccgtgaagaacctgcagctgaaggagtacaacaccggctacgactacggctacgtgtgcgtggagttcagcctgctggaggacgccatcggctgcatggaggccaaccagggcaccctgatgatccaggacaaggaggtgaccctggagtacgtgagcagcctggacttctggtactgcaagagatgcaaggccaacatcggcggccacagaagcagctgcagcttctgcaagaaccccagagaggtgaccgaggccaagcaggagctgatcacctacccccagccccagaagaccagcatccccgcccccctggagaagcagcccaaccagcccctgagacccgccgacaaggagcccgagcccagaaagagagaggagggccaggagagcagactgggccaccagaagagagaggccgagagatacctgccccccagcagaagagagggccccaccttcagaagagacagagagagagagagctggagcggcgagaccagacaggacggcgagagcaagaccatcatgctgaagagaatctacagaagcaccccccccgaggtgatcgtggaggtgctggagccctacgtgagactgaccaccgccaacgtgagaatcatcaagaacagaaccggccccatgggccacacctacggcttcatcgacctggacagccacgccgaggccctgagagtggtgaagatcctgcagaacctggacccccccttcagcatcgacggcaagatggtggccgtgaacctggccaccggcaagagaagaaacgacagcggcgaccacagcgaccacatgcactactaccagggcaagaagtacttcagagacagaagaggcggcggcagaaacagcgactggagcagcgacaccaacagacagggccagcagagcagcagcgactgctacatctacgacagcgccaccggctactactacgaccccctggccggcacctactacgaccccaacacccagcaggaggtgtacgtgccccaggaccccggcctgcccgaggaggaggagatcaaggagaagaagcccaccagccagggcaagagcagcagcaagaaggagatgagcaagagagacggcaaggagaagaaggacagaggcgtgaccagattccaggagaacgccagcgagggcaaggcccccgccgaggacgtgttcaagaagcccctgccccccaccgtgaagaaggaggagagcccccccccccccaaggtggtgaaccccctgatcggcctgctgggcgagtacggcggcgacagcgactacgaggaggaggaggaggaggagcagaccccccccccccagcccagaaccgcccagccccagaagagagaggagcagaccaagaaggagaacgaggaggacaagctgaccgactggaacaagctggcctgcctgctgtgcagaagacagttccccaacaaggaggtgctgatcaagcaccagcagctgagcgacctgcacaagcagaacctggagatccacagaaagatcaagcagagcgagcaggagctggcctacctggagagaagagagagagagggcaagttcaagggcagaggcaacgacagaagagagaagctgcagagcttcgacagccccgagagaaagagaatcaagtacagcagagagaccgacagcgacagaaagctggtggacaaggaggacatcgacaccagcagcaagggcggctgcgtgcagcaggccaccggctggagaaagggcaccggcctgggctacggccaccccggcctggccagcagcgaggaggccgagggcagaatgagaggccccagcgtgggcgccagcggcagaaccagcaagagacagagcaacgagacctacagagacgccgtgagaagagtgatgttcgccagatacaaggagctggactag

SEQ ID NO: 286943 - protein, 143 aa, Artificial Sequence
  derived and/or modified sequence
MGSDKRVSRTERSGRYGSIIDRDDRDERESRSRRRDSDYKRSSDDRRGDRYDDYRDYDSPERERERRNSDRSEDGYHSDGDYGEHDYRHDISDERESKTIMLRGLPITITESDIREMMESFEGPQPADVRLMKRKTGESLLSS

SEQ ID NO: 286944 - protein, 137 aa, Artificial Sequence
  derived and/or modified sequence
MGSDKRVSRTERSGRYGSIIDRDDRDERESRSRRRDSDYKRSSDDRRGDRYDDYRDYDSPERERERRNSDRSEDGYHSDGDYGEHDYRHDISDERESKTIMLRGLPITITESDIREMMESFEGPQPADVRLMKRKTG

SEQ ID NO: 286945 - protein, 126 aa, Artificial Sequence
  derived and/or modified sequence
MGSDKRVSRTERSGRYGSIIDRDDRDERESRSRRRDSDYKRSSDDRRGDRYDDYRDYDSPENDKYSRNDGVLRRPSACGCEADEEENRCKPWFRLRGVLSLARCYQLDGSQSEKVGDSRKAHCNAL

SEQ ID NO: 286946 - protein, 505 aa, Artificial Sequence
  derived and/or modified sequence
NGFRSGERDLVLSDGNRVSAFSVASTAIAAAQWSSTQSQSGEGGSVDYSYLQPGQDGYAQYAQYSQDYQQFYQQQAGGLESDASSASGTAVTTTSAAVVSQSPQLYNQTSNPPGSPTEEAQPSTSTSTQAPAASPTGVVPGTKYAVPDTSTYQYDESSGYYYDPTTGLYYDPNSQYYYNSLTQQYLYWDGEKETYVPAAESSSHQQSGLPPAKEGKEKKEKPKSKTAQQIAKDMERWAKSLNKQKENFKNSFQPVNSLREEERRESAAADAGFALFEKKGALAERQQLIPELVRNGDEENPLKRGLVAAYSGDSDNEEELVERLESEEEKLADWKKMACLLCRRQFPNKDALVRHQQLSDLHKQNMDIYRRSRLSEQELEALELREREMKYRDRAAERREKYGIPEPPEPKRKKQFDAGTVNYEQPTKDGIDHSNIGNKMLQAMGWREGSGLGRKCQGITAPIEAQVRLKGAGLGAKGSAYGLSGADSYKDAVRKAMFARFTEME

SEQ ID NO: 286947 - DNA, 2017 bp, Artificial Sequence
  derived and/or modified sequence
aatggtttcagatcaggagaaagagacttggtcctctcagatggtaaccgcgtcagcgctttctctgtagctagtacggctattgctgctgctcagtggtcatccacccagtctcaaagtggtgaaggaggcagtgttgactacagttatctgcaaccaggtcaagatggctatgcccaatatgctcagtattcacaggattatcagcagttttatcaacaacaagctggaggattggaatctgatgcatcatctgcatcaggcacagcagtgaccaccacctcagcggctgtagtgtcccagagtcctcagctgtataatcaaacctccaatccacctggctctccgactgaggaagcacagcctagcactagcacaagtacacaggccccagccgcttcccctactggtgtagttcctggtaccaaatatgcagtacctgacacgtccacttaccagtatgatgaatcttcaggatattactatgatccgacaacagggctctattatgaccccaactcgcaatactactataattccttgacccagcagtacctttactgggatggggaaaaagagacctacgtgccagctgcagagtctagctcccaccagcagtcgggcctgcctcctgcaaaagaggggaaagagaagaaggagaaacccaagagcaaaacagcccagcagattgccaaagacatggaacgctgggctaagagtttgaataagcagaaagaaaactttaaaaatagctttcagcctgtcaattccttgagggaagaagaaaggagagaatctgctgcagcagacgctggctttgctctctttgagaagaagggagccttagctgaaaggcagcagctcatcccagaattggtgcgaaatggagatgaggagaatcccctcaaaaggggtctggttgctgcttacagtggtgacagtgacaatgaggaggagctggtggagagacttgagagtgaggaagagaagctagctgactggaagaagatggcctgtctgctctgccggcgccagttcccgaacaaagatgccctagtcaggcaccagcaactctcagaccttcacaagcaaaacatggacatctatcgacgatccaggctgagcgagcaggagctggaagccttggagctaagggagagagagatgaaataccgagaccgagctgcagaaagacgggagaagtacggcattccagaacctccagagcccaagcgcaagaagcagtttgatgccggcactgtgaattacgagcaacccaccaaagatggcattgaccacagtaacattggcaacaagatgctgcaggccatgggctggcgggaaggctctggcttgggacgaaagtgtcaaggcattacggctcccattgaggctcaagttcggctaaagggagctggcctaggagccaaaggcagcgcatatggtttgtcgggcgccgattcctacaaagatgctgtccggaaagccatgtttgcccggttcactgagatggagtgagagagagagagagagagagatgacaaggagcacaagaagtggtccatctcccgaattcgctgttaccgcctgtctctttaagggcatgccttgtgctgttaatagatcttagggtgaaccacttcattctgcagggttctccctcccaccttaaagaagttccccttatgtgggttgcctggtgaatggccttccttcccgccagagggcttgtgaacagaccggagaggacagtggattgtttatactccagtgtacatagtgtaatgtagcgtgtttacatgtgtagcctatgttgtggtccatcagcccctcacattcctaggggtttgagatgctgtaggtggtatgtgacaccaaagccacctctgtcatttgttgtgatgtcttttcttggcaaaagccttgtgtatatttgtatattacacatttgtacagaattttggaagattttcagtctagttgccaaatctggctcctttacaaaagaaataccttg

SEQ ID NO: 286948 - DNA, 1518 bp, Artificial Sequence
  derived and/or modified sequence
aatggctttcggagcggcgaacgcgacctggtcttgtccgacggtaatagagtctccgctttctctgtcgcttccactgcgatcgcggcagcccagtggtcttctacgcaatcccaatctggtgaaggaggctccgtcgactatagttatctgcagcccgggcaggacggatacgcacaatacgctcaatattctcaggactaccaacagttctaccagcagcaggcgggcggcttggaatctgatgcgagctccgcgtcaggcactgcggttactaccacctcagcagccgtcgtatcccagtctccgcagctatataatcaaacatctaacccgccagggagtcccacagaagaagcacaaccctcgacgagcactagcacccaagcaccagccgcctctcccacaggggttgtcccaggaacaaaatacgcagtgccagatacttccacttatcagtacgatgaaagttctgggtactactatgaccctaccacaggcctgtactacgatccaaactcccaatactactacaatagtcttacacagcagtatctgtattgggacggtgagaaggaaacatatgttcctgccgctgagtcttcttcacaccagcagtccggtctgccccctgctaaggaggggaaagaaaagaaagaaaaacctaaaagtaagaccgcccagcagattgccaaggacatggaaaggtgggcaaagtccctcaataaacagaaggaaaatttcaaaaatagcttccagcctgtcaactccttgcgggaagaggagcgtcgcgaatccgcagcagcagatgctgggtttgcattgttcgagaagaaaggcgccctggccgagaggcagcaactcatacctgaactagtgcgtaacggggacgaagagaacccattaaagagagggctggtggctgcctacagtggcgacagtgataatgaggaagaattagtggagcggttggaaagcgaggaagagaaactcgctgactggaaaaagatggcctgcctgttatgtcggagacaattccccaataaggatgccctagtccgccatcagcagttgagcgatctacacaagcagaatatggatatttataggcgatcgagacttagcgaacaggagcttgaagctctcgagttaagggaaagggagatgaaatatcgcgaccgcgctgctgaacggcgggagaagtatggcatccctgaacctcccgaacccaagcgcaagaaacagttcgacgccgggaccgtcaactacgaacagcccaccaaggacggcatcgatcacagcaacataggaaataaaatgctgcaggccatggggtggcgcgagggttccggactgggtcgaaaatgtcagggcattactgcaccaatcgaggctcaggttcgcctaaagggagcagggctgggagctaaaggctctgcttacggtctgtctggtgcagacagctacaaggatgctgtgcggaaagccatgtttgcccgattcacagagatggaatag

SEQ ID NO: 286949 - DNA, 1518 bp, Artificial Sequence
  derived and/or modified sequence
aatggcttccgctctggagagcgggacctggtgctgagtgatggcaacagagtgtctgccttctctgtggccagcacagccatcgccgccgcccagtggagcagcacccagagccagagcggggagggcggctctgtggactacagctacctgcagcccggccaggacggctacgcccagtatgcccagtacagccaggactaccagcagttctaccagcagcaggccggcggcctggagagtgatgccagcagcgccagcggcacagctgtgaccaccaccagcgctgctgtggtgtcccagagcccccagctgtacaaccagaccagcaaccccccaggcagccccacagaggaggcccagcccagcaccagcaccagcacccaggccccagctgccagccccaccggggtggtgcccggcaccaagtatgctgtgcctgacaccagcacctaccagtatgatgagagcagcggctactactatgaccccaccaccggcctgtactatgaccccaacagccagtactactacaacagcctgacccagcagtacctgtactgggatggagagaaggagacctacgtgcctgctgctgagagcagcagccaccagcagagcggcctgcccccagccaaggagggcaaggagaagaaggagaagcccaagagcaagacagcccagcagatcgccaaggacatggagcgctgggccaagagcctgaacaagcagaaggagaacttcaagaacagcttccagcctgtgaacagcctgcgggaggaggagcggcgggagagcgctgctgctgatgctggctttgccctgtttgagaagaagggggccctggccgagcggcagcagctgatccctgagctggtgagaaatggagatgaggagaaccccctgaagaggggcctggtggccgcctacagcggggacagcgacaatgaggaggagctggtggagcggctggagagcgaggaggagaagctggccgactggaagaagatggcctgcctgctgtgccggcggcagttccccaacaaggatgccctggtgcgccaccagcagctgagtgacctgcacaagcagaacatggacatctaccgccgcagccggctgtctgagcaggagctggaggccctggagctgcgggagcgggagatgaagtacagagacagagctgctgagcggcgggagaagtatggcatccctgagcccccagagcccaagaggaagaagcagtttgatgctggcaccgtgaactatgagcagcccaccaaggatggcatcgaccacagcaacatcggcaacaagatgctgcaggccatgggctggagggagggcagcggcctgggcaggaagtgccagggcatcacagcccccatcgaggcccaggtgcggctgaagggggccggcctgggcgccaagggcagcgcctacggcctgagcggggctgacagctacaaggatgctgtgaggaaggccatgtttgcccgcttcacagagatggagtag

SEQ ID NO: 286950 - DNA, 1518 bp, Artificial Sequence
  derived and/or modified sequence
aacggcttccggagcggcgagcgggacctggtgctgagcgacggcaacagagtgagcgctttctcagtggctagtaccgctatcgcagcagcccaatggagtagcacacaatcgcagagtggcgaaggtggctccgtcgactattcttatctgcaacctggtcaggatggatacgcacagtacgcacagtattctcaagattatcagcagttctaccagcagcaggccggtggactggagtcggacgcttcttctgctagtggcaccgcagtcactacaacttctgcagcagtcgtgagccagagccctcagttatataatcagacatccaaccctccgggcagcccaacagaggaggcccagcctagtacatcaaccagcactcaggccccagccgcctctccaacaggtgtggtgcctggaactaaatacgccgtccccgatacttctacatatcagtacgatgaatcttctggctactattacgatccaaccaccggcctgtattacgatcctaattcccagtactattacaattccctgactcagcaatacctgtattgggacggcgagaaagagacttatgtaccagctgctgagtcatcctcgcaccagcagtcaggcctcccgcctgcaaaggaagggaaggaaaaaaaagaaaaacctaagagcaaaactgcccagcagatcgcaaaggacatggaaagatgggccaagagcctgaataaacagaaggaaaactttaagaattcttttcaacccgtgaattctcttcgtgaggaggaaaggcgcgaaagcgccgcagccgacgccggctttgccttgtttgaaaaaaaaggtgctctggctgagcgtcaacaattgattcccgagctggttaggaatggcgatgaggagaacccactgaagcggggcctggtcgcagcatactccggcgatagtgacaatgaggaagagctggtggaacggttggagtctgaggaggagaaactggcagactggaagaaaatggcatgcctcctgtgtcgtcgccagttccctaacaaagacgccctggtgcgccatcaacagttgagcgaccttcataagcagaacatggacatttatcgcagaagtaggttaagcgagcaggaactcgaagccctcgaactgagggagagggagatgaagtatagggatagagccgcagagagacgggagaagtatggtatccccgagccccctgagcctaagcgcaagaagcagttcgatgccggaacagtcaactatgagcaaccgaccaaggacgggatcgatcacagtaatatcggtaacaagatgcttcaggctatgggctggcgcgagggtagtggcctggggaggaaatgtcaagggatcacggcccccatcgaagcccaggtgcgcctcaaaggcgccggtctcggcgctaaaggctctgcctatggcctttccggcgctgatagctacaaggatgcagtgcggaaggctatgttcgcaagatttactgagatggagtag

SEQ ID NO: 286951 - DNA, 1518 bp, Artificial Sequence
  derived and/or modified sequence
aacgggttccgtagcggagagagggatctagtgctctcggatggaaaccgcgtatccgcgtttagtgtggcgtctactgccattgccgctgcccagtggtcttcaacccagtcacagtccggagaaggtggcagtgtcgattacagttatctccaacctgggcaagatggctatgcacagtatgcgcagtactctcaagattaccagcagttctatcagcagcaagctggtgggctggagtctgacgcaagcagcgcgtcaggcacagcggtcacaacgacaagtgccgcagtggtcagccagagcccacagctttataaccagaccagcaatccccctggctcaccaacagaagaagctcaaccaagcacaagcacctccacacaggccccagccgctagcccaactggagtggtgccagggactaagtacgcagtccctgacacctccacctaccagtacgatgagtcttccggatattactatgatcctacaacagggctgtattatgatcctaattcccaatattattataacagcctgactcaacagtacctgtactgggatggggaaaaagagacatacgtccccgctgcggagtcgtcttcacatcagcagtctggattaccacccgcaaaggaagggaaagagaagaaagaaaaacccaagtcaaagacagcccagcagatagcaaaggacatggaacgctgggctaaaagccttaataaacagaaggaaaacttcaagaatagttttcaacccgtaaactcgcttcgggaggaagaacgcagggaaagtgcggctgctgatgcaggatttgccctgttcgagaagaaaggggctttggccgaaagacagcagctcatcccagagctggtacgcaacggggacgaagagaatcccctgaaacgcggattagttgccgcatactctggcgacagcgataacgaggaggagcttgtggaaagattggaatcagaagaagagaagctggccgattggaagaagatggcttgcctactgtgtcggcgtcaatttcctaataaggacgctttagtccgtcaccaacagctgtccgacctacacaagcagaacatggacatatatcggcgaagtcgcctttccgaacaagagctcgaagctttggaactcagagagcgcgagatgaaatatagagaccgcgctgccgaacgtagagagaaatatggtatcccagagccccctgaaccaaaaagaaagaaacagttcgacgccggaacggttaattacgaacagcccacaaaggatggaatcgaccattccaatattggcaacaagatgctccaggcaatgggatggagagaggggtctgggctcggtaggaagtgtcaagggatcaccgctccaattgaggcccaggtgaggctgaaaggggctggtttaggagcaaagggttctgcatacgggctgtcaggagccgatagttataaggatgctgtaagaaaagcgatgttcgcgcgttttacggaaatggagtag

SEQ ID NO: 286952 - DNA, 1518 bp, Artificial Sequence
  derived and/or modified sequence
aacggcttcagaagcggcgagagagacctggtgctgagcgacggcaacagagtgagcgccttcagcgtggccagcaccgccatcgccgccgcccagtggagcagcacccagagccagagcggcgagggcggcagcgtggactacagctacctgcagcccggccaggacggctacgcccagtacgcccagtacagccaggactaccagcagttctaccagcagcaggccggcggcctggagagcgacgccagcagcgccagcggcaccgccgtgaccaccaccagcgccgccgtggtgagccagagcccccagctgtacaaccagaccagcaacccccccggcagccccaccgaggaggcccagcccagcaccagcaccagcacccaggcccccgccgccagccccaccggcgtggtgcccggcaccaagtacgccgtgcccgacaccagcacctaccagtacgacgagagcagcggctactactacgaccccaccaccggcctgtactacgaccccaacagccagtactactacaacagcctgacccagcagtacctgtactgggacggcgagaaggagacctacgtgcccgccgccgagagcagcagccaccagcagagcggcctgccccccgccaaggagggcaaggagaagaaggagaagcccaagagcaagaccgcccagcagatcgccaaggacatggagagatgggccaagagcctgaacaagcagaaggagaacttcaagaacagcttccagcccgtgaacagcctgagagaggaggagagaagagagagcgccgccgccgacgccggcttcgccctgttcgagaagaagggcgccctggccgagagacagcagctgatccccgagctggtgagaaacggcgacgaggagaaccccctgaagagaggcctggtggccgcctacagcggcgacagcgacaacgaggaggagctggtggagagactggagagcgaggaggagaagctggccgactggaagaagatggcctgcctgctgtgcagaagacagttccccaacaaggacgccctggtgagacaccagcagctgagcgacctgcacaagcagaacatggacatctacagaagaagcagactgagcgagcaggagctggaggccctggagctgagagagagagagatgaagtacagagacagagccgccgagagaagagagaagtacggcatccccgagccccccgagcccaagagaaagaagcagttcgacgccggcaccgtgaactacgagcagcccaccaaggacggcatcgaccacagcaacatcggcaacaagatgctgcaggccatgggctggagagagggcagcggcctgggcagaaagtgccagggcatcaccgcccccatcgaggcccaggtgagactgaagggcgccggcctgggcgccaagggcagcgcctacggcctgagcggcgccgacagctacaaggacgccgtgagaaaggccatgttcgccagattcaccgagatggagtag

SEQ ID NO: 286953 - protein, 1224 aa, Artificial Sequence
  derived and/or modified sequence
MEPLLLGRGLIVYLMFLLLKFSKAIEIPSSVQQVPTIIKQSKVQVAFPFDEYFQIECEAKGNPEPTFSWTKDGNPFYFTDHRIIPSNNSGTFRIPNEGHISHFQGKYRCFASNKLGIAMSEEIEFIVPSVPKFPKEKIDPLEVEEGDPIVLPCNPPKGLPPLHIYWMNIELEHIEQDERVYMSQKGDLYFANVEEKDSRNDYCCFAAFPRLRTIVQKMPMKLTVNSLKHANDSSSSTEIGSKANSIKQRKPKLLLPPTESGSESSITILKGEILLLECFAEGLPTPQVDWNKIGGDLPKGRETKENYGKTLKIENVSYQDKGNYRCTASNFLGTATHDFHVIVEEPPRWTKKPQSAVYSTGSNGILLCEAEGEPQPTIKWRVNGSPVDNHPFAGDVVFPREISFTNLQPNHTAVYQCEASNVHGTILANANIDVVDVRPLIQTKDGENYATVVGYSAFLHCEFFASPEAVVSWQKVEEVKPLEGRRYHIYENGTLQINRTTEEDAGSYSCWVENAIGKTAVTANLDIRNATKLRVSPKNPRIPKLHMLELHCESKCDSHLKHSLKLSWSKDGEAFEINGTEDGRIIIDGANLTISNVTLEDQGIYCCSAHTALDSAADITQVTVLDVPDPPENLHLSERQNRSVRLTWEAGADHNSNISEYIVEFEGNKEEPGRWEELTRVQGKKTTVILPLAPFVRYQFRVIAVNEVGRSQPSQPSDHHETPPAAPDRNPQNIRVQASQPKEMIIKWEPLKSMEQNGPGLEYRVTWKPQGAPVEWEEETVTNHTLRVMTPAVYAPYDVKVQAINQLGSGPDPQSVTLYSGEDYPDTAPVIHGVDVINSTLVKVTWSTVPKDRVHGRLKGYQINWWKTKSLLDGRTHPKEVNILRFSGQRNSGMVPSLDAFSEFHLTVLAYNSKGAGPESEPYIFQTPEGVPEQPTFLKVIKVDKDTATLSWGLPKKLNGNLTGYLLQYQIINDTYEIGELNDINITTPSKPSWHLSNLNATTKYKFYLRACTSQGCGKPITEESSTLGEGSKGIGKISGVNLTQKTHPIEVFEPGAEHIVRLMTKNWGDNDSIFQDVIETRGREYAGLYDDISTQGWFIGLMCAIALLTLLLLTVCFVKRNRGGKYSVKEKEDLHPDPEIQSVKDETFGEYSDSDEKPLKGSLRSLNRDMQPTESADSLVEYGEGDHGLFSEDGSFIGAYAGSKEKGSVESNGSSTATFPLRA

SEQ ID NO: 286954 - protein, 66 aa, Artificial Sequence
  derived and/or modified sequence
MEPLLLGRGLIVYLMFLLLKFSKAIEIPSSVQQVPTIIKQSKVQVAFPFDEYFQIECEAKGNPEPT

SEQ ID NO: 286955 - protein, 85 aa, Artificial Sequence
  derived and/or modified sequence
MEPLLLGRGLIVYLMFLLLKFSKAIEIPSSVQQVPTIIKQSKVQVAFPFDEYFQIECEAKGNPEPTFSWTKDGNPFYFTDHRIIP

SEQ ID NO: 286956 - DNA, 3675 bp, Artificial Sequence
  derived and/or modified sequence
atggagcccctgctgctgggtcgcgggctgattgtctacctcatgttccttttgttgaagttctccaaggctattgagataccaagctcagtgcagcaggtacccaccatcatcaaacaaagcaaggtgcaagtagccttcccattcgacgaatactttcagatcgagtgcgaggcgaaggggaatcccgaacctacctttagttggactaaagatggtaatcctttttatttcacagaccatcgtatcattccttccaacaatagtggcactttccggatccctaatgaaggtcatatcagccactttcagggcaagtaccggtgctttgcttcgaacaaactgggtatagctatgagtgaagagatcgagttcatcgttcctagtgtccccaaattccctaaagagaagattgacccattggaggtggaggagggtgatccaatcgtgctgccctgtaatcccccaaaaggacttccgcccctgcacatctactggatgaacattgaacttgagcacattgaacaggacgagagggtgtacatgagtcaaaaaggtgatctctacttcgccaacgtggaagaaaaggatagtaggaacgactattgctgtttcgctgccttcccccggttgcgaacaatcgtgcagaaaatgcctatgaagctgacggttaactctctcaaacacgccaatgacagcagcagtagtactgagattggctcaaaggctaactcaattaagcagcgcaaaccgaagttacttcttccgccgacagagtcagggtccgaatcctctattacaatactcaagggcgaaatcctcctcctggaatgtttcgccgagggccttccaaccccacaagtagactggaacaagattgggggtgatttgcctaagggaagggaaactaaagagaactacgggaagacccttaagattgagaacgtgtcttatcaggataagggcaactacagatgcacagcatccaatttcctgggcacagccacccacgacttccatgtcatcgtggaggagccgcccaggtggaccaagaagccacagagcgcagtctacagcacagggagcaatggaatccttctctgtgaagccgagggtgagccgcagcccacaattaaatggcgagtcaatggaagcccggttgataatcatccttttgcgggagatgtggtatttcccagggagatttccttcactaatctgcagcccaaccacaccgccgtgtaccagtgtgaggccagtaatgtgcacggcacaattttagccaacgccaatatagacgtggttgatgttaggcctctgattcagacaaaggacggagaaaactacgcaacagtggtggggtacagtgcctttctccactgcgagtttttcgccagccctgaggccgtcgtctcatggcaaaaggtcgaggaagtgaagcctcttgagggccgcaggtaccacatctatgagaatggcacgttgcagattaaccgcactacagaggaggatgccgggtcatacagctgctgggtcgagaacgctattggcaagacagccgtgactgcgaacctggatatacgcaacgccaccaaactgagagtcagtcctaagaacccgcgcattccaaaactccatatgctcgaactacactgtgagagcaaatgcgatagccatttgaaacactcactcaagctttcatggtccaaagatggagaggcttttgaaattaacggcaccgaggacgggcggataatcatcgacggtgcgaatcttacgatctccaacgttaccctcgaagaccagggtatttactgttgctccgcgcacaccgcgctggacagtgcagctgatattacacaagtgacagtcctagacgtgcctgatcctcccgagaacctgcacctgagtgagcggcagaatagaagtgtacgcctgacatgggaagccggcgcggatcataacagcaacatatccgaatatatagtcgagttcgaaggcaataaggaagagccgggaagatgggaagagctgacacgcgtgcagggaaagaagaccacagtcatattacctctcgccccgtttgtgagataccagttccgcgtgatcgccgtgaatgaagtaggccgctcccagccttcccagccttccgatcatcacgagaccccaccagcagcccccgatcgaaatcctcaaaacatcagggtgcaagcgagtcagcctaaagagatgattatcaagtgggagccactcaaatctatggagcagaacggcccgggcctagagtatcgtgtgacctggaagccccagggtgcgcctgttgagtgggaggaggaaacagttacaaatcatactcttcgggtgatgacgcccgcagtatatgctccatatgatgtaaaagtacaggcaattaaccaactgggttcaggccccgacccacaatcagtcactctctactcaggcgaagactatccggacacggcccccgtcatccacggcgtagacgtgataaacagcacactcgttaaggtcacgtggtcgacagttcctaaagacagggtccacgggagactcaaggggtatcagatcaattggtggaaaactaaatctctcctggacggaagaacccaccccaaagaggtgaatatactgaggttctccggccagaggaactctggtatggtcccgagcctggacgccttctctgagttccatcttaccgtactggcgtacaatagtaaaggtgcgggccctgaaagtgaaccatatatctttcaaactccggagggagtgccggagcagcccacatttctcaaagttatcaaagtggataaagacactgcaaccttgtcatggggtctccctaaaaagttgaacggcaatcttactggttatctactccaataccagataataaatgatacctatgaaataggagagctgaacgacatcaatatcacgacgcccagcaagccctcgtggcacctttctaacctcaatgctacaaccaaatacaagttctatcttagggcttgtacgagccaggggtgtggcaaacctataacggaggagtcctctacactgggcgagggttctaagggcatcggcaaaatatctggcgtcaatctgacgcagaagacacacccgatagaagttttcgagcctggcgctgagcacatcgtcaggctcatgactaaaaattggggcgacaatgacagcatctttcaggatgtgattgagaccaggggtcgtgaatacgctggactttatgacgacatttccacacagggttggttcatcggactgatgtgcgccatcgccctcctcaccttgctgttgctgaccgtatgctttgtcaagaggaataggggcggcaagtactccgtgaaggaaaaagaagacctgcaccccgatcccgaaatccagtccgtgaaagacgagaccttcggggaatatagcgattccgatgaaaaacccctgaaaggaagcttgcggagcctaaaccgggacatgcagcccacggaaagcgccgattcactggtcgagtacggggagggagaccacggactgttctcagaagatggctcgttcattggcgcttacgctggatctaaggagaaaggatcggtggaatccaatggcagctctacggccacctttcctcttcgcgcatag

SEQ ID NO: 286957 - DNA, 3675 bp, Artificial Sequence
  derived and/or modified sequence
atggagcccctgctgctgggccggggcctgattgtgtacctgatgttcctgctgctgaagttcagcaaggccatcgagatccccagctctgtgcagcaggtgcccaccatcatcaagcagagcaaggtgcaggtggccttcccctttgatgagtacttccagattgaatgtgaggccaagggcaaccctgagcccaccttctcctggaccaaggatggcaaccccttctacttcacagaccaccgcatcatccccagcaacaacagcggcaccttccgcatccccaatgaaggccacatcagccacttccagggcaagtaccgctgctttgccagcaacaagctgggcatcgccatgtctgaggagattgagttcatcgtgcccagcgtgcccaagttccccaaggagaagattgaccccctggaggtggaggagggggaccccatcgtgctgccctgcaacccccccaagggcctgccccccctgcacatctactggatgaacatcgagctggagcacatcgagcaggatgagcgggtgtacatgagccagaagggggacctgtactttgccaacgtggaggagaaggacagcagaaatgactactgctgctttgctgccttcccccggctgcggaccatcgtgcagaagatgcccatgaagctgactgtgaacagcctgaagcacgccaatgacagcagcagcagcacagaaattggcagcaaggccaacagcatcaagcagaggaagcccaagctgctgctgcccccaacagagagcggcagcgagagcagcatcaccatcctgaagggggagatcctgctgctggagtgctttgctgagggcctgcccaccccccaggtggactggaacaagattggaggagacctgcccaagggccgggagaccaaggaaaattatggcaagaccctgaagattgaaaatgtgtcctaccaggacaagggcaactaccgctgcacagccagcaacttcctgggcacagccacccatgacttccacgtgattgtggaggagcccccacgctggaccaagaagccccagagcgctgtgtacagcacaggcagcaatggcatcctgctgtgtgaggccgagggggagccccagcccaccatcaagtggagggtgaatggcagccctgtggacaaccacccctttgctggagatgtggtgttcccccgggagatctccttcaccaacctgcagcccaaccacacagctgtgtaccagtgtgaggccagcaatgtgcacggcaccatcctggccaatgccaacattgatgtggtggatgtgcggcccctcatccagaccaaggatggagaaaattatgccaccgtggtgggctacagcgccttcctgcactgtgagttctttgccagccctgaggccgtggtgtcctggcagaaggtggaggaggtgaagcccctggagggccgccgctaccacatctatgaaaatggcaccctgcagatcaacagaaccacagaagaagatgctggcagctacagctgctgggtggagaatgccatcggcaagacagctgtgacagccaacctggacatcagaaatgccaccaagctgcgggtgagccccaagaacccccgcatccccaagctgcacatgctggagctgcactgtgagagcaaatgtgacagccacctgaagcacagcctgaagctgtcctggagcaaggatggagaggcctttgagatcaatggaacagaagatggccgcatcatcattgatggagccaacctgaccatcagcaatgtgaccctggaggaccagggcatctactgctgcagcgcccacacagccctggacagcgctgctgacatcacccaggtgacagtgctggatgtgcctgaccccccagagaacctgcacctgtctgagcggcagaacagatctgtgcggctgacctgggaggccggggctgaccacaacagcaacatcagcgagtacatcgtggagtttgagggcaacaaggaggagcccggccgctgggaggagctgaccagggtgcagggcaagaagaccaccgtcatcctgcccctggccccctttgtgcgctaccagttccgggtgattgctgtgaatgaggtgggccgcagccagcccagccagcccagcgaccaccacgagaccccacctgctgccccagacaggaacccccagaacatccgggtgcaggccagccagcccaaggagatgatcatcaagtgggagcccctgaagtccatggagcagaatggacctggcctggagtacagagtgacctggaagccccagggcgcccctgtggagtgggaggaggagaccgtgaccaaccacaccctgcgggtgatgaccccagctgtgtatgccccctatgatgtgaaggtgcaggccatcaaccagctgggcagcggccctgacccccagagcgtgaccctgtacagcggggaggactacccagacacagcccctgtgatccacggcgtggatgtgatcaacagcaccctggtgaaggtgacctggagcacagtgcccaaggacagagtgcacggccgcctgaagggctaccagatcaactggtggaagaccaagagcctgctggatggccgcacccaccccaaggaggtgaacatcctgcgcttcagcggccagaggaacagcggcatggtgcccagcctggatgccttcagcgagttccacctgactgtgctggcctacaacagcaagggggccggccctgagagcgagccctacatcttccagaccccagagggcgtgcctgagcagcccaccttcctgaaggtgatcaaggtggacaaggacacagccaccctgtcctggggcctgcccaagaagctgaatggaaacctgaccggctacctgctgcagtaccagatcatcaatgacacctatgagatcggggagctgaatgacatcaacatcaccacccccagcaagcccagctggcacctgagcaacctgaatgccaccaccaagtacaagttctacctgcgggcctgcaccagccagggctgcggcaagcccatcacagaggagagcagcaccctgggggagggcagcaaaggaattggcaagatctctggagtgaacctgacccagaagacccaccccatcgaggtgtttgagcctggagctgagcacatcgtgcggctgatgaccaagaactggggagacaatgacagcatcttccaggatgtgattgagacccggggccgggagtatgccggcctgtatgatgacatcagcacccagggctggttcatcggcctgatgtgtgccatcgccctgctgaccctgctgctgctgactgtgtgctttgtgaagaggaacagaggaggcaagtacagcgtgaaggagaaggaggacctgcacccagaccctgagatccagagcgtgaaggatgagacctttggagagtacagcgacagtgatgagaagcccctgaagggcagcctgcggagcctgaacagagacatgcagcccacagagagcgctgacagcctggtggagtatggagagggggaccacggcctcttctctgaagatggcagcttcatcggggcctatgccggcagcaaggagaagggctctgtggagagcaatggcagcagcacagccaccttccccctgcgggcctag

SEQ ID NO: 286958 - DNA, 3675 bp, Artificial Sequence
  derived and/or modified sequence
atggagcccctgctgctgggccggggcctgatcgtgtacctgatgtttcttctgcttaaattctcgaaggcaatcgagattccctcatctgtccagcaggtccccaccatcatcaaacagtccaaggtgcaagtggctttccccttcgacgaatacttccagattgagtgtgaggcgaaggggaatcctgagccaaccttttcatggaccaaagatggaaatcccttctattttactgatcataggatcatccccagtaataattccgggacatttaggatcccaaacgagggacacataagccatttccaaggaaaataccggtgcttcgcatcaaataagctgggaattgccatgtccgaagagatcgagttcatcgttccgagcgtgccaaagttccccaaagaaaagatcgaccccctggaggttgaagaaggggatccaatcgtcctcccttgcaatcccccaaaggggcttccgccactgcatatatattggatgaacatcgagctggaacacattgagcaggacgagagagtgtacatgtcccaaaaaggtgacctttacttcgccaacgttgaggagaaagattcgaggaacgactattgctgctttgcggccttcccccgcctgaggacaatagttcagaaaatgcctatgaaattaactgtgaacagccttaaacacgcaaacgacagctcatcatccacagagatagggtccaaggctaactctattaagcagcggaaacccaaactgctcctgccccccaccgagtcgggatcagagtcctccatcaccattctcaaaggtgagatcctgctgctggaatgctttgccgaaggtcttcccacaccccaggttgattggaataagattggcggtgacctacctaagggccgtgaaacaaaagagaactatggtaaaacactgaagattgagaacgtgagttatcaggacaagggcaactaccgctgcaccgctagcaacttccttggtaccgcaacccatgatttccatgttatcgtcgaggaaccccctaggtggacaaagaaaccccagagcgctgtgtattccaccggatccaatgggatcctgctttgcgaggccgaaggggaaccccagccgaccatcaagtggcgcgtgaacggcagcccagttgataatcatcccttcgccggggacgttgtatttccgagagagataagtttcacaaatttacagcctaaccatacagctgtatatcagtgtgaagcctccaacgtccacggcaccatcctggcaaacgcaaacatcgatgtagttgacgtgcggcccctaattcagacaaaggatggcgaaaactacgcgaccgtcgtcgggtacagcgctttcctccattgtgagttctttgcctcaccagaggctgttgtctcctggcaaaaggtagaggaagttaagccccttgaggggcgccgctatcatatttacgaaaatggcaccctacaaatcaacaggaccactgaggaggacgcaggatcatactcctgctgggttgagaatgctattggtaagacagcagtgacggctaatctggacattcgaaacgctacgaaactccgagtgagtcctaagaaccctcggatcccaaaactgcacatgctggaactgcactgcgaatctaagtgtgattcccacctcaagcattcactcaagctcagctggtctaaagatggagaggcattcgaaatcaatgggaccgaagatggccggatcattatcgacggcgccaaccttacaattagcaacgtaacgctggaagaccaaggcatttattgttgctcagcccacacggcactggacagcgcggctgacatcacccaggtcacagtgctagacgttccggacccaccagagaacctgcacctgtctgaacgtcagaaccgatccgtgaggctcacatgggaggccggcgccgatcataattccaacatctccgagtacattgttgagtttgaggggaataaggaagaacccggtagatgggaggaactgacacgcgtgcaagggaaaaaaacaactgtcattttgccccttgctcccttcgttcgctaccagtttagagtgattgccgtgaatgaagtgggtagaagccaaccaagccagcccagtgaccatcacgagacacctccggctgctcctgatcgaaatcctcagaacatcagggtgcaagcaagccagcccaaagaaatgattattaagtgggagcccttgaagtccatggagcagaatggccccgggttggagtacagggtcacgtggaagccacagggcgccccggtggaatgggaagaagaaacggtgacaaaccacacccttagggtcatgacgcctgctgtttacgctccatatgacgtgaaagtccaggcgattaaccagcttggctccgggcccgatcctcaaagcgtgaccctgtactctggagaggactatcctgatacggcgcctgtgatacacggagtagacgtcatcaattcaacactggtaaaggtgacttggtctactgtaccaaaggatcgggtacatggcagattgaaaggctatcagataaactggtggaagaccaaatctctgctggacggtaggacgcacccaaaggaagtgaacatcttgagattttcaggccagcgcaattctgggatggttccatcactcgatgcattttcagaatttcacctgactgtgttggcctataactccaagggcgcaggccctgagtcagagccttacatctttcagaccccggaaggcgtcccagagcaacctacattcctcaaggtgatcaaagtggataaggataccgcaaccttgagctgggggctgcctaagaagcttaacggtaacttgactgggtatctactgcaatatcagatcattaatgacacctacgagatcggtgagctgaacgacatcaacattactaccccctcgaaaccttcgtggcacttgtccaacctcaatgctaccacaaagtacaaattttatcttcgggcgtgcacatctcagggctgtggtaaacccattactgaagagtccagtaccctgggcgagggctcaaagggaattgggaaaatctcaggagtgaacttgacacaaaagactcacccaattgaggtgtttgagccgggggcagagcacattgtgcgccttatgacgaaaaactggggggacaacgatagcattttccaggacgtgatcgagacccggggcagggagtatgcagggctgtacgatgatatttccactcaaggctggtttatcgggctaatgtgcgctattgctctcctcactcttctgctcctcacggtgtgcttcgtgaagcgcaatcggggaggaaagtattcagtgaaggagaaagaagacttgcacccagaccccgagattcagtctgtgaaggatgagacctttggcgaatacagcgattccgatgaaaaacccctgaaggggtcactgcgctccctcaaccgcgacatgcaacccaccgaatctgcagactcactcgtggagtacggtgaaggcgatcatgggctctttagcgaggatgggtcctttataggtgcttatgctggcagcaaagaaaaagggtctgttgaatcaaacggctcctccactgcaaccttccctctacgcgcgtag

SEQ ID NO: 286959 - DNA, 3675 bp, Artificial Sequence
  derived and/or modified sequence
atggagcctctcctattaggacgaggactgatcgtatatcttatgttcttattactcaagttcagtaaggctatcgagattccatcctcagtacagcaagttcctaccataattaagcaaagtaaagttcaggtggcatttccattcgacgaatattttcagattgagtgcgaggctaagggtaaccccgaaccgacattcagctggacaaaggacgggaaccctttctactttacagatcatcgcattatcccttccaacaattctggcacattccggattcctaacgaaggacacatctcacattttcaggggaagtacagatgtttcgccagtaacaaattagggatcgctatgtctgaggaaattgagtttatcgtgccttccgtccccaaatttccgaaagagaagattgatcccctagaagtggaagagggagatcccattgtgctaccctgtaatcctcccaaagggctaccacccctgcacatatattggatgaacattgagctggagcatatcgagcaggacgagcgggtctacatgtcccagaaaggtgatttgtacttcgcaaatgtcgaggaaaaagactcacgcaatgattactgctgttttgctgccttcccacgcttgcgcacaatcgtgcagaaaatgcctatgaaactcacagtcaattctttgaagcacgccaacgacagcagtagctccacagagataggatccaaagctaactcaatcaagcagcgaaaacctaagttacttttgcccccaaccgagtccggcagcgaaagctcaattaccattctaaaaggcgagatccttctccttgagtgttttgcagaagggttgcctacccctcaagtcgactggaataagatcgggggtgatttgccgaaaggcagggaaaccaaggaaaattatgggaaaacactgaaaatcgaaaacgtctcttaccaggataaaggcaactatagatgcaccgcatccaattttctagggaccgccacgcatgatttccacgtgatcgtcgaggagccacctagatggaccaagaaaccccaaagtgccgtttacagtacgggctctaatggaatcctcttatgcgaggccgagggtgagccccagccaactattaaatggcgtgttaacggatctcccgtggataatcaccccttcgctggagatgtggtcttccctcgtgagatcagctttacgaatctccagccgaatcacacagcggtgtaccagtgcgaggcttcaaacgtccacggtacgattcttgcgaatgccaacatcgatgttgtcgacgtgcgcccactgattcaaactaaggatggggagaattacgcaaccgtggtcggttattcagcctttttacattgtgaattcttcgcatccccagaagctgttgtgtcctggcaaaaggtggaggaagtgaagccgctggagggcagacgttatcacatttacgaaaacggcaccctacagatcaaccgcactacagaagaggatgccggttcctacagctgttgggtggaaaatgccatcgggaaaaccgccgttaccgccaacctcgacatcagaaatgccaccaaacttcgggtgagccctaaaaatccacggattccaaagctgcacatgctggagctgcattgcgaaagtaagtgcgacagtcatctgaaacattcactgaagcttagttggagcaaagacggcgaggcgtttgaaatcaacggaaccgaagacggaagaatcataatcgatggcgctaatctgaccatcagtaacgtcaccttggaggatcagggcatttattgttgttccgcccatactgcattggatagtgcagccgacatcacccaagtcaccgtgctggatgtacctgaccctcccgaaaacctgcaccttagtgaacgacagaacagatctgttcgcttaacctgggaagcaggagccgatcataattcaaacatttccgaatatatcgttgaattcgagggcaacaaggaagaacctggcaggtgggaggagctgacgcgtgtgcaagggaagaaaacgactgtgatccttcctctggctccatttgtacgttatcaatttcgggtgatcgctgtcaacgaggtcgggcgttcccaaccgagccagccttccgaccatcatgagactcctcccgcagccccagaccgaaatccccagaacatccgggtgcaggctagccaaccgaaggaaatgatcatcaaatgggagccgttgaaatccatggaacagaatgggcctggattggaatacagggtaacatggaagcctcagggggctcccgtcgagtgggaggaggagaccgtgacgaaccacactctgagggtcatgacacccgcagtttacgcaccatacgacgtgaaagtacaggctattaatcagctcgggtcaggccctgaccctcagagtgttacgttatattccggtgaggattatccggacacagcccctgttattcatggtgtggacgttattaacagtactctggtcaaagtaacttggtctacagtccctaaggaccgagtgcatggacgtctaaagggctaccagataaattggtggaagaccaagtccctgctggatgggcgaactcaccctaaagaggtgaatattctacggttctcagggcagcgtaactctggcatggtgccttccctcgacgcattttcagaattccatctgaccgtcctggcctacaactctaaaggcgctgggcctgagtccgaaccttatatttttcagactcccgagggggtcccggagcaacctacattcctcaaggtcattaaagttgacaaggatacagccacattaagctggggccttcccaagaagcttaacggaaatctcaccggttatttgctccagtaccaaatcattaacgacacctatgagattggtgaactgaatgatatcaatataacaacaccttcgaagcctagctggcatctctccaatcttaacgctactacgaagtataagttctacctaagggcttgtacttctcagggttgtggaaagcccatcactgaggaaagctctaccctcggcgagggatctaaaggtattggtaagatatcaggcgtgaatctcacacagaagacacatcccattgaggtttttgaaccaggggcagaacatatagtgaggttgatgaccaagaactggggggacaatgactccattttccaggacgtgatcgagacccggggtcgggaatatgctggactgtatgacgacatttccactcagggctggttcattgggctgatgtgcgctattgccctcttgaccctgctgctcctgaccgtctgtttcgtaaaacgcaacaggggaggtaagtactcagttaaggagaaggaggacctgcacccagatcccgagatccaatctgtgaaagatgaaacattcggagagtactcggactccgatgagaaacccctgaagggcagcctgaggtcacttaatcgcgacatgcagcccaccgaatccgccgactccttggtggaatatggagagggggatcatggcctctttagcgaggacggctcctttatcggcgcttacgccggaagcaaggagaagggcagcgtggaatctaacggaagttctactgccactttccccttgcgagcctag

SEQ ID NO: 286960 - DNA, 8013 bp, Artificial Sequence
  derived and/or modified sequence
agggatcctacctcttttgaccggagatgttgaaaagcacgaccaaagtttttggcttggtctcttgctttccacaacgagataaagtctgaagcctgtaactctccctgtcccgcgggagcgtgcaaagggagggaagataagcggcgtgggtgaggggtggcggcgcagaacccaggaagggagcagaggcgagagccagcctccggcaggagggcgtagaccccggtgccagccagaacggctccagccttcccgcggccagagagccagcggcgggaggggacgggcgggacctccgcggacagccccgggtgcggaccagcgggcagcggccggcgagaccctccctggatccgcccagagcttaccggaccctgcgcgcccccgtcccggctcccggccggctcgggggagaaggcgcccgaggggaggcgccggacagatcgcgtttcggaggcggcgcaggtgctgtaaactgcaaaccataatcctgtcttaatactgcaaacaaatcatagtggaactaaggggaacttaatttactgtttccaggttaactaaggtctcagctgtaaaccaaaagtgagaggagacattaagattttcattcttaccgggttgtcttcttcctgaagagcaatggagccgcttttacttggaagaggactaatcgtatatctaatgttcctcctgttaaaattctcaaaagcaattgaaataccatcttcagttcaacaggttccaacaatcataaaacagtcaaaagtccaagttgcctttcccttcgatgagtattttcaaattgaatgtgaagctaaaggaaatccagaaccaacattttcgtggactaaggatggcaaccctttttatttcactgaccatcggataattccatcgaacaattcaggaacattcaggatcccaaacgaggggcacatatctcactttcaagggaaataccgctgctttgcttcaaataaactgggaatcgctatgtcagaagaaatagaatttatagttccaagtgttccaaaattcccaaaagaaaaaattgaccctcttgaagtggaggagggagatccaattgtcctcccatgcaatcctcccaaaggcctcccacctttacacatttattggatgaatattgaattagaacacatcgaacaagatgaaagagtatacatgagccaaaagggagatctatacttcgcaaacgtggaagaaaaggacagtcgcaatgactactgttgctttgctgcatttccaagattaaggactattgtacagaaaatgccaatgaaactaacagttaacagtttaaagcatgctaatgactcaagttcatccacagaaattggttccaaggcaaattccatcaagcaaagaaaacccaaactgctgttgcctcccactgagagtggcagtgagtcttcaattaccatcctcaaaggggaaatcttgctgcttgagtgttttgctgaaggcttgccaactccacaggttgattggaacaaaattggtggtgacttaccaaaggggagagaaacaaaagaaaattatggcaagactttgaagatagagaatgtctcctaccaggacaaaggaaattatcgctgcacagccagcaatttcttgggaacagccactcacgattttcacgttatagtagaagagcctcctcgctggacaaagaagcctcagagtgctgtgtatagcaccggaagcaatggcatcttgttatgtgaggctgaaggagaacctcaacccacaatcaagtggagagtcaatggctccccagttgacaatcatccatttgctggtgatgttgtcttccccagggaaatcagttttaccaaccttcaaccaaatcatactgctgtgtaccagtgtgaagcctcaaatgtccatggaactatccttgccaatgccaatattgatgttgtggatgtccgtccattgatacaaaccaaagatggagaaaattacgctacagtggttgggtacagtgctttcttacattgcgagttctttgcttcacctgaggcagtcgtgtcctggcagaaggtggaagaagtgaaacccctggagggcaggcggtatcatatctatgaaaatggcacattgcagatcaacagaaccaccgaagaagatgctgggtcttactcatgttgggtagaaaatgctataggaaaaactgcagtcacagccaatttggatattagaaatgctacaaaacttagagtttctcctaagaatcctcgtatccccaaattgcatatgcttgaattacattgtgaaagcaaatgtgactcacatttgaaacacagtttgaagttgtcctggagtaaagatggagaagcctttgaaattaatggcacagaagatggcaggataattattgatggagctaatttgaccatatctaatgtaactttagaggaccaaggtatttactgctgttcagctcatactgctctagacagtgctgccgatataactcaagtaactgttcttgatgttccggatccaccagaaaaccttcacttgtctgaaagacagaacaggagtgttcggctgacctgggaagctggagctgaccacaacagcaatattagcgagtatattgttgaatttgaaggaaacaaagaagagcctggaaggtgggaggaactgaccagagtccaaggaaagaaaaccacagttatcttacctttggctccatttgtgagataccagttcagggtcatagccgtgaacgaagtagggagaagtcagcctagccagccgtcagaccatcatgaaacaccaccagcagctccagataggaatccacaaaacataagggttcaagcctctcaacccaaggaaatgattataaagtgggagcctttgaaatccatggagcagaatggaccaggcctagagtacagagtgacctggaagccacagggagccccagtggagtgggaagaagaaacagtcacaaaccacacattgcgggtgatgacgcctgctgtctatgccccttatgatgtcaaggtccaggctatcaatcaactaggatctgggcctgaccctcagtcagtgactctctattctggagaagactatcctgatacagctccagtgatccatggggtggacgttataaacagtacattagttaaagttacctggtcaacagttccaaaggacagagtacatggacgtctgaaaggctatcagataaattggtggaaaacaaaaagtctgttggatggaagaacacatcccaaagaagtgaacattctaagattttcaggacaaagaaactctggaatggttccttccttagatgcctttagtgaatttcatttaacagtcttagcctataactctaaaggagctggtcctgaaagtgagccttatatatttcaaacaccagaaggagtacctgaacagccaacttttctaaaggtcatcaaagttgataaagacactgccactttatcttggggactacctaagaaattaaatggaaacttaactggctatcttttgcaatatcagataataaatgacacctacgagattggagaattaaatgatattaacattacaactccatcaaagcccagctggcacctctcaaacctgaatgcaactaccaagtacaaattctacttgagggcttgcacttcacagggctgtggaaaaccgatcacggaggaaagctccaccttaggagaagggagtaaaggtatcgggaagatatcaggagtaaatcttactcaaaagactcacccaatagaggtatttgagccgggagctgaacatatagttcgcctaatgactaagaattggggcgataatgatagcatttttcaagatgtaattgagacaagagggagagaatatgctggtttatatgatgacatctccactcaaggctggtttattggactgatgtgtgcgattgctcttctcacactactattattaactgtttgctttgtgaagaggaatagaggtggaaagtactcagttaaagaaaaggaagatttgcatccagacccagaaattcagtcagtaaaagatgaaacctttggtgaatacagtgacagtgatgaaaagcctctcaaaggaagccttcggtcccttaatagggatatgcagcctactgaaagtgctgacagcttagtcgaatacggagagggagaccatggtctcttcagtgaagatggatcatttattggtgcctacgctggatctaaggagaagggatctgttgaaagcaatggaagttctacagcaacttttccccttcgggcataaacacaacatatgtaagcaacgctactggttcaccccaaccttccatatttatctgttcaaaggagcaagaactttcatataggaatagaaacatgctggccgaagatttcatccagaagtcaacatcctgcaattatgttgaaaagagtagtactttcttcaaaatataaaatgccaagcacttcaggcctatgttttgcttatattgttttcaggtgctcaaaatgcaaaacacaaaacaaatcctgcatttagatacacctcaactaaatccaaagtccccattcagtatattccatatttgcctgattttactattcggtgtgtttgcatagatgttgctacttggtgggtttttctccgtatgcacattggtatacagtctctgagaactggcttggtgactttgcttcactacaggttaaaagaccataagcaaactggttatttaaaatgtaaaaaggaatatgaaagtcttattaaaacacttcattgaaaatatacagtctaaatttattatttaaattttactagcaaaagtcttaggtgaacaatcaactagtatttgttgagctcctatttgcccagagatggtcatatttaaacagaagtatacgtttttcagtttcaacatgaatttttttatttctgtcagttatgacatccacaagcatcactttttgtgtctgttttttttttttttcttggactaaattcaactgcatggaagcggtggtcagaaggttgttttatacgagaacaggcagaaagtgcccattgttcaggattctaatagctacatctacttaatatcttcatttctaaattgactgcttttacctttttctcatgtttatataatggtatgcttgcatatatttcatgaatacattgtacatattatgttaatatttacacaatttaaaatatagatgtgttttattttgaagtgagaaaatgaacattaacaggcatgtttgtacagctagaatatattagtaagatactgtttttcgtcattccagagctacaactaataacacgaggttccaaagctgaagactttgtataaagtatttgggttttgttcttgtattgctttctttcaacagtttcaaaataaaatatcatataaatattgagggaaatgttttcatatttttcaaaataggtttttattgttgaatgtacatctaccccagcccctcaaaagaaaaactgtttacatagaaattcctacacatacgtttgcgtatatgttattttaaacatctttgtggtgagaattttttccccgatattctccttctgtcaaagtcagaacaaattcagggaatttattttctggcagttgtgctccagtccttttaaaattgtacatgaacatgttttagaaacaatatggaggatgatgcatacatgtcggtcaagttcagcgctcgacattttatggaaagatttttttaaccttaccacgaaatacttaactactgtttaagtgaattgacttatttcactttagtttttgaactgtgattattggtatactgttatatcctcaacttggatttatggtaaccccttatagttcatggagaccaaaatttggggtatttataatagtcagcgcaggaatgcacatggaatatctacttgtccttttgaacctcacgagtcatccagaatgtatagacaggaaaagcatgtcttatttaaaactgtaatttatgggctcaggatctgaccgcagtcccgggagtaagcatttcaaagggggaaggcagtgtggtccctaccctgtgtgaatgtgaggatgtagacatccatcagtgcaactcgagctccatcctcctccgatttctaaggttccagttttctggagggacagtcatcatgttttgatttatctgggagaaaactgtggtgcacagcttgtgaggagggcaaggttgtgacgttcgagcttagttctggtgttattctgtctcctcttctttgtcatcagccaaaacgtggtttttaaagagagtcatgcaggttagaaataatgtcaaaaatatttaggaatttaataacctttaagtcagaaactaaaacaaatactgaaatattagctcttcctacacttcgtgttcccctttagctgcctgaaaatcaagattgctcctgctcagatcttctgagtggctaaaacttatggatatgaaaaatgagattgaatgatgactatgctttgctatcattgttacctttcctcaatactatttggcaactactgggactcttcagcacaaaaggaatagatctatgattgaccctgattttaattgtgaaattatatgattcatatattttatgaatcagaataaccttcaaataaaataaatctaagtcggttaaaatggatttcatgattttccctcagaaaatgagtaacagagtccacggcgtgcaatggtaattataaattggtgatgcttgtttgcaaattgcccactcgtgataagtcaacagccaatatttaaaactttgttcgttactggctttaccctaactttctctagtctactgtcaatatcattttaatgtaattgattgtatatagtctcaagaatggttggtgggcatgagttcctagagaactgtccaagggttgggaaaatccaaattctcttcctggttccagcactgattttgtacataaacattaggcaggttgcttaacctttttatttcaaactctctcaactctaaagtgctaataataatctcagttaccttatctttgtcacagggtgttcttttttatgaagaaaaatttgaaaatgataaaagctaagatgccttctaacttcataagcaaacctttaactaattatgtatctgaaagtcacccccacataccaactcaacttttttcctgtgaacacataaatatatttttatagaaaaacaaatctacataaaataaatctactgtttagtgagcagtatgatttgtacatgccattgaaaattattaatcagaagaaaattaagcagggtctttgctatacaaaagtgttttccactaattttgcatgcgtatttataagaaaaatgtgaatttggtggttttattctatcggtataaaggcattgatattttagatgcacccgtgtttgtaaaaatgtagagcacaatggaattatgctggaagtctcaaataatatttttttcctattttatactcatggaagagataagctaaagaggggacaataatgagaaatgttggtgtgcttttctaagcatttaaaacataattgccaattgaaaccctaaatatgtttacataccattaagatatgattcatgtaacaatgttaaattaattataatgggattgggtttgttatctgtggtagtatatatcctagtgttcctatagtgaaataagtagggttcagccaaagctttctttgttttgtaccttaaattgttcgattacgtcatcaaaagagatgaaaggtatgtagaacaggttcacgtgattacctttttcttttggcttggattaatattcatagtagaactttataaaacgtgtttgtattgtaggtggtgtttgtattatgcttatgactatgtatggtttgaaaatattttcattatacatgaaattcaactttccaaataaaagttctacttcatgt

SEQ ID NO: 286961 - DNA, 3675 bp, Artificial Sequence
  derived and/or modified sequence
atggagcccctgctgctgggcagaggcctgatcgtgtacctgatgttcctgctgctgaagttcagcaaggccatcgagatccccagcagcgtgcagcaggtgcccaccatcatcaagcagagcaaggtgcaggtggccttccccttcgacgagtacttccagatcgagtgcgaggccaagggcaaccccgagcccaccttcagctggaccaaggacggcaaccccttctacttcaccgaccacagaatcatccccagcaacaacagcggcaccttcagaatccccaacgagggccacatcagccacttccagggcaagtacagatgcttcgccagcaacaagctgggcatcgccatgagcgaggagatcgagttcatcgtgcccagcgtgcccaagttccccaaggagaagatcgaccccctggaggtggaggagggcgaccccatcgtgctgccctgcaacccccccaagggcctgccccccctgcacatctactggatgaacatcgagctggagcacatcgagcaggacgagagagtgtacatgagccagaagggcgacctgtacttcgccaacgtggaggagaaggacagcagaaacgactactgctgcttcgccgccttccccagactgagaaccatcgtgcagaagatgcccatgaagctgaccgtgaacagcctgaagcacgccaacgacagcagcagcagcaccgagatcggcagcaaggccaacagcatcaagcagagaaagcccaagctgctgctgccccccaccgagagcggcagcgagagcagcatcaccatcctgaagggcgagatcctgctgctggagtgcttcgccgagggcctgcccaccccccaggtggactggaacaagatcggcggcgacctgcccaagggcagagagaccaaggagaactacggcaagaccctgaagatcgagaacgtgagctaccaggacaagggcaactacagatgcaccgccagcaacttcctgggcaccgccacccacgacttccacgtgatcgtggaggagccccccagatggaccaagaagccccagagcgccgtgtacagcaccggcagcaacggcatcctgctgtgcgaggccgagggcgagccccagcccaccatcaagtggagagtgaacggcagccccgtggacaaccaccccttcgccggcgacgtggtgttccccagagagatcagcttcaccaacctgcagcccaaccacaccgccgtgtaccagtgcgaggccagcaacgtgcacggcaccatcctggccaacgccaacatcgacgtggtggacgtgagacccctgatccagaccaaggacggcgagaactacgccaccgtggtgggctacagcgccttcctgcactgcgagttcttcgccagccccgaggccgtggtgagctggcagaaggtggaggaggtgaagcccctggagggcagaagataccacatctacgagaacggcaccctgcagatcaacagaaccaccgaggaggacgccggcagctacagctgctgggtggagaacgccatcggcaagaccgccgtgaccgccaacctggacatcagaaacgccaccaagctgagagtgagccccaagaaccccagaatccccaagctgcacatgctggagctgcactgcgagagcaagtgcgacagccacctgaagcacagcctgaagctgagctggagcaaggacggcgaggccttcgagatcaacggcaccgaggacggcagaatcatcatcgacggcgccaacctgaccatcagcaacgtgaccctggaggaccagggcatctactgctgcagcgcccacaccgccctggacagcgccgccgacatcacccaggtgaccgtgctggacgtgcccgacccccccgagaacctgcacctgagcgagagacagaacagaagcgtgagactgacctgggaggccggcgccgaccacaacagcaacatcagcgagtacatcgtggagttcgagggcaacaaggaggagcccggcagatgggaggagctgaccagagtgcagggcaagaagaccaccgtgatcctgcccctggcccccttcgtgagataccagttcagagtgatcgccgtgaacgaggtgggcagaagccagcccagccagcccagcgaccaccacgagaccccccccgccgcccccgacagaaacccccagaacatcagagtgcaggccagccagcccaaggagatgatcatcaagtgggagcccctgaagagcatggagcagaacggccccggcctggagtacagagtgacctggaagccccagggcgcccccgtggagtgggaggaggagaccgtgaccaaccacaccctgagagtgatgacccccgccgtgtacgccccctacgacgtgaaggtgcaggccatcaaccagctgggcagcggccccgacccccagagcgtgaccctgtacagcggcgaggactaccccgacaccgcccccgtgatccacggcgtggacgtgatcaacagcaccctggtgaaggtgacctggagcaccgtgcccaaggacagagtgcacggcagactgaagggctaccagatcaactggtggaagaccaagagcctgctggacggcagaacccaccccaaggaggtgaacatcctgagattcagcggccagagaaacagcggcatggtgcccagcctggacgccttcagcgagttccacctgaccgtgctggcctacaacagcaagggcgccggccccgagagcgagccctacatcttccagacccccgagggcgtgcccgagcagcccaccttcctgaaggtgatcaaggtggacaaggacaccgccaccctgagctggggcctgcccaagaagctgaacggcaacctgaccggctacctgctgcagtaccagatcatcaacgacacctacgagatcggcgagctgaacgacatcaacatcaccacccccagcaagcccagctggcacctgagcaacctgaacgccaccaccaagtacaagttctacctgagagcctgcaccagccagggctgcggcaagcccatcaccgaggagagcagcaccctgggcgagggcagcaagggcatcggcaagatcagcggcgtgaacctgacccagaagacccaccccatcgaggtgttcgagcccggcgccgagcacatcgtgagactgatgaccaagaactggggcgacaacgacagcatcttccaggacgtgatcgagaccagaggcagagagtacgccggcctgtacgacgacatcagcacccagggctggttcatcggcctgatgtgcgccatcgccctgctgaccctgctgctgctgaccgtgtgcttcgtgaagagaaacagaggcggcaagtacagcgtgaaggagaaggaggacctgcaccccgaccccgagatccagagcgtgaaggacgagaccttcggcgagtacagcgacagcgacgagaagcccctgaagggcagcctgagaagcctgaacagagacatgcagcccaccgagagcgccgacagcctggtggagtacggcgagggcgaccacggcctgttcagcgaggacggcagcttcatcggcgcctacgccggcagcaaggagaagggcagcgtggagagcaacggcagcagcaccgccaccttccccctgagagcctag

SEQ ID NO: 286962 - DNA, 2457 bp, Artificial Sequence
  derived and/or modified sequence
atgggcccccccgacgtggaggaggaggagggcggcggccagggcgaggaggaggaggaggaggaggaggacgaggaggccgaggaggagagactggccctggagtgggccctgggcgccgacgaggacttcctgctggagcacatcagaatcctgaaggtgctgtggtgcttcctgatccacgtgcagggcagcatcagacagttcgccgcctgcctggtgctgaccgacttcggcatcgccgtgttcgagatcccccaccaggagagcagaggcagcagccagcacatcctgagcagcctgagattcgtgttctgcttcccccacggcgacctgaccgagttcggcttcctgatgcccgagctgtgcctggtgctgaaggtgagacacagcgagaacaccctgttcatcatcagcgacgccgccaacctgcacgagttccacgccgacctgagaagctgcttcgccccccagcacatggccatgctgtgcagccccatcctgtacggcagccacaccagcctgcaggagttcctgagacagctgctgaccttctacaaggtggccggcggctgccaggagagaagccagggctgcttccccgtgtacctggtgtacagcgacaagagaatggtgcagaccgccgccggcgactacagcggcaacatcgagtgggccagctgcaccctgtgcagcgccgtgagaagaagctgctgcgcccccagcgaggccgtgaagagcgccgccatcccctactggctgctgctgaccccccagcacctgaacgtgatcaaggccgacttcaaccccatgcccaacagaggcacccacaactgcagaaacagaaacagcttcaagctgagcagagtgcccctgagcaccgtgctgctggaccccaccagaagctgcacccagcccagaggcgccttcgccgacggccacgtgctggagctgctggtgggctacagattcgtgaccgccatcttcgtgctgccccacgagaagttccacttcctgagagtgtacaaccagctgagagccagcctgcaggacctgaagaccgtggtgatcgccaagacccccggcaccggcggcagcccccagggcagcttcgccgacggccagcccgccgagagaagagccagcaacgaccagagaccccaggaggtgcccgccgaggccctggcccccgcccccgccgaggtgcccgcccccgcccccgccgccgccagcgccagcggccccgccaagacccccgcccccgccgaggccagcaccagcgccctggtgcccgaggagacccccgtggaggcccccgcccccccccccgccgaggcccccgcccagtaccccagcgagcacctgatccaggccaccagcgaggagaaccagatccccagccacctgcccgcctgccccagcctgagacacgtggccagcctgagaggcagcgccatcatcgagctgttccacagcagcatcgccgaggtggagaacgaggagctgagacacctgatgtggagcagcgtggtgttctaccagacccccggcctggaggtgaccgcctgcgtgctgctgagcaccaaggccgtgtacttcgtgctgcacgacggcctgagaagatacttcagcgagcccctgcaggacttctggcaccagaagaacaccgactacaacaacagccccttccacatcagccagtgcttcgtgctgaagctgagcgacctgcagagcgtgaacgtgggcctgttcgaccagcacttcagactgaccggcagcacccccatgcaggtggtgacctgcctgaccagagacagctacctgacccactgcttcctgcagcacctgatggtggtgctgagcagcctggagagaacccccagccccgagcccgtggacaaggacttctacagcgagttcggcaacaagaccaccggcaagatggagaactacgagctgatccacagcagcagagtgaagttcacctaccccagcgaggaggagatcggcgacctgaccttcaccgtggcccagaagatggccgagcccgagaaggcccccgccctgagcatcctgctgtacgtgcaggccttccaggtgggcatgcccccccccggctgctgcagaggccccctgagacccaagaccctgctgctgaccagcagcgagatcttcctgctggacgaggactgcgtgcactaccccctgcccgagttcgccaaggagcccccccagagagacagatacagactggacgacggcagaagagtgagagacctggacagagtgctgatgggctaccagacctacccccaggccctgaccctggtgttcgacgacgtgcagggccacgacctgatgggcagcgccgagagcagagagaagctgatcagcctgctggccagacagtgggaggccctgtgcggcagagagctgcccgtggagctgaccggctag

SEQ ID NO: 286963 - DNA, 1287 bp, Artificial Sequence
  derived and/or modified sequence
atggccaccgccagaaccttcggccccgagagagaggccgagcccgccaaggaggccagagtggtgggcagcgagctggtggacacctacaccgtgtacatcatccaggtgaccgacggcagccacgagtggaccgtgaagcacagatacagcgacttccacgacctgcacgagaagctggtggccgagagaaagatcgacaagaacctgctgccccccaagaagatcatcggcaagaacagcagaagcctggtggagaagagagagaaggacctggaggtgtacctgcagaagctgctgaccgcctgcgtgctgctgagcaccaaggccgtgtacttcgtgctgcacgacggcctgagaagatacttcagcgagcccctgcaggacttctggcaccagaagaacaccgactacaacaacagccccttccacatcagccagtgcttcgtgctgaagctgagcgacctgcagagcgtgaacgtgggcctgttcgaccagcacttcagactgaccggcagcacccccatgcaggtggtgacctgcctgaccagagacagctacctgacccactgcttcctgcagcacctgatggtggtgctgagcagcctggagagaacccccagccccgagcccgtggacaaggacttctacagcgagttcggcaacaagaccaccggcaagatggagaactacgagctgatccacagcagcagagtgaagttcacctaccccagcgaggaggagatcggcgacctgaccttcaccgtggcccagaagatggccgagcccgagaaggcccccgccctgagcatcctgctgtacgtgcaggccttccaggtgggcatgcccccccccggctgctgcagaggccccctgagacccaagaccctgctgctgaccagcagcgagatcttcctgctggacgaggactgcgtgcactaccccctgcccgagttcgccaaggagcccccccagagagacagatacagactggacgacggcagaagagtgagagacctggacagagtgctgatgggctaccagacctacccccaggccctgaccctggtgttcgacgacgtgcagggccacgacctgatgggcagcgtgaccctggaccacttcggcgaggtgcccggcggccccgccagagccagccagggcagagaggtgcagtggcaggtgttcgtgcccagcgccgagagcagagagaagctgatcagcctgctggccagacagtgggaggccctgtgcggcagagagctgcccgtggagctgaccggctag

SEQ ID NO: 286964 - DNA, 2457 bp, Artificial Sequence
  derived and/or modified sequence
atgggcccgcccgatgtcgaagaggaggagggcggcggacaaggagaagaagaggaagaagaggaagaggacgaggaagccgaagaggaacggctggcattagagtgggcactcggggccgacgaggactttcttctcgaacacattagaatcttaaaggtcctctggtgttttctgattcatgtgcagggctccataaggcagttcgcagcctgtctggtgctaacagacttcgggatcgctgtgtttgaaattccacaccaggagagtagggggtcttctcagcacattcttagctcacttcggttcgtgttttgctttccccacggcgacctcaccgaattcggctttctgatgccagagctgtgtctggtgctcaaagtgcgacacagcgagaataccttgttcatcataagcgacgctgccaatctccatgaatttcacgcagacctccggtcttgttttgccccgcagcacatggccatgctctgctcccctatcctctacggctctcacacatccttgcaagaattccttagacagctgctgactttttacaaagtcgccggcggatgtcaagaaaggtcccaggggtgctttccagtgtacttggtctacagcgataagaggatggttcagaccgcggccggtgattactccggaaacattgagtgggcgtcttgcaccctgtgctcagcggtgcggcgctcctgctgtgccccctccgaggcagtaaaatccgccgctatcccctactggctgctgttgacgccacagcatctgaatgttataaaggctgatttcaatcctatgccaaataggggcacgcacaactgtagaaacagaaattccttcaagctgtccagagtccctctttctactgtacttttggatccaacccgaagttgcactcaaccacgcggggcgtttgctgacggccacgttttggagctgctggtcgggtatcggttcgtaaccgccatctttgtgttgccccacgaaaaattccacttcctgcgcgtctataaccagctcagagccagcctgcaggatttaaagacagtggtgatcgctaagacgccaggcacaggcgggtccccccagggctcttttgcagatggccagcctgctgagcgacgcgcctctaatgaccagaggccacaggaggtgcctgccgaggccttagcgcccgcgcctgcagaggtgcctgcccccgctccagcagctgcttctgcctcagggcctgctaagacaccggcccccgctgaggcttctactagcgccctggtaccagaagaaacacctgtcgaagctcccgctccgcctcctgccgaggccccggctcaatatccgtcagaacaccttatacaggcgacaagtgaagagaatcagatcccaagccaccttccggcctgccctagtttgaggcacgtggcaagccttcgagggagtgctataatcgaactgtttcactcctccatcgccgaggtcgagaacgaagagctgaggcacctaatgtggagctccgtggttttctatcaaactcctggactcgaggttaccgcctgcgtgctgctctcaactaaagctgtgtatttcgtgctacacgacggtctccgccgatatttttcagagcctctgcaggacttctggcaccagaagaacacagactataataattctcccttccacatatctcagtgcttcgtccttaagctgtcagacctccaatccgtgaatgttggattgttcgaccagcattttagattaaccggtagtacccccatgcaggtagtaacttgtcttactcgggacagctacctcacccactgctttttgcagcacctgatggtcgtgctctcctctctcgaacgcacgccttccccggagcctgtagacaaggatttctactcggaattcggaaacaaaactacggggaaaatggagaattatgagcttatccacagcagtcgtgttaaattcacgtaccccagcgaggaggagattggtgacctgacatttaccgtcgcacaaaagatggccgagcccgaaaaggccccagctttgagtattctgctctacgttcaagcatttcaggtaggcatgccacctcctggatgctgtagaggtcccctcaggcccaagaccttgctgctgacgtcttctgagattttcctgctagacgaggactgcgtccattaccctttgccagaatttgccaaggaaccacctcagcgagaccgctaccgcctcgacgatggaaggagagtgcgagacttggatcgggtgttgatggggtaccagacgtaccctcaagcactgacacttgtgtttgacgatgtgcaagggcacgatcttatgggctccgcggaaagtcgagagaagctgatttcactgctggcacggcaatgggaagcgctttgcggcagggaactccctgtagagttgacaggatag

SEQ ID NO: 286965 - DNA, 1287 bp, Artificial Sequence
  derived and/or modified sequence
atggctactgctaggacgtttggccctgaacgggaggcagagcccgctaaggaagctcgagtcgtgggctctgagctggtcgatacatatacagtttatataattcaagtgacagacggctcccacgagtggacggtcaagcaccggtattcggacttccacgacctccatgagaagctggttgcggagcggaagattgataaaaatctgctaccacccaaaaaaattatcggcaaaaactctagatcgttggttgaaaaaagggaaaaggacctggaagtatatctccagaagctactcacagcatgtgtgttgctttccactaaggccgtttattttgtcctgcatgacggtcttaggcggtatttctcagagcccctgcaagatttctggcatcagaagaacaccgattacaataattcaccctttcacattagtcaatgctttgtgcttaaattgtcagacctgcaatccgtgaatgtggggctgttcgatcagcattttcgcctgaccgggtccacacccatgcaggtggtgacttgtctgacgagggactcataccttacccattgcttccttcagcatctgatggtggttcttagttcgctggagaggaccccatcaccggagcccgtggacaaggatttttactctgagttcggtaacaagaccacaggaaaaatggaaaattatgaactgattcatagcagccgagtcaagtttacatacccctccgaagaggagataggtgacctcacattcacagttgcccaaaagatggccgaaccagagaaggcccctgctctatctattctgctttacgttcaggcctttcaggtggggatgcctcccccagggtgctgccggggccccctgcggcccaaaaccctgcttcttacatcaagtgagatcttcctcttggatgaggactgcgttcactatcctctgcctgaatttgccaaagagccaccacaaagggatcgatatagactggacgatggcagacgagttagggatttagaccgtgtgctgatggggtatcagacatacccccaagccctgactctggtattcgacgatgtgcagggccatgacttgatgggatctgtaacgctggaccatttcggtgaggttccaggcggaccggcccgggcaagccagggcagggaagtacagtggcaggtgtttgtgccctccgccgagtcacgcgagaaactgatctcccttcttgcccggcagtgggaggccctctgtggccgggagctgcccgtcgagctgacgggatag

SEQ ID NO: 286966 - DNA, 2457 bp, Artificial Sequence
  derived and/or modified sequence
atgggccccccagatgtggaggaggaggagggcggcggccagggcgaggaggaggaggaggaggaggaggatgaggaggccgaggaggagcggctggccctggagtgggccctgggcgcagatgaggacttcctgctggagcacatccgcatcctgaaggtgctgtggtgcttcctgattcatgtgcagggcagcatccggcagtttgctgcctgcctggtgctgacagactttggaattgctgtgtttgagatcccccaccaggagagccggggcagcagccagcacatcctgagcagcctgcgctttgtgttctgcttcccccatggagacctgacagaatttggcttcctgatgcctgagctgtgcctggtgctgaaggtgcgccacagcgagaacaccctcttcatcatcagtgatgctgccaacctgcacgagttccacgccgacctgcggagctgctttgccccccagcacatggccatgctgtgcagccccatcctgtatggcagccacaccagcctgcaggagttcctgcggcagctgctgaccttctacaaggtggccggcggctgccaggagaggagccagggctgcttccctgtgtacctggtgtacagcgacaagaggatggtgcagacagctgctggggactacagcggcaacatcgagtgggccagctgcaccctgtgcagcgctgtgagaagaagctgctgtgcccccagcgaggccgtgaagtctgctgccatcccctactggctgctgctgaccccccagcacctgaatgtcatcaaggctgacttcaaccccatgcccaacagaggcacccacaactgcaggaacagaaacagcttcaagctgagccgggtgcccctgagcacagtgctgctggaccccaccaggagctgcacccagcccaggggggcctttgctgatggccacgtgctggagctgctggtgggctacagatttgtgacagccatctttgtgctgccccatgagaagttccacttcctgcgggtgtacaaccagctgcgggccagcctgcaggacctgaagacagtggtgattgccaagaccccaggcactggaggcagcccccagggcagctttgctgatggccagcctgctgagcggcgggccagcaatgaccagaggccccaggaggtgcctgctgaggccctggccccagccccagctgaggtgcctgccccagccccagctgctgccagcgccagcggccctgccaagaccccagccccagctgaggccagcaccagcgccctggtgcctgaggagacccctgtggaggccccagcccctcctcctgctgaggccccagcccagtaccccagcgagcacctgatccaggccaccagcgaggagaaccagatccccagccacctgcctgcctgccccagcctgcggcacgtggccagcctgcggggcagcgccatcatcgagctgttccacagcagcattgctgaggtggagaatgaggagctgcggcacctgatgtggagctctgtggtgttctaccagaccccaggcctggaggtgacagcctgtgtgctgctgagcaccaaggctgtgtactttgtgctgcatgatggcctgcggcgctacttcagcgagcccctgcaggacttctggcaccagaagaacacagactacaacaacagccccttccacatcagccagtgctttgtgctgaagctgagtgacctgcagagcgtgaatgtgggcctgtttgaccagcacttccggctgaccggcagcacccccatgcaggtggtgacctgcctgacccgggacagctacctgacccactgcttcctgcagcacctgatggtggtgctgagcagcctggagaggacccccagccctgagcctgtggacaaggacttctacagcgagtttggaaacaagaccaccgggaagatggagaactatgagctgatccacagcagccgggtgaagttcacctaccccagcgaggaggagattggagacctgaccttcaccgtggcccagaagatggccgagcctgagaaggccccagccctgagcatcctgctgtatgtgcaggccttccaggtgggcatgcctcctcctggctgctgccggggccccctgcggcccaagaccctgctgctgaccagcagcgagatcttcctgctggatgaggactgtgtgcactaccccctgcctgagtttgccaaggagcccccccagagggaccgctaccgcctggatgatggaagaagagtgcgggacctggacagagtgctgatgggctaccagacctacccccaggccctgaccctggtgtttgatgatgtgcagggccatgacctgatgggcagcgctgagagccgggagaagctgatcagcctgctggcccggcagtgggaggccctgtgtggccgggagctgcctgtggagctgactggatag

SEQ ID NO: 286967 - DNA, 1287 bp, Artificial Sequence
  derived and/or modified sequence
atggccacagcccggacctttggacctgagcgggaggccgagcccgccaaggaggcccgggtggtgggcagcgagctggtggacacctacacagtgtacatcatccaggtgacagatggcagccatgagtggacagtgaagcaccgctacagcgacttccatgacctgcacgagaagctggtggccgagaggaagattgacaagaacctgctgccccccaagaagatcatcggcaagaacagccgcagcctggtggagaagcgggagaaggacctggaggtgtacctgcagaagctgctgacagcctgtgtgctgctgagcaccaaggctgtgtactttgtgctgcatgatggcctgcggcgctacttcagcgagcccctgcaggacttctggcaccagaagaacacagactacaacaacagccccttccacatcagccagtgctttgtgctgaagctgagtgacctgcagagcgtgaatgtgggcctgtttgaccagcacttccggctgaccggcagcacccccatgcaggtggtgacctgcctgacccgggacagctacctgacccactgcttcctgcagcacctgatggtggtgctgagcagcctggagaggacccccagccctgagcctgtggacaaggacttctacagcgagtttggaaacaagaccaccgggaagatggagaactatgagctgatccacagcagccgggtgaagttcacctaccccagcgaggaggagattggagacctgaccttcaccgtggcccagaagatggccgagcctgagaaggccccagccctgagcatcctgctgtatgtgcaggccttccaggtgggcatgcctcctcctggctgctgccggggccccctgcggcccaagaccctgctgctgaccagcagcgagatcttcctgctggatgaggactgtgtgcactaccccctgcctgagtttgccaaggagcccccccagagggaccgctaccgcctggatgatggaagaagagtgcgggacctggacagagtgctgatgggctaccagacctacccccaggccctgaccctggtgtttgatgatgtgcagggccatgacctgatgggctctgtgaccctggaccactttggagaggtgcctgggggccctgcccgggccagccagggccgggaggtgcagtggcaggtgtttgtgcccagcgctgagagccgggagaagctgatcagcctgctggcccggcagtgggaggccctgtgtggccgggagctgcctgtggagctgactggatag

SEQ ID NO: 286968 - DNA, 3046 bp, Artificial Sequence
  derived and/or modified sequence
gaaatggggcccccagacgtggaggaggaggagggaggaggccagggggaggaagaggaggaggaagaggaggatgaagaggccgaggaggagcgcctggctctggaatgggccctgggcgcggacgaggacttcctgctggagcacatccgcatcctcaaggtgctgtggtgcttcctgatccatgtgcagggcagtatccgccagttcgccgcctgccttgtgctcaccgacttcggcatcgcagtcttcgagatcccgcaccaggagtctcggggcagcagccagcacatcctctcctccctgcgctttgtcttttgcttcccgcatggcgacctcaccgagtttggcttcctcatgccggagctgtgtctggtgctcaaggtacggcacagtgagaacacgctcttcattatctcggacgccgccaacctgcacgagttccacgcggacctgcgctcatgctttgcaccccagcacatggccatgctgtgtagccccatcctctacggcagccacaccagcctgcaggagttcctgcgccagctgctcaccttctacaaggtggctggcggctgccaggagcgcagccagggctgcttccccgtctacctggtctacagtgacaagcgcatggtgcagacggccgccggggactactcaggcaacatcgagtgggccagctgcacactctgttcagccgtgcggcgctcctgctgcgcgccctctgaggccgtcaagtccgccgccatcccctactggctgttgctcacgccccagcacctcaacgtcatcaaggccgacttcaaccccatgcccaaccgtggcacccacaactgtcgcaaccgcaacagcttcaagctcagccgtgtgccgctctccaccgtgctgctggaccccacacgcagctgtacccagcctcggggcgcctttgctgatggccacgtgctagagctgctcgtggggtaccgctttgtcactgccatcttcgtgctgccccacgagaagttccacttcctgcgcgtctacaaccagctgcgggcctcgctgcaggacctgaagactgtggtcatcgccaagacccccgggacgggaggcagcccccagggctcctttgcggatggccagcctgccgagcgcagggccagcaatgaccagcgtccccaggaggtcccagcagaggctctggccccggccccagcggaagtcccagctccagcccctgcagcagcctcagcctcaggcccagcgaagactccggccccagcagaggcctcaacttcagctttggtcccagaggagacgccagtggaagctccagccccacccccagccgaggcccctgcccagtacccgagtgagcacctcatccaggccacctcggaggagaatcagatcccctcgcacttgcctgcctgcccgtcgctccggcacgtcgccagcctgcggggcagcgccatcatcgagctcttccacagcagcattgctgaggttgaaaacgaggagctgaggcacctcatgtggtcctcggtggtgttctaccagaccccagggctggaggtgactgcctgcgtgctgctctccaccaaggctgtgtactttgtgctccacgacggcctccgccgctacttctcagagccactgcaggatttctggcatcagaaaaacaccgactacaacaacagccctttccacatctcccagtgcttcgtgctaaagcttagtgacctgcagtcagtcaatgtggggcttttcgaccagcatttccggctgacgggttccaccccgatgcaggtggtcacgtgcttgacgcgggacagctacctgacgcactgcttcctccagcacctcatggtcgtgctgtcctctctggaacgcacgccctcgccggagcctgttgacaaggacttctactccgagtttgggaacaagaccacagggaagatggagaactacgagctgatccactctagtcgcgtcaagtttacctaccccagtgaggaggagattggggacctgacgttcactgtggcccaaaagatggctgagccagagaaggccccagccctcagcatcctgctgtacgtgcaggccttccaggtgggcatgccaccccctgggtgctgcaggggccccctgcgccccaagacactcctgctcaccagctccgagatcttcctcctggatgaggactgtgtccactacccactgcccgagtttgccaaagagccgccgcagagagacaggtaccggctggacgatggccgccgcgtccgggacctggaccgagtgctcatgggctaccagacctacccgcaggccctcaccctcgtcttcgatgacgtgcaaggtcatgacctcatgggcagtgctgagagcagagagaagctcatctcgctgttggctcgccagtgggaggccctgtgtggccgtgagctgcctgtcgagctcaccggctagcccaggccacagccagcctgtcgtgtccagcctgacgcctactggggcagggcagcaggcttttgtgttctctaaaaatgttttatcctccctttggtaccttaatttgactgtcctcgcagagaatgtgaacatgtgtgtgtgttgtgttaattctttctcatgttgggagtgagaatgccgggcccctcagggctgtcggtgtgctgtcagcctcccacaggtggtacagccgtgcacaccagtgtcgtgtctgctgttgtgggaccgttgttaacacgtgacactgtgggtctgactttctcttctacacgtcctttcctgaagtgtcgagtccagtcctttgttgctgttgctgttgctgttgctgttgctgttgctgttggcatcttgctgctaatcctgaggctggtagcagaatgcacattggaagctcccaccccatattgttcttcaaagtggaggtctcccctgatccagacaagtgggagagcccgtgggggcaggggacctggagctgccagcaccaagcgtgattcctgctgcctgtattctctattccaataaagcagagtttgacaccgtc

SEQ ID NO: 286969 - DNA, 2010 bp, Artificial Sequence
  derived and/or modified sequence
aggcggggccaagatggcggcgcagcgcgcggcgggggcgacgggcggcgggggccggggggcggtgggacgttgaccccgccccctgctgctgctagtctgcgccgggcggcggtggcggcggagacccgaacatggcgaccgcgcgcaccttcgggcccgagcgggaagccgagccggccaaggaagcgcgcgtcgtgggctcggagcttgtggacacttatacggtttacatcatccaggtcactgatggcagccatgagtggacagtaaagcaccgctacagcgacttccatgacctgcatgaaaagctcgttgcagagagaaagattgataaaaatctgcttccgcccaaaaagataattgggaaaaactcaagaagcttggtggagaagagggagaaggatctggaggtctacctccagaagctcctgactgcctgcgtgctgctctccaccaaggctgtgtactttgtgctccacgacggcctccgccgctacttctcagagccactgcaggatttctggcatcagaaaaacaccgactacaacaacagccctttccacatctcccagtgcttcgtgctaaagcttagtgacctgcagtcagtcaatgtggggcttttcgaccagcatttccggctgacgggttccaccccgatgcaggtggtcacgtgcttgacgcgggacagctacctgacgcactgcttcctccagcacctcatggtcgtgctgtcctctctggaacgcacgccctcgccggagcctgttgacaaggacttctactccgagtttgggaacaagaccacagggaagatggagaactacgagctgatccactctagtcgcgtcaagtttacctaccccagtgaggaggagattggggacctgacgttcactgtggcccaaaagatggctgagccagagaaggccccagccctcagcatcctgctgtacgtgcaggccttccaggtgggcatgccaccccctgggtgctgcaggggccccctgcgccccaagacactcctgctcaccagctccgagatcttcctcctggatgaggactgtgtccactacccactgcccgagtttgccaaagagccgccgcagagagacaggtaccggctggacgatggccgccgcgtccgggacctggaccgagtgctcatgggctaccagacctacccgcaggccctcaccctcgtcttcgatgacgtgcaaggtcatgacctcatgggcagtgtcaccctggaccactttggggaggtgccaggtggcccggctagagccagccagggccgtgaagtccagtggcaggtgtttgtccccagtgctgagagcagagagaagctcatctcgctgttggctcgccagtgggaggccctgtgtggccgtgagctgcctgtcgagctcaccggctagcccaggccacagccagcctgtcgtgtccagcctgacgcctactggggcagggcagcaggcttttgtgttctctaaaaatgttttatcctccctttggtaccttaatttgactgtcctcgcagagaatgtgaacatgtgtgtgtgttgtgttaattctttctcatgttgggagtgagaatgccgggcccctcagggctgtcggtgtgctgtcagcctcccacaggtggtacagccgtgcacaccagtgtcgtgtctgctgttgtgggaccgttgttaacacgtgacactgtgggtctgactttctcttctacacgtcctttcctgaagtgtcgagtccagtcctttgttgctgttgctgttgctgttgctgttgctgttgctgttggcatcttgctgctaatcctgaggctggtagcagaatgcacattggaagctcccaccccatattgttcttcaaagtggaggtctcccctgatccagacaagtgggagagcccgtgggggcaggggacctggagctgccagcaccaagcgtgattcctgctgcctgtattctctattccaataaagcagagtttgacaccgtctgc

SEQ ID NO: 286970 - DNA, 2457 bp, Artificial Sequence
  derived and/or modified sequence
atgggcccccccgacgtggaggaggaggagggcggcggccagggcgaggaggaggaagaggaggaggaggacgaagaagccgaggaagaaagacttgccctcgaatgggcactcggcgccgatgaagactttctccttgaacacatcaggatcctgaaagtgctgtggtgcttcctgatccatgtccagggatctatccgtcagttcgccgcctgcctggtgctgacagattttggaatagccgtgttcgagataccacaccaagagtctcgtggctcaagccaacatattctgtcctcactgcgttttgtcttctgttttccacatggggacctgactgaattcggatttttaatgccagaactgtgtctagtgttgaaagtgagacattctgagaatactttgttcattattagcgatgcagccaatcttcacgagtttcatgcagaccttcgtagctgttttgccccccagcacatggctatgctgtgcagccccatcctgtacggctcccacacctctctccaagagttcctgaggcagctcttaacattctacaaggtggctggcgggtgccaggagaggtcacagggctgcttccctgtgtatctggtgtattcagataaaagaatggtgcagacggcggccggagactacagcgggaatatcgaatgggcctcttgtacactctgttctgccgtgcggcgaagctgctgcgccccctcggaagccgttaaaagcgcagctataccctactggctgttgctaacacctcagcacttgaacgttattaaagccgacttcaatccaatgccaaatcgcggcacacacaactgtcgaaatcgcaattcattcaagttgtctcgggtgcccctctctacagttttactggatcctacaaggagttgtacccaaccacgcggcgccttcgcagacggacacgttctcgaactgctggttggttatagattcgtcactgctatttttgtgctgccgcatgagaagttccacttcctgagagtctataatcagctacgggcctccttgcaggacctcaagacagtagtcattgctaaaacgcccggaaccggggggagcccacagggatctttcgctgatggacagcccgcagaacggagagcaagtaacgaccagcggcctcaggaagtgcctgccgaggcactcgctccagctcccgcggaagtacccgcacccgccccggccgctgcttctgcctcaggcccagcgaagactcctgcgccggcagaggccagcacttcggctttggtgccagaagagaccccggttgaggcccctgcaccgccacccgccgaggctccagcacagtatcccagcgaacaccttatccaggcaacatcagaagaaaatcagatccccagtcacttgcccgcttgccctagcctgagacatgtggcttcgctgagagggtccgctattattgagctttttcactccagcattgccgaagtcgagaacgaagagctgcgacatttgatgtggtcttctgttgtgttttaccagaccccgggcctggaagtaactgcctgtgtgctgctcagcacaaaggcggtctatttcgtcctccatgatggcctgcggcgctatttcagcgagcccttgcaggacttttggcatcagaaaaacactgactataacaactcccctttccacatctcccaatgttttgtgctgaagctttctgacctgcagtctgtaaatgtgggtctctttgatcagcatttccgccttaccgggtccacccctatgcaggtggtgacctgtttaactagggacagttacctcactcactgctttttacagcacctcatggtcgttctttcctcgctggaaagaaccccgtcacccgagcccgtagacaaagatttctactcggaatttgggaataaaacgacagggaagatggagaattatgaactgatccactcaagtcgcgtcaaatttacctatccctccgaggaggagatcggagacttgacctttacagtagcacagaagatggccgagcctgagaaggctcctgcactttcgatcttgttgtatgtccaggcgtttcaggtcggcatgccaccgcctgggtgttgtcgaggccccctccggcctaaaacgctgcttctcacgtctagcgaaatcttcctcctcgacgaggattgtgtgcactatccgttgcctgaatttgcaaaagaacctccacagagagatcgttatcgtctggacgatggtcgccgggtgagggacctcgatcgcgtgttgatggggtaccaaacttacccccaggctctgacgctcgtgtttgacgacgtgcaaggccatgacctcatgggctcggccgagagtagagagaagctcatcagcctgctcgctcggcagtgggaggcattatgtggcagggagttacctgtcgaattgactgggtag

SEQ ID NO: 286971 - DNA, 1287 bp, Artificial Sequence
  derived and/or modified sequence
atggccaccgcccggaccttcggccccgagcgggaggccgagcccgcgaaggaggcccgtgttgtgggcagcgaactggtggatacctatactgtgtacatcatccaggtgaccgatggatcccacgagtggaccgttaaacaccggtacagcgacttccacgatttgcacgaaaaactcgtggctgagagaaaaatcgacaaaaacctgttacctccaaagaagatcatcggcaagaattctaggtctctggttgaaaaacgcgaaaaagacctggaagtctacctccagaagcttttaactgcttgcgttttgctgtctacaaaagccgtgtatttcgtcctacatgatggactcagaaggtacttttctgagcctctgcaggacttctggcaccaaaagaatacagattacaacaattctcctttccacatttcacagtgtttcgtgctgaagctttccgatctacagtctgtgaatgtgggcttgttcgatcagcattttcgcctgacaggctccacccctatgcaagtggtgacctgtttaactcgcgattcgtatcttacacattgctttctgcagcatctaatggttgtcctgtcaagtttggaacgtactcccagccctgaacctgtggacaaagacttctattcagagttcggaaataaaactaccgggaagatggaaaactatgaactaatccattctagccgggtaaaattcacataccccagcgaggaagagattggtgacctgacctttacggtggcacagaagatggcggagcctgaaaaggcccctgccctcagcatccttttgtatgtgcaggccttccaggtagggatgcctcccccaggctgctgtagggggcctctgcgccccaagacattgctgctgacctcgtcagagattttcttactggacgaggactgtgtgcactatccacttcccgagtttgcaaaagagcctcctcaacgagatcgatatcgactcgatgacggacgacgagttcgcgacctggatagagtgttgatgggttaccaaacttatccccaggcgttgactttggttttcgatgatgtccagggacacgacttgatgggtagtgtcactcttgatcacttcggggaagttcccggcggaccagcacgagcctcacagggtagagaggtacagtggcaagtatttgttcctagcgcagagtctagggaaaagctcatctcactgctcgcacgacaatgggaggctctgtgtggacgcgagttaccagtcgaactgactggttag

SEQ ID NO: 286972 - DNA, 2457 bp, Artificial Sequence
  derived and/or modified sequence
atgggtccaccggacgtggaggaggaagagggaggaggccagggtgaagaggaagaagaagaggaggaggatgaggaagccgaggaggagaggctggcactggaatgggcactgggggcagatgaggatttcctactcgaacacatcagaatactgaaagtgctttggtgtttcctgattcatgtgcagggctccattcgacagttcgccgcatgtctagtgctgacagacttcgggatcgccgtctttgagattccacatcaggagtcccgaggaagcagccagcacatcttatcatccctgcggtttgtgttttgttttccacacggcgacttgacagagttcggattcttaatgccagagctgtgcctagtactgaaagttcgccacagcgaaaacactcttttcatcatttctgacgctgccaatctccacgagttccatgccgacctgcgttcttgctttgctcctcagcatatggctatgctctgcagtccaatcctgtacgggtcccacacatccttacaggaatttctccggcagttgttaacattttataaggttgctggtggatgtcaggagcgctcccaggggtgttttcctgtttacttggtgtactccgataaacgtatggtgcagacagctgcgggtgattactcaggcaacattgagtgggcgtcttgcacactttgctcagccgtccgacgctcctgttgtgcccctagtgaagccgtaaagagcgcagccataccttactggctgctgctcaccccccagcacctgaatgttatcaaagccgatttcaatcccatgcctaatcgcggtacccataattgtcgtaatcggaatagcttcaagctgtcacgggtacctctctctactgtgcttttagatccaaccaggagctgtacacaaccgagaggggcattcgccgatggccacgttctggaactgctagtgggatatcgattcgtcaccgcaattttcgttctgcctcatgagaagtttcactttctgagagtgtacaaccaactgagagccagcctgcaggacctgaagacagtcgtgattgccaagactcctggcaccggcggttctccccaggggtcatttgccgatggacaacccgctgagcgacgggctagcaacgaccagcgccctcaagaggtcccagcggaggccctggccccagcaccagcggaagtgccggctcccgcaccagccgctgcatcggcttccggaccggctaaaaccccagccccagcagaagccagcacctccgccctggtacctgaggagacccctgtggaagctcctgctcctcctcccgcagaggctccagcccagtacccctctgagcatcttattcaggccacaagcgaggagaaccagatcccaagtcaccttccagcctgcccttctcttaggcatgtggcatcactgaggggcagtgccattatcgagctttttcacagtagcatagcagaagtggaaaacgaggaactcagacatcttatgtggagcagcgtcgtgttctaccagactcccggattggaagtcaccgcttgcgtgctgctgagcactaaggctgtgtacttcgtcctgcatgatggcctgcgccgatatttttccgaacctctgcaggacttttggcatcaaaagaatactgattacaacaattcgcccttccatatttcacagtgctttgtcctgaagctgtccgacttgcagtcagtaaatgtggggctgtttgaccagcacttcagactcaccggctctacacccatgcaagttgtgacctgcctgacccgagatagctatctgacacattgttttctgcagcaccttatggtggtactgagctcccttgaaaggacgcctagccctgagccagtggacaaagacttttactcagagttcggaaacaagactacaggtaaaatggagaactacgagctaattcactcctcaagggtcaagttcacctatccttctgaagaagaaatcggcgatctcacattcacggttgcccagaaaatggctgagcctgaaaaggctccagctctgagtattctgctgtatgtgcaagccttccaagtggggatgcctcctcctgggtgttgcaggggccctttgcggcctaaaacgcttctgctgacctcttcagagatttttcttcttgatgaggattgtgttcattaccccttgcctgagtttgccaaagaacccccacaacgagatcgatacaggctagacgatggtcggagagtgagggacttggatcgagtgctgatgggttaccagacctacccgcaggccctgacactagtgttcgacgatgtgcaaggtcacgacctgatggggagcgcggaatcaagggagaagctaatctccctgctcgccaggcagtgggaagcgctgtgcgggagagagcttcccgttgaactgaccggctag

SEQ ID NO: 286973 - DNA, 1287 bp, Artificial Sequence
  derived and/or modified sequence
atggccactgcccgaaccttcggcccagagagagaagcagagcctgctaaggaagcgagagtggtcggctccgagctggtcgacacatacactgtgtacataatccaggtgacagacgggtctcacgagtggaccgttaaacaccggtatagcgacttccatgacctacatgaaaagctcgtggctgagcgtaaaatcgacaagaacctcctgcctcctaaaaagatcatcggaaaaaactcccgttccctggtggaaaaacgcgagaaggatctcgaagtctacctgcagaagctgctgaccgcatgtgtgttgttgtcaacaaaagccgtttactttgtgctgcatgatggattgaggcggtacttttccgaaccgctacaagatttctggcatcaaaagaacacagactataacaactccccctttcacatcagccagtgttttgttctgaaactgtccgatctgcagagcgttaacgtgggcttgttcgaccagcatttcagactcactggctcaacccccatgcaggttgtgacttgcctgactcgcgacagctacttgacgcattgcttcctgcagcatctgatggtggtgttaagctcactggaaaggacccctagtcctgaaccggtagataaagacttctattcggagttcggcaataagactactggcaagatggaaaattatgagctgatacacagctcaagggtgaagtttacctacccctccgaagaggaaataggagatctcacctttacagtcgctcagaagatggccgaacccgagaaggccccagcactgtccatcttgctctatgtccaggcattccaggttggcatgcctccaccgggttgctgtagaggcccattgcggcctaaaaccctgttgctgacatcctcggagatcttcctgttagacgaggattgtgtgcattaccccctgccagagtttgctaaggagccaccacagagagacagataccggctggacgatggcaggagggtccgtgacctcgaccgggtgcttatgggatatcagacctatccgcaggccctgaccctcgtgttcgacgatgtacaggggcatgacctgatgggctcagtgacactggaccattttggtgaagtgcccggaggccctgcacgggcaagtcaagggagagaagtacagtggcaggtctttgtgcccagtgcagagagccgggaaaagctgatttcactgctggcgagacagtgggaagccttatgcggacgcgagctgccagtggagcttacggggtag

SEQ ID NO: 286974 - protein, 284 aa, Artificial Sequence
  derived and/or modified sequence
MASLQRKGLQARILTSEEEEKLKRDQTLVSDFKQQKLEQEAQKNWDLFYKRNSTNFFKDRHWTTREFEELRSCREFEDQKLTMLEAGCGVGNCLFPLLEEDPNIFAYACDFSPRAIEYVKQNPLYDTERCKVFQCDLTKDDLLDHVPPESVDVVMLIFVLSAVHPDKMHLVLQNIYKVLKPGKSVLFRDYGLYDHAMLRFKASSKLGENFYVRQDGTRSYFFTDDFLAQLFMDTGYEEVVNEYVFRETVNKKEGLCVPRVFLQSKFLKPPKNPSPVVLGLDPKS

SEQ ID NO: 286975 - DNA, 855 bp, Artificial Sequence
  derived and/or modified sequence
atggccagcctgcagagaaagggcctgcaggccagaatcctgaccagcgaggaggaggagaagctgaagagagaccagaccctggtgagcgacttcaagcagcagaagctggagcaggaggcccagaagaactgggacctgttctacaagagaaacagcaccaacttcttcaaggacagacactggaccaccagagagttcgaggagctgagaagctgcagagagttcgaggaccagaagctgaccatgctggaggccggctgcggcgtgggcaactgcctgttccccctgctggaggaggaccccaacatcttcgcctacgcctgcgacttcagccccagagccatcgagtacgtgaagcagaaccccctgtacgacaccgagagatgcaaggtgttccagtgcgacctgaccaaggacgacctgctggaccacgtgccccccgagagcgtggacgtggtgatgctgatcttcgtgctgagcgccgtgcaccccgacaagatgcacctggtgctgcagaacatctacaaggtgctgaagcccggcaagagcgtgctgttcagagactacggcctgtacgaccacgccatgctgagattcaaggccagcagcaagctgggcgagaacttctacgtgagacaggacggcaccagaagctacttcttcaccgacgacttcctggcccagctgttcatggacaccggctacgaggaggtggtgaacgagtacgtgttcagagagaccgtgaacaagaaggagggcctgtgcgtgcccagagtgttcctgcagagcaagttcctgaagccccccaagaaccccagccccgtggtgctgggcctggaccccaagagctag

SEQ ID NO: 286976 - DNA, 855 bp, Artificial Sequence
  derived and/or modified sequence
atggcttccctgcagcgcaaaggactgcaggccaggatcttgacatccgaggaggaggagaaactcaaacgggaccagacactggtcagtgacttcaaacagcaaaaactcgagcaggaagcccagaaaaactgggacctgttttataagcgcaactcaactaatttcttcaaagatagacattggacaactcgggagtttgaagagttaagatcctgtagagagttcgaagatcagaagttgactatgttggaggctggatgtggcgtcgggaactgtttgttcccgctgctggaggaggatccaaacatttttgcatatgcatgtgactttagcccaagagctattgagtacgtgaagcagaatcctctgtatgacacggaacgatgcaaagttttccagtgtgacctgactaaggatgaccttcttgatcacgtgccacctgaaagcgtggatgtcgtcatgctgatcttcgtcctgagtgccgtgcatccggacaaaatgcacctggttctgcagaatatatacaaagttcttaagcctggaaagagcgtgctgtttcgcgattatggcctgtatgaccacgcaatgctgcgatttaaagcgtctagtaaactgggggagaatttctacgtgcggcaggacggcactaggtcatatttttttacggacgactttttagctcagctgttcatggacacaggatatgaagaggtcgtgaacgaatacgtcttccgggagaccgtgaacaagaaggaaggattatgcgtcccaagggtattcttgcaatccaaattcctgaagccaccaaagaacccctctcctgtcgtgctcggtctggaccccaagagttag

SEQ ID NO: 286977 - DNA, 855 bp, Artificial Sequence
  derived and/or modified sequence
atggcatctctgcagcgcaaagggctccaggcccgcatcctaacctccgaagaagaggaaaagcttaagcgagaccagaccttggtgtctgacttcaaacagcagaagttggagcaagaggcccagaagaattgggacttgttctacaagagaaattccacgaatttctttaaggacaggcattggacaacgcgggagtttgaagagcttcggagctgcagagaatttgaggatcaaaaattgactatgctcgaggctggatgtggtgttggaaactgcttatttccactgttagaggaggaccctaacatcttcgcatacgcctgcgacttctctcctagagctatagagtatgtgaagcagaacccgctatacgacactgaacggtgcaaggtattccaatgtgatctgacaaaggacgacctattggatcacgttcctccagaatccgtggacgttgtcatgctaattttcgtgctcagcgctgtgcatccagacaaaatgcacctggtgctgcaaaatatctacaaagtactcaaacctgggaaatctgtgttgttcagggactatgggctgtacgaccacgctatgttgcggttcaaagcctcttctaagcttggcgaaaacttctatgttaggcaggatgggacccgtagttacttctttactgatgactttctcgcgcagctgttcatggacactggttacgaagaagtcgtgaacgaatacgtctttagggagacggtcaataaaaaagagggcttgtgtgtgccaagagtgtttctgcaatcaaagtttctaaagcccccaaaaaacccgtcaccggttgtactcgggttagacccaaaatcttag

SEQ ID NO: 286978 - DNA, 855 bp, Artificial Sequence
  derived and/or modified sequence
atggccagcctgcagaggaagggcctgcaggcccgcatcctgaccagcgaggaggaggagaagctgaagagggaccagaccctggtgtctgacttcaagcagcagaagctggagcaggaggcccagaagaactgggacctcttctacaagaggaacagcaccaacttcttcaaggacagacactggaccacccgggagtttgaggagctgcggagctgccgggagtttgaggaccagaagctgaccatgctggaggccggctgcggcgtgggcaactgcctcttccccctgctggaggaggaccccaacatctttgcctatgcctgtgacttcagcccccgggccatcgagtatgtgaagcagaaccccctgtatgacacagagcgctgcaaggtgttccagtgtgacctgaccaaggatgacctgctggaccacgtgcccccagagagcgtggatgtggtgatgctgatctttgtgctgtctgctgtgcacccagacaagatgcacctggtgctgcagaacatctacaaggtgctgaagccaggcaagtctgtgctcttccgggactatggcctgtatgaccacgccatgctgcgcttcaaggccagcagcaagctgggggagaacttctacgtgcggcaggacggcaccaggagctacttcttcacagatgacttcctggcccagctgttcatggacaccggctatgaggaggtggtgaatgaatatgtgttccgggagaccgtgaacaagaaggagggcctgtgtgtgcccagggtcttcctgcagagcaagttcctgaagccacccaagaaccccagccctgtggtgctgggcctggaccccaagagctag

SEQ ID NO: 286979 - DNA, 855 bp, Artificial Sequence
  derived and/or modified sequence
atggccagcctgcagcggaagggcctgcaggcccggatcctgaccagcgaagaagaggaaaagctcaaacgcgatcagacactggtatcagactttaagcagcagaagctggagcaggaggcccagaagaattgggatctcttctataaaaggaacagcacgaatttcttcaaggatcggcactggacaacgcgcgagtttgaggagctaagatcttgccgggagttcgaggatcaaaaactgaccatgttagaagccggatgcggggtgggaaactgtctcttccctttgctagaggaggacccaaacattttcgcatatgcttgtgactttagtccgcgggcaatcgagtacgtaaaacagaaccctctgtatgacacggaaagatgcaaagtcttccagtgtgatctgactaaagatgacctcctggaccatgtgccacctgaatcagtggacgtcgtcatgctgatattcgtgctgtcagctgtgcaccccgataaaatgcatttggtacttcagaacatctacaaggtcctcaagcccggaaagtctgtgctctttcgtgactacggtctatacgaccatgcaatgcttcgctttaaggccagtagcaagctaggcgaaaacttttatgttaggcaggacggcacacgctcctatttctttaccgacgattttctagcccagttattcatggatactggttacgaggaggtagttaacgagtatgtgttccgggaaactgtaaataagaaagaaggactttgcgttccccgcgtgtttcttcagagcaaatttctgaaacctcctaaaaacccctctcccgtggttctgggtctagatccgaaatcatag

SEQ ID NO: 286980 - DNA, 855 bp, Artificial Sequence
  derived and/or modified sequence
atggccagcctgcagcggaagggcctgcaggcccggatcctgacctcggaagaggaggaaaagcttaaaagagaccagactttagttagcgactttaagcaacagaaattagagcaggaagcccagaaaaactgggacttattttataaaagaaacagcaccaatttcttcaaggacaggcactggactaccagggagttcgaggaactaagaagctgcagagaatttgaagatcagaagcttaccatgctggaagctggctgcggggttggcaattgtctgttccccctcctggaagaggatcccaatatctttgcttatgcatgtgacttctcccccagagctattgagtacgtgaaacagaaccccctgtacgatacagaaagatgcaaggttttccagtgtgatctgacgaaagatgatctgttagatcacgtccctcctgaaagtgtggatgtggtcatgctcatcttcgtcttgtctgccgtgcatcccgacaaaatgcatctggtgctgcagaatatttataaggtgttgaaacccgggaagtccgtgctgtttcgagactacggcttgtacgatcatgccatgctgagatttaaagcaagctcaaagctgggagaaaacttttacgttcgccaggacgggacccgctcatacttttttacagatgattttctcgcacaactgtttatggataccggatatgaggaggtagtgaacgagtacgtctttagggagacggtgaataaaaaggaaggtctctgtgtacctcgggtgtttctgcagagcaagttcttgaagcccccaaaaaacccatctcctgtggtgttgggcctggatccaaaaagctag

SEQ ID NO: 286981 - DNA, 1335 bp, Artificial Sequence
  derived and/or modified sequence
tgccatggcaaaagaactcccggataatccgaattcgtggtcctcagaattggtttagggttgtttcgcggttcttcccgtattctgcctccgaggcccagtggggctggctgtgggccccctgtgctgtttgaggcgtgaaactcacctcaggaaatgtatctgatccattagcgtggattcatattatttggtgatggagaatcttcagctgtgttaagtgttaccgtcagtttcagagatggcttctttgcaaaggaaagggctgcaggcaaggattctcacctctgaagaagaggagaaactgaaaagagaccaaactttggtgtctgattttaaacagcagaaattggaacaagaggctcagaaaaattgggatcttttttacaaaagaaatagcactaatttcttcaaagacagacactggaccaccagagagtttgaggagctaagatcatgtagagagtttgaagatcaaaagttaacaatgcttgaagctggctgtggggttggaaactgtttattcccacttttagaagaagatccgaatatctttgcctatgcctgtgatttttctccaagagccattgaatatgttaagcaaaatcctttatatgatacagaaagatgcaaggtattccagtgtgatctgactaaagatgatcttctggatcatgtaccgccagagtctgtggatgttgttatgttgatatttgtgctgtcagctgttcatcctgataagatgcaccttgtcttacaaaacatttacaaggtattaaaaccaggcaaaagtgtcttgtttcgtgactacggactgtatgatcatgccatgcttaggtttaaagccagcagcaaacttggagaaaacttttatgttagacaagatgggaccagatcatatttttttactgatgacttcctggctcagctctttatggacacaggttatgaagaagtggtaaacgagtatgtgtttcgagagacggtgaataaaaaagaaggcctgtgtgtgccaagagttttccttcagagcaaatttctaaagcctcctaagaacccatctcctgtggtcctgggcctggatcctaagtcctgacctttcatgaggttggcatttataccttcccttgaagaggaaaatttaaaatcactctttcgtctgggtgcggtggctcatgcctgtaatcccagcacttcgggaggccgaggttgggggatcatctgaggtcaggagtttgagaccagcctggccaacatggtgagaccccatctctactaaaaatacaaaaaaattagctgggcatagtggcgagtgcctgtaatcccagctactca

SEQ ID NO: 286982 - DNA, 4020 bp, Artificial Sequence
  derived and/or modified sequence
tgccatggcaaaagaactcccggataatccgaattcgtggtcctcagaattggtttagggttgtttcgcggttcttcccgtattctgcctccgaggcccagtggggctggctgtgggccccctgtgctgtttgaggcgtgaaactcacctcaggaaatgtatctgatccattagcgtggattcatattatttggtgatggagaatcttcagctgtgttaagtgttaccgtcagtttcagagatggcttctttgcaaaggaaagggctgcaggcaaggattctcacctctgaagaagaggagaaactgaaaagagaccaaactttggtgtctgattttaaacagcagaaattggaacaagaggctcagaaaaattgggatcttttttacaaaagaaatagcactaatttcttcaaagacagacactggaccaccagagagtttgaggagctaagatcatgtagagagtttgaagatcaaaagttaacaatgcttgaagctggctgtggggttggaaactgtttattcccacttttagaagaagatccgaatatctttgcctatgcctgtgatttttctccaagagccattgaatatgttaagcaaaatcctttatatgatacagaaagatgcaaggtattccagtgtgatctgactaaagatgatcttctggatcatgtaccgccagagtctgtggatgttgttatgttgatatttgtgctgtcagctgttcatcctgataagatgcaccttgtcttacaaaacatttacaaggtattaaaaccaggcaaaagtgtcttgtttcgtgactacggactgtatgatcatgccatgcttaggtttaaagccagcagcaaacttggagaaaacttttatgttagacaagatgggaccagatcatatttttttactgatgacttcctggctcagctctttatggacacaggttatgaagaagtggtaaacgagtatgtgtttcgagagacggtgaataaaaaagaaggcctgtgtgtgccaagagttttccttcagagcaaatttctaaagcctcctaagaacccatctcctgtggtcctgggcctggatcctaagtcctgacctttcatgaggtctcaaacaaaagtctggaacctgggattctttgtaggatatctggctgtgcttttgtattatatgaaccacagaaaataatcttccagtatgatattgttttcagtatagtacctcaaccctaattttgcctggtaaccctttatccagagaccttttgttttcaacttacagtcttattctggggtgggggatgtacagtctggctgtgtggacttgcaggagagatttagggttctaacttcttcttactgacttccaaccaattctcctgtattcagtcttatacacacccccacttatactagacgtagctggtactaccaaagcctggtcacaaaactctatgggagtctcaatgcaagttgagttgcttcttgactttcatccctgctggcttaagactcagcttcacaagcctgctaagtcagttgctatttatcctgttttctagcccttcaaaattttaaatgaaaatttacatttttaattgacaaataatatatatatgggataaatatgatgttttgatagtaatagatgtatacattgtggaatgattatatgaagctaattagcatatcacactcctcacatacttctttttctttgtattgagaacatgtaaaatctattcttggccaagcatggtggctcacacctgtaattccaacactttgagaggccaaggcaggaagattgcttgagcccaggaattcaggggttccagacaccagcctgggcaacatagcaataccctgtctctaataaaaaaaaaaaaaagtaaaaataaatgtgtaatttaaaaaattcattattgttattatttttacaattttgaaactgtaggggccaggaacaaacttcccctttgccctctgaagaataactaaaaaatcactcaccaaatgcagattaataggagaaatggaataaaaacttagtaattgttttccttggtggatcccttaggtctttatgtagatagggaaaaggtttcttctagcatctgttgattgctaaggacatttaattcaaaatactcattataccagggagccatatctgggggtaaaattccagatgctccttcaaagtatacattattattgactatggtcaccatgtacagtagatctcaaaaacgtattccccctggctaactgaaatgtgtgccctttggtcaacatctcccctactcctctcctcccccagcctctggtaaccaccattctactttctgctgctgtgagttcaactttttaaaattccacgtataagtgaaatcatgtggtatttgtctttctgaatctggcttatttcacttagcataatatcttccaggttcacccatgttgttgcaaatgatagaatgtccttgtttctaatgttctcccaaatttaatcagttgtatggggtttatgtgataaaaatatccttttgctgtcattttcgtggggtttccagaaggatcctaactaggtacacatgcttagtctgtcttttttttttttttttttttgaagcaagtctccctctgttgccaggctggagtgcagtggcctgatcatgactcattgcaacctctgcctcccaggcccaagcaatcctcctacctcagcctccaagtagctgggactgaaggtgtgtgccagcatgtgtggctaattttatttttgtaaagacagagtctccttatattgcccaggctggtctcaaactcctgggttcgagatcctcctgcctctgcctcccaaagtgctgggattacaggcatgagccatggtgcctggtctagtctgtcatctttaaacaattgggttgggaaggaaaaggtagcacatagatagatgatttaagcagaaatagataagcataattgtccactgtaaaggggctgaatgatctggagaatggaggcatctcaggaaaactgaacttggtggtgtgtgcttaggactaatgaaaagtggccgggcacagatgctcatgcctataatcccagcacttcgggagggtgagagggagtataatttgaggccaggaattcaaggttgcagtgagccatgattgtgccactgttctccagcctgggcagcagagtgagaccccgactcttaaaaaaaaaaaaaaaagaaccaaagaaatgttagttccagggattcccagggacatgggcagggtccaagaatgatgctgagttaaggttaggtggctattcagaaagctacttcgacttgtatcccatattatggatcaaggaccttaaaaatagccatactttttttttgttctagtaactcaatttgtaggattgtttcctaagagataatctgacatattcaaggacttcttcacaaagatattcattagctgcattatttatagtaccaaacattataaatagtctaaaccagagatccacaagctatggctataacagtgacaaggaggcctagcgtgactaactccattttgctcctaacccccctgcagcgataacctgtatcttttaggttaactgcttttgcttatctctgcacataggccaagctaactatagaaggaatttagtttatagtttagagcaaggatggtaatagtgcctcccccaaaactaacccctgaggagataaggaggatgtatgcaagtaataatgttatgttaaagatttataagagcactgtgacctgaccaaggacaaagtttcaccacctccttggacccttgccaccacccagatgtgatcactggccacttcttgacctcaactccctccctcttcccccttcctctcacgtaaaaggagcctgaaatttgtattgacttaaaaatggttcttcaggacactactcttccattttcttggtttgctggctctctgaataaaagtcactttccttgcctcaa

SEQ ID NO: 286983 - DNA, 855 bp, Artificial Sequence
  derived and/or modified sequence
atggcctcccttcaaaggaaagggctgcaggcacgtatcctgacctccgaagaagaggaaaaacttaagagggaccaaaccttagtctctgattttaagcaacaaaaactggaacaggaagcccagaagaactgggatctgttctataagagaaactcgacaaatttttttaaggaccgacactggactacccgagagtttgaggagctgcgcagttgtcgagagttcgaagatcaaaagctgactatgctagaggcaggctgcggggtcgggaattgtctattcccactgctagaagaagatccgaatatatttgcttatgcttgtgacttcagtccccgagccatagagtacgtgaaacagaaccccctatatgatacagagcggtgcaaagtatttcagtgtgatcttacaaaagacgaccttctggatcacgtcccaccggagtccgttgacgtggtgatgttgatattcgttctctcggcagtgcacccggataagatgcaccttgtgttacagaatatttacaaagtgttgaaacctgggaagtccgtgctatttagggattatggtttatatgaccatgccatgctgcggtttaaagccagctccaaactcggtgagaatttttatgtccggcaagacggcacgaggtcgtacttttttaccgacgatttcttggctcaactgttcatggataccggatacgaagaggtagttaacgaatatgtgttccgggaaactgtgaataagaaagagggcctttgcgtgccacgggtcttcttacagtccaaatttctcaaaccccctaaaaatccatcaccggtcgtcctcggactcgatccaaagagctag

SEQ ID NO: 286984 - DNA, 855 bp, Artificial Sequence
  derived and/or modified sequence
atggctagtcttcaacggaaggggctgcaggccagaattctgacaagcgaggaggaggagaagttaaaacgggaccagaccctagtaagtgattttaaacagcagaaactagagcaagaggcccaaaagaactgggatctattctacaagaggaattcgaccaacttcttcaaggatcgtcactggactacacgcgagttcgaggaactgcggtcatgtagagagtttgaggaccagaagctcaccatgctcgaagcgggatgtggcgttggcaactgcctctttccactgctggaggaggaccccaacatttttgcctatgcctgtgactttagtcctcgtgcgatagaatatgttaaacagaatcctctttatgataccgagcggtgtaaggtgtttcagtgcgacctgacgaaggatgatctgctcgaccacgtgccaccagagagcgtcgacgtcgtcatgttgatatttgtactgtccgccgttcaccccgataagatgcatctcgtgctacaaaacatctataaggtgctgaaacccggtaagtcagtcctgttcagggattacggcctgtatgatcatgccatgttacgattcaaggctagttctaaactgggtgagaatttttatgtgcgtcaagacggtaccagatcctatttttttacagacgatttccttgcacagttatttatggacacagggtatgaagaagtggtcaatgagtacgtgttccgtgagactgtgaacaagaaggaagggctttgcgtgcctagggtctttctgcagagtaagtttctcaaaccccctaagaacccttctcccgtggttcttgggctcgaccctaagagttag

SEQ ID NO: 286985 - protein, 550 aa, Artificial Sequence
  derived and/or modified sequence
PAPASRKLLPRRHLSEKSHHISIPSPDISHKGLRSKRTQPSDPETWESLPRLDSQRHGGPEFSFDLLPEARAIRVTISSGPEVSVRLCHQWALECEELSSPYDVQKIVSGGHTVELPYEFLLPCLCIEASYLQEDTVRRKKCPFQSWPEAYGSDFWKSVHFTDYSQHTQMVMALTLRCPLKLEAALCQRHDWHTLCKDLPNATARESDGWYVLEKVDLHPQLCFKFSFGNSSHVECPHQTGSLTSWNVSMDTQAQQLILHFSSRMHATFSAAWSLPGLGQDTLVPPVYTVSQARGSSPVSLDLIIPFLRPGCCVLVWRSDVQFAWKHLLCPDVSYRHLGLLILALLALLTLLGVVLALTCRRPQSGPGPARPVLLLHAADSEAQRRLVGALAELLRAALGGGRDVIVDLWEGRHVARVGPLPWLWAARTRVAREQGTVLLLWSGADLRPVSGPDPRAAPLLALLHAAPRPLLLLAYFSRLCAKGDIPPPLRALPRYRLLRDLPRLLRALDARPFAEATSWGRLGARQRRQSRLELCSRLEREAARLADLG

SEQ ID NO: 286986 - protein, 150 aa, Artificial Sequence
  derived and/or modified sequence
MATQADLMELDMAMEPDRKAAVSHWQQQSYLDSGIHSGATTTAPSLSGKGNPEEEDVDTSQVLYEWEQGFSQSFTQEQVADIDGQYAMTRAQRVRAAMFPETLDEGMQIPSTQFDAAHPTNVQRLAEPSQMLKHAVVNLINYQDDAELAT

SEQ ID NO: 286987 - protein, 100 aa, Artificial Sequence
  derived and/or modified sequence
MATQADLMELDMAMEPDRKAAVSHWQQQSYLDSGIHSGATTTAPSLSGKGNPEEEDVDTSQVLYEWEQGFSQSFTQEQVADIDGQYAMTRAQRVRAAMFP

SEQ ID NO: 286988 - protein, 108 aa, Artificial Sequence
  derived and/or modified sequence
MATQADLMELDMAMEPDRKAAVSHWQQQSYLDSGIHSGATTTAPSLSGKGNPEEEDVDTSQVLYEWEQGFSQSFTQEQVADIDGQYAMTRAQRVRAAMFPETLDEGMQ

SEQ ID NO: 286989 - DNA, 453 bp, Artificial Sequence
  derived and/or modified sequence
atggccacacaggcagacttgatggaactggacatggctatggagccagacagaaaggctgccgtgtcacactggcagcagcagagctatctggactcagggatacacagtggagccactacaaccgctcctagccttagcggaaagggaaaccccgaggaggaagatgtcgatacttctcaggtgttatacgaatgggaacaggggttctcacagtcgtttacccaggaacaagtcgcagatattgatgggcagtatgctatgactagagcgcagagagtgcgggcagccatgttcccagagaccctcgacgaaggtatgcaaattccaagcacccagtttgatgcggcacatcccacaaatgtccaacgattggctgagccaagtcagatgctgaaacatgctgtggtaaacttgatcaattatcaggatgacgcagagctcgcgacttag

SEQ ID NO: 286990 - DNA, 303 bp, Artificial Sequence
  derived and/or modified sequence
atggccacacaggcagacctgatggagctcgacatggccatggaacccgacaggaaagccgctgtgagtcattggcagcagcagtcttatttggattcgggaatacactctggagcaaccacgactgctccttccctgtcagggaagggcaacccagaggaagaggacgtcgacaccagccaggtactctacgaatgggagcagggattttcacagtcatttactcaagagcaggtggccgacatagacgggcagtacgcgatgaccagagcccagcgagtgcgagcagcgatgtttccctag

SEQ ID NO: 286991 - DNA, 327 bp, Artificial Sequence
  derived and/or modified sequence
atggcgacacaggcagacctcatggagctggatatggctatggagcccgaccgcaaggccgcagtgagccactggcaacagcagagctacctggacagcggtatccatagcggagccaccactaccgctccttccctgagtggaaaagggaaccccgaagaagaggacgtggatactagtcaagtactctacgagtgggaacaaggcttctcacagagttttacgcaggaacaggtggccgatatcgatggacaatatgccatgacccgcgcacagagggtgcgggcggccatgtttcctgaaacacttgacgaagggatgcagtag

SEQ ID NO: 286992 - DNA, 453 bp, Artificial Sequence
  derived and/or modified sequence
atggccacccaggccgacctgatggagctggacatggccatggagccagacaggaaggctgctgtgagccactggcagcagcagagctacctggacagcggcatccacagcggggccaccaccacagcccccagcctgtctggaaaaggaaatcctgaggaggaggatgtggacaccagccaggtgctgtatgagtgggagcagggcttcagccagagcttcacccaggagcaggtggccgacattgatggccagtatgccatgacccgggcccagagggtgcgggccgccatgtttcctgagaccctggatgagggcatgcagatccccagcacccagtttgatgctgcccaccccaccaacgtgcagaggctggccgagcccagccagatgctgaagcatgctgtggtgaacctgatcaactaccaggatgatgctgagctggccacctag

SEQ ID NO: 286993 - DNA, 303 bp, Artificial Sequence
  derived and/or modified sequence
atggccacccaggccgacctgatggagctggacatggccatggagccagacaggaaggctgctgtgagccactggcagcagcagagctacctggacagcggcatccacagcggggccaccaccacagcccccagcctgtctggaaaaggaaatcctgaggaggaggatgtggacaccagccaggtgctgtatgagtgggagcagggcttcagccagagcttcacccaggagcaggtggccgacattgatggccagtatgccatgacccgggcccagagggtgcgggccgccatgttcccctag

SEQ ID NO: 286994 - DNA, 327 bp, Artificial Sequence
  derived and/or modified sequence
atggccacccaggccgacctgatggagctggacatggccatggagccagacaggaaggctgctgtgagccactggcagcagcagagctacctggacagcggcatccacagcggggccaccaccacagcccccagcctgtctggaaaaggaaatcctgaggaggaggatgtggacaccagccaggtgctgtatgagtgggagcagggcttcagccagagcttcacccaggagcaggtggccgacattgatggccagtatgccatgacccgggcccagagggtgcgggccgccatgtttcctgagaccctggatgagggcatgcagtag

SEQ ID NO: 286995 - DNA, 453 bp, Artificial Sequence
  derived and/or modified sequence
atggccacccaggccgacctgatggagctggacatggccatggagcccgaccgtaaagcagcagtgagccactggcagcagcagagctatctggactctggaatccactccggggctaccactacagccccttcacttagtggaaagggcaatccagaagaggaggacgtggacaccagccaagtgctttatgaatgggagcagggcttctcccagtcttttacacaggagcaggtagctgacatcgacggtcagtatgccatgacccgcgcccagcgggtcagagcggccatgttccctgagactttggatgagggcatgcagattccgtcaacacagtttgatgctgcccatcctacaaacgtgcagaggttggccgaaccctcacagatgttgaagcatgctgtcgtcaacctgatcaattatcaagatgacgctgagctcgctacatag

SEQ ID NO: 286996 - DNA, 303 bp, Artificial Sequence
  derived and/or modified sequence
atggccacccaggccgacctgatggagctggacatggccatggagccagacaggaaggccgccgttagtcactggcagcagcaatcatatctggattctgggattcactctggcgcaaccaccactgcaccaagtctctctggcaaaggaaaccctgaggaggaagacgtcgacacaagtcaggtgctatacgagtgggagcaaggtttcagtcagtcattcacccaggagcaggttgcagatattgatggccaatacgccatgacaagagcccagagagtcagggctgcaatgttcccttag

SEQ ID NO: 286997 - DNA, 327 bp, Artificial Sequence
  derived and/or modified sequence
atggccacccaggccgacctgatggagctggacatggccatggagcccgaccgaaaagctgccgtgtcacactggcagcagcagtcataccttgatagcggaattcactccggagcaacaaccacagccccctcactcagcggaaagggtaaccccgaggaagaagatgtagacaccagtcaggtactctacgagtgggaacaaggctttagtcagtcttttacacaagaacaggtggctgacatagacggtcagtatgccatgacccgagctcagagagtccgcgcagccatgtttcctgagacgcttgatgaaggaatgcagtag

SEQ ID NO: 286998 - DNA, 453 bp, Artificial Sequence
  derived and/or modified sequence
atggccacccaagccgacttgatggaactggatatggccatggagcccgatcgaaaagccgctgtgtcccactggcaacagcagagctacttagattccggtatacacagtggagcgaccactacagcgcctagtctatcagggaaaggaaaccctgaggaagaagacgttgacaccagtcaagttctttacgaatgggagcagggcttcagccagagcttcacccaagagcaagtggcagacattgatggacagtacgccatgactagggcccaacgggtgcgcgctgctatgttcccggagaccctggatgaaggcatgcagataccttcaacacagttcgacgctgcacaccctacaaacgtccagcgcttagctgagccgtcacaaatgctcaagcatgctgtggtgaatctgatcaactaccaggacgatgcagagcttgccacttag

SEQ ID NO: 286999 - DNA, 303 bp, Artificial Sequence
  derived and/or modified sequence
atggccacacaggccgatctcatggaactggatatggctatggaacctgaccgcaaggctgcggtttctcattggcagcagcaatcctacctggactccggcattcattccggagcaaccactaccgccccatccctaagcgggaaaggcaaccccgaagaggaggacgtggacacctctcaagtgctgtacgaatgggaacaaggcttttcccagtcctttacacaggaacaggttgctgatattgacgggcagtacgcaatgacccgggcacagcgggttagggcggcaatgtttccgtag

SEQ ID NO: 287000 - DNA, 327 bp, Artificial Sequence
  derived and/or modified sequence
atggctactcaagctgatttgatggaactggatatggccatggagccggatagaaaagctgccgtgtctcactggcagcagcagtcctacctcgatagcggtatccattccggggcaaccacaactgctcctagcctctccggcaagggcaatccagaagaggaggacgtggatacgagccaggtgctctacgagtgggagcaggggttcagtcagagctttactcaggaacaggtggccgatattgatgggcagtatgcgatgacccgagctcagagggtgagagctgctatgttccccgagactctcgacgaagggatgcaatag

SEQ ID NO: 287001 - DNA, 634 bp, Artificial Sequence
  derived and/or modified sequence
aggtactcctaaggacttgttgaattgcgggcttggcgcccgttctacggagagttcacagccttcgtgagtggggacagaaggcggctcggcccggtgattcaggtcgaaattcaagctgaacagcctgctgagagggtatttgaagtataccatacaactgttttgaaaatccagcgtggacaatggctactcaagctgatttgatggagttggacatggccatggaaccagacagaaaagcggctgttagtcactggcagcaacagtcttacctggactctggaatccattctggtgccactaccacagctccttctctgagtggtaaaggcaatcctgaggaagaggatgtggatacctcccaagtcctgtatgagtgggaacagggattttctcagtccttcactcaagaacaagtagctgatattgatggacagtatgcaatgactcgagctcagagggtacgagctgctatgttccctgagacattagatgagggcatgcagatcccatctacacagtttgatgctgctcatcccactaatgtccagcgtttggctgaaccatcacagatgctgaaacatgcagttgtaaacttgattaactatcaagatgatgcagaacttgccac

SEQ ID NO: 287002 - DNA, 608 bp, Artificial Sequence
  derived and/or modified sequence
aaaattttcctgaagtgattggtaagttttggctaattgggagcactagaattgggcccttaatggttggcagggtgtggtggaggagagacagcccttagtccaaaggctcaggccagaaaaagaaagaggaaggctttccttttcctttccggagcagggttctgccctaggtcttgcttggcagtctatttgatttctttagcagttaatgctcagttttttggcatatgtggatctgcctccagagcaggtacaagggtatttgaagtataccatacaactgttttgaaaatccagcgtggacaatggctactcaagctgatttgatggagttggacatggccatggaaccagacagaaaagcggctgttagtcactggcagcaacagtcttacctggactctggaatccattctggtgccactaccacagctccttctctgagtggtaaaggcaatcctgaggaagaggatgtggatacctcccaagtcctgtatgagtgggaacagggattttctcagtccttcactcaagaacaagtagctgatattgatggacagtatgcaatgactcgagctcagagggtacgagctgctatgttccct

SEQ ID NO: 287003 - DNA, 645 bp, Artificial Sequence
  derived and/or modified sequence
agttggggttcgggcgctgaggcagagacgccaccctaagtcccatcagtcctggggatcggaccagtggactttctcttaagatttcctctttcattcttaagaatagaagtgttattattttttttaatgccctggctatgtgagtttgaatcgaagcaactttaaaccttagagcaactaaactctaagtgcagcgggtgcgatgcgtcagtagggtgagcacataaaaaatccatgtcttgcacctgtattttagcgtactatgcagggtatttgaagtataccatacaactgttttgaaaatccagcgtggacaatggctactcaagctgatttgatggagttggacatggccatggaaccagacagaaaagcggctgttagtcactggcagcaacagtcttacctggactctggaatccattctggtgccactaccacagctccttctctgagtggtaaaggcaatcctgaggaagaggatgtggatacctcccaagtcctgtatgagtgggaacagggattttctcagtccttcactcaagaacaagtagctgatattgatggacagtatgcaatgactcgagctcagagggtacgagctgctatgttccctgagacattagatgagggcatgcagat

SEQ ID NO: 287004 - DNA, 453 bp, Artificial Sequence
  derived and/or modified sequence
atggccacccaggccgacctgatggagctggacatggccatggagcccgacagaaaggccgccgtgagccactggcagcagcagagctacctggacagcggcatccacagcggcgccaccaccaccgcccccagcctgagcggcaagggcaaccccgaggaggaggacgtggacaccagccaggtgctgtacgagtgggagcagggcttcagccagagcttcacccaggagcaggtggccgacatcgacggccagtacgccatgaccagagcccagagagtgagagccgccatgttccccgagaccctggacgagggcatgcagatccccagcacccagttcgacgccgcccaccccaccaacgtgcagagactggccgagcccagccagatgctgaagcacgccgtggtgaacctgatcaactaccaggacgacgccgagctggccacctag

SEQ ID NO: 287005 - DNA, 303 bp, Artificial Sequence
  derived and/or modified sequence
atggccacccaggccgacctgatggagctggacatggccatggagcccgacagaaaggccgccgtgagccactggcagcagcagagctacctggacagcggcatccacagcggcgccaccaccaccgcccccagcctgagcggcaagggcaaccccgaggaggaggacgtggacaccagccaggtgctgtacgagtgggagcagggcttcagccagagcttcacccaggagcaggtggccgacatcgacggccagtacgccatgaccagagcccagagagtgagagccgccatgttcccctag

SEQ ID NO: 287006 - DNA, 327 bp, Artificial Sequence
  derived and/or modified sequence
atggccacccaggccgacctgatggagctggacatggccatggagcccgacagaaaggccgccgtgagccactggcagcagcagagctacctggacagcggcatccacagcggcgccaccaccaccgcccccagcctgagcggcaagggcaaccccgaggaggaggacgtggacaccagccaggtgctgtacgagtgggagcagggcttcagccagagcttcacccaggagcaggtggccgacatcgacggccagtacgccatgaccagagcccagagagtgagagccgccatgttccccgagaccctggacgagggcatgcagtag

SEQ ID NO: 287007 - DNA, 237 bp, Artificial Sequence
  derived and/or modified sequence
ggtgaagggaccgctgcagcttcagcaggcggatttgggtttggaagctctagtaatactacatcctttgggacactggcctctcagaatgcaccaacatttggaagcctgtcccagcagacttctgggttcggaacccagtctagcggattttctggtttcggatcggggacaggtgggtttagcttcggaagcaacaacagctcggtccaggggttcggcggttggagaagctag

SEQ ID NO: 287008 - protein, 427 aa, Artificial Sequence
  derived and/or modified sequence
MVPVQPAEPPEVLKSEPYGEKADVWAVGCILYQMATLSPPFYSTNMLSLATKIVEAVYEPVPEGIYSEKVTDTISRCLTPDAEARPDIVEVSSMISDVMMKYLDNLSTSQLSLEKKLERERRRTQRYFMEANRNTVTCHHELAVLSHETFEKASLSSSSSGAASLKSELSESADLPPEGFQASYGKDEDRACDEILSDDNFNLENAEKDTYSEVDDELDISDNSSSSSSSPLKESTFNILKRSFSASGGERQSQTRDFTGGTGSRPRPASAGIAVSQRKVRQISDPIQQILIQLHKIIYITQLPPALHHNLKRRVIERFKKSLFSQQSNPCNLKSEIKKLSQGSPEPIEPNFFTADYHLLHRSSGGNSLSPNDPTGLPTSIELEEGITYEQMQTVIEEVLEESGYYNFTSNRYHSYPWGTKNHPTKR

SEQ ID NO: 287009 - DNA, 351 bp, Artificial Sequence
  derived and/or modified sequence
atgagactgccctgggaactgctggttctgcagtccttcatcctgtgccttgctgacgacagtacgctgcacggcccaatttttatccaggagcctagtccagtgatgttccctcttgactccgaggagaagaaagtcaaactcaactgcgaggtgaaaggaaatcctaaaccacatatcaggtggaaactcaatggcacagacgtggacactggaatggacttcagatactctgtggtggagggtagcctgctcatcaataatcctaacaagactcaggatgctggcacgtaccagtgtacagctaccaatagttttggcacaatcgtctccagggaagccaagctatag

SEQ ID NO: 287010 - DNA, 351 bp, Artificial Sequence
  derived and/or modified sequence
atgaggctgccctgggagctgctggtgctgcagagcttcatcctgtgcctggctgatgacagcaccctgcacggccccatcttcatccaggagcccagccctgtgatgttccccctggacagcgaggagaagaaggtgaagctgaactgtgaggtgaagggcaaccccaagccccacatccgctggaagctgaatggaacagatgtggacaccggcatggacttccgctacagcgtggtggagggcagcctgctgatcaacaaccccaacaagacccaggatgctggcacctaccagtgcacagccaccaacagctttggcaccatcgtgtcccgggaggccaagctgtag

SEQ ID NO: 287011 - DNA, 351 bp, Artificial Sequence
  derived and/or modified sequence
atgcggctgccctgggagctgctggtgctgcagagcttcatcctgtgcctggctgatgactcaaccctgcacgggccaatcttcattcaggagccttcaccagtgatgtttccactagactcagaggagaagaaagtgaaacttaattgcgaggtgaaggggaatccaaagcctcacatcagatggaagctgaacggtaccgacgtggacactggcatggacttccggtacagcgtggtagaggggtccctcttgataaacaatccaaacaaaacccaggatgcaggcacgtaccaatgcacagctaccaatagtttcggaacaatcgtgagtagagaggccaagttatag

SEQ ID NO: 287012 - DNA, 351 bp, Artificial Sequence
  derived and/or modified sequence
atgagactaccttgggagctcctggtactccagtccttcatcctatgcctggccgatgattccaccttacatggcccaatctttattcaggagccttctcccgtgatgttccctttggatagcgaagagaagaaggtcaaactgaactgcgaggttaaaggcaatccgaaaccacatattaggtggaagctgaacggtaccgatgttgacacgggcatggacttcagatactcagtggtggagggaagtcttctgataaacaaccctaacaagacacaagacgccggaacttaccagtgcactgcgacgaactcttttggcacaattgtcagccgcgaggcgaagctatag

SEQ ID NO: 287013 - DNA, 658 bp, Artificial Sequence
  derived and/or modified sequence
agccgccgcgagcgccgggagggagggcagcgccgcgccagacggagcccggggttcgacgccaggattggctgcaagtagggagctttcgccgccgccccgggcccctcggactgtgccggcgccgcacccgaggctctcgccagcccggcgccccggtgctgaggaatcattgacatagagtaactccacagcatgtgtcttcaagagcttccctaaaagattaaaggttatacaaaacttaaaagaagcagcaattctattcgcttgttattggacttgaaactccctttgacctcggaaactgaagatgaggttgccatgggaactgctggtactgcaatcattcattttgtgccttgcagatgattccacactgcatggcccgatttttattcaagaaccaagtcctgtaatgttccctttggattctgaggagaaaaaagtgaagctcaattgtgaagttaaaggaaatccaaaacctcatatcaggtggaagttaaatggaacagatgttgacactggtatggatttccgctacagtgttgttgaagggagcttgttgatcaataaccccaataaaacccaagatgctggaacgtaccagtgcacagcgacaaactcgtttggaacaattgttagcagagaagcaaagctt

SEQ ID NO: 287014 - DNA, 566 bp, Artificial Sequence
  derived and/or modified sequence
aagtagggagctttcgccgccgccccgggcccctcggactgtgccggcgccgcacccgaggctctcgccagcccggcgccccggtgctgagtgggtgaaaaagaacagtgtgtcatgaagacaggcacctggaggtgatttgggtggcattcatgagaaaattcacgttacccacttcgctaactgatgaaacactgccagagcccacttggactgtttcgcaactttacttaagggaataaaagctctcatgctgaggaatcattgacatagagtaactccacagcatgtgtcttcaagagcttccctaaaagattaaaggttatacaaaacttaaaagaagcagcaattctattcgcttgttattggacttgaaactccctttgacctcggaaactgaagatgaggttgccatgggaactgctggtactgcaatcattcattttgtgccttgcagatgattccacactgcatggcccgatttttattcaagaaccaagtcctgtaatgttccctttggattctgaggagaaaaaagtgaagctcaattgtgaagttaaaggaaa

SEQ ID NO: 287015 - DNA, 351 bp, Artificial Sequence
  derived and/or modified sequence
atgagactgccctgggagctgctggtgctgcagagcttcatcctgtgcctggccgacgacagcaccctgcacggccccatcttcatccaggagcccagccccgtgatgttccccctggacagcgaggagaagaaggtgaagctgaactgcgaggtgaagggcaaccccaagccccacatcagatggaagctgaacggcaccgacgtggacaccggcatggacttcagatacagcgtggtggagggcagcctgctgatcaacaaccccaacaagacccaggacgccggcacctaccagtgcaccgccaccaacagcttcggcaccatcgtgagcagagaggccaagctgtag

SEQ ID NO: 287016 - protein, 594 aa, Artificial Sequence
  derived and/or modified sequence
MPKWLEETENKKIGCTVNLMNFYKSEINKEEMYIRYIHKLCDMHLQAENYTEAAFTLLLYCELLQWEDRPLREFLHYPSQTEWQRKEGLCRKIIHYFNKGKSWEFGIPLCRELACQYESLYDYQSLSWIRKMEASYYDNIMEQQRLEPEFFRVGFYGRKFPFFLRNKEYVCRGHDYERLEAFQQRMLSEFPQAVAMQHPNHPDDAILQCDAQYLQIYAVTPIPDYVDVLQMDRVPDRVKSFYRVNNVRKFRYDRPFHKGPKDKENEFKSLWIERTTLTLTHSLPGISRWFEVERRELVEVSPLENAIQVVENKNQELRSLISQYQHKQVHGNINLLSMCLNGVIDAAVNGGIARYQEAFFDKDYINKHPGDAEKITQLKELMQEQVHVLGVGLAVHEKFVHPEMRPLHKKLIDQFQMMRASLYHEFPGLDKLSPACSGTSTPRGNVLASHSPMSPESIKMTHRHSPMNLMGTGRHSSSSLSSHASSEAGNMVMLGDGSMGDAPEDLYHHMQLAYPNPRYQGSVTNVSVLSSSQASPSSSSLSSTHSAPSQMITSAPSSARGSPSLPDKYRHAREMMLLLPTYRDRPSSAMYPAA

SEQ ID NO: 287017 - protein, 689 aa, Artificial Sequence
  derived and/or modified sequence
MIKRKIWCNLCIDLVAFTSEIFKGAVFQSLDGIVVSANCKLRKIFTLKSKPQDTADKDAVYGVPFSTDEPTDIIPRSCQLMTDVPHVTQLLNMTKLRQTEIKFGGHPLRSAESDQFINRGTSITRNSKNQDVCHIAFGSKVLGPPPLSGRRNNMKISSETVRSVGSKNNRSCQPSTVEKCVNGTEMSALLIPESEEQGNKENIHQIKQTVPIHAANLHIMHPHPPQEPSADKNNNRRRLRLKSTSRERTETPSGSSSGNNRIEDKASTILTTVSQQGAELLNSGTLGPQSPDQSDEWIFPENADHISYLASSRQSLLLGDDSCNPSHLWLEASKESEHDQQAEESQSVPKDIFTFSSRPRSAPHGKTQTMSPEELSFILDLKEDNSVTSRDTQSEDDFYGGDSSEEGNHSIQGSRGPTTGPSELTQLTLESLLGKAAKRTSKEYLRSAYTEAGATESQDSSMEQIDRNNFEMSLLPTTCLSPTGRRCGSCQKTPEPVIKAKDLSAQQVPASLNKTSLKEISGERLSSIPEASEYDWRNYQPSQMSESELQMLASLRWQQNEELEDAGTSHGLSASQVDNCNVSISTSSDDTTTWNSCLPPPVNQGRHYQKEMNPPSPSNPRDWLNMLSPPIVPPSQQPAEQRPDSCESLSVQGEEDLSVEEDEEVLTLLYDPCLNCYFDPQTGKYYELV

SEQ ID NO: 287018 - DNA, 2617 bp, Artificial Sequence
  derived and/or modified sequence
aattactgatttagggaacatcaaaagaagattatatttatcaacggtccataaggaactatcctccacccctcttcatgcaaaaattccactcttcatgatcaaacgtaaaatttggtgcaatctatgcattgacttagtagcattcaccagtgaaatattcaagggggcagttttccagtcattggatggaattgttgtctcagctaactgtaagctacggaagatcttcaccttaaaatcaaagccacaagacactgctgataaggatgctgtctatggtgttcccttttcaacagatgagcctacagatattataccacgaagctgtcaactaatgacagatgttccacatgtcacacagctgctaaacatgactaaacttcgccaaactgaaataaaattcggaggccatcctctaagatcagcagaatcagatcagttcattaacagaggaacaagtattacacggaacagtaaaaatcaagatgtttgtcatatcgcatttggatccaaagttcttgggccacctccactctctggcagaaggaataacatgaagatatccagcgagacagtgagatccgttgggtccaaaaataaccgatcatgccagccgtccactgtagagaagtgtgttaatggtacagaaatgtcagccttgctgatacctgagtctgaggaacaaggaaataaagaaaatattcaccaaataaagcagactgtacctattcatgcagccaatctacatattatgcatccgcatccccctcaagaaccatcagcagataagaataataacagaagaagattacggttaaaaagtaccagcagagaaaggacagagacacccagcggtagctcttcaggaaataataggattgaagataaagcatcaactatcctcaccactgtgtcccaacaaggagcagagctgttgaactccggcactctaggaccccagtctcctgatcaatcagatgagtggatttttcctgaaaatgctgatcacatttcatatctggcatccagcagacagtctctacttctgggtgatgactcctgcaacccatcacacctgtggctggaagccagcaaagagagtgaacacgaccagcaggcagaggaatcccagagtgttccaaaggacattttcactttttcatcaagaccacgatcagcacctcatggaaagactcagactatgtccccagaggagctctcatttattttggatctaaaagaggataacagtgtgacaagcagagacacccaatcagaggatgatttttacggcggcgacagcagtgaagagggtaaccacagtatccagggttctcgaggcccaacaactggtccttcagagttaactcagttaacattagagagcctgctggggaaggctgcaaagcggacaagtaaggaatatctaaggagcgcctacacagaagcaggagcaacagaaagccaggattcctcgatggagcaaatagatagaaataactttgaaatgagtttgttgcctacaacatgcctttctccaactggaagaaggtgtgggtcctgtcagaaaactccagagcccgtaatcaaagcgaaggatctatcagcccagcaagtgccagcttcactaaacaaaacctccctgaaagaaatctcaggggaaaggctgagctcgatccccgaagcatctgaatatgactggcgaaactatcagccaagccagatgagtgaatccgagttacagatgctagcaagcctacggtggcaacaaaatgaagaactggaggatgctgggacctcccatggcctgagtgcctcccaggtggacaactgtaatgtcagcataagtaccagcagtgacgacacaaccacctggaactcctgcctgccaccccctgtcaaccagggtcgccactatcagaaagaaatgaacccaccttctccttctaatccccgggactggttaaatatgttgagcccaccaatcgttcctcccagtcaacagccggctgagcagcgtccagattcctgtgaaagtttgagtgttcaaggtgaagaagacctcagtgtggaagaggacgaggaagtactgactttgttgtatgacccttgtctgaactgttactttgacccccaaacagggaaatactatgagttggtataatgcctccttccggggcagagagcaggcactcccagctggagcagaatagcagttcagggtcgcttaaggagtcaccacaacttatgtgttgggtgaccacaaaatcaacagtaactgagagaaacgaattcattttgtaaataatgttcaacgttaagaatacctatattccttttgtagatgagtatgattttgaaactgaagaaattaatacagaggcaagattttaggagtttgaattggttcttgtttgttctcattctacatataattttgtttatttcagataattttatgtaaacaaattaagagttattcattcaaattttttgcagtgttaatctgtaaatgatggcttgatgtacagaaaatgtatttttgcttaaaagatgcctgggtaccttttattttatggcatttgtattaaaaataaagtatgatggtaagaag

SEQ ID NO: 287019 - protein, 1513 aa, Artificial Sequence
  derived and/or modified sequence
MEPRSMEYFCAQVQQKDVGGRLQVGQELLLYLGAPGAISDLEEDLGRLGKTVDALTGWVGSSNYRVSLMGLEILSAFVDRLSTRFKSYVAMVIVALIDRMGDAKDKVRDEAQTLILKLMDQVAPPMYIWEQLASGFKHKNFRSREGVCLCLIETLNIFGAQPLVISKLIPHLCILFGDSNSQVRDAAILAIVEIYRHVGEKVRMDLYKRGIPPARLEMIFAKFDEVQSSGGMILSVCKDKSFDDEESVDGNRPSSAASAFKVPAPKTSGNPANSARKPGSAGGPKVGGASKEGGAGAVDEDDFIKAFTDVPSIQIYSSRELEETLNKIREILSDDKHDWDQRANALKKIRSLLVAGAAQYDCFFQHLRLLDGALKLSAKDLRSQVVREACITVAHLSTVLGNKFDHGAEAIVPTLFNLVPNSAKVMATSGCAAIRFIIRHTHVPRLIPLITSNCTSKSVPVRRRSFEFLDLLLQEWQTHSLERHAAVLVETIKKGIHDADAEARVEARKTYMGLRNHFPGEAETLYNSLEPSYQKSLQTYLKSSGSVASLPQSDRSSSSSQESLNRPFSSKWSTANPSTVAGRVSAGSSKASSLPGSLQRSRSDIDVNAAAGAKAHHAAGQSVRSGRLGAGALNAGSYASLEDTSDKLDGTASEDGRVRAKLSAPLAGMGNAKADSRGRSRTKMVSQSQPGSRSGSPGRVLTTTALSTVSSGVQRVLVNSASAQKRSKIPRSQGCSREASPSRLSVARSSRIPRPSVSQGCSREASRESSRDTSPVRSFQPLGPGYGISQSSRLSSSVSAMRVLNTGSDVEEAVADALLLGDIRTKKKPARRRYESYGMHSDDDANSDASSACSERSYSSRNGSIPTYMRQTEDVAEVLNRCASSNWSERKEGLLGLQNLLKNQRTLSRVELKRLCEIFTRMFADPHGKVFSMFLETLVDFIQVHKDDLQDWLFVLLTQLLKKMGADLLGSVQAKVQKALDVTRESFPNDLQFNILMRFTVDQTQTPSLKVKVAILKYIETLAKQMDPGDFINSSETRLAVSRVITWTTEPKSSDVRKAAQSVLISLFELNTPEFTMLLGALPKTFQDGATKLLHNHLRNTGNGTQSSMGSPLTRPTPRSPANWSSPLTSPTNTSQNTLSPSAFDYDTENMNSEDIYSSLRGVTEAIQNFSFRSQEDMNEPLKRDSKKDDGDSMCGGPGMSDPRAGGDATDSSQTALDNKASLLHSMPTHSSPRSRDYNPYNYSDSISPFNKSALKEAMFDDDADQFPDDLSLDHSDLVAELLKELSNHNERVEERKIALYELMKLTQEESFSVWDEHFKTILLLLLETLGDKEPTIRALALKVLREILRHQPARFKNYAELTVMKTLEAHKDPHKEVVRSAEEAASVLATSISPEQCIKVLCPIIQTADYPINLAAIKMQTKVIERVSKETLNLLLPEIMPGLIQGYDNSESSVRKACVFCLVAVHAVIGDELKPHLSQLTGSKMKLLNLYIKRAQTGSGGADPTTDVSGQS

SEQ ID NO: 287020 - DNA, 4542 bp, Artificial Sequence
  derived and/or modified sequence
atggaacccaggtctatggaatatttttgcgcccaggtacagcagaaagatgtgggtggacgcttgcaagtgggccaggaacttctgctgtacctgggggctccaggtgccatctccgaccttgaagaagaccttggaagacttggcaagactgttgacgctctcaccggttgggtagggtctagcaattatagagtgtccctgatgggcctggagatactgagtgccttcgtcgaccggttatcaacccgatttaagagctacgtggctatggtgatcgtggctctgatcgatcggatgggcgacgccaaagataaggtcagagacgaagcccaaaccctgatcctgaaactaatggaccaggttgccccccccatgtatatctgggagcagctggccagcggctttaaacataaaaacttcaggagtcgggagggcgtatgtttatgtctgatagagacgctaaatatcttcggggcgcaaccactcgttatctctaaattaataccccatctgtgcattttattcggggactcgaactcccaggtgcgggacgccgccattcttgcaatcgttgaaatttatcgccatgtgggcgagaaagtacgaatggatctctacaagagaggcattccacccgccagactggagatgatctttgccaagtttgatgaggtccagtcctcaggcggaatgatcctgtctgtctgtaaagataagtcctttgatgatgaagagtccgttgatggaaaccggccatcttctgctgccagtgcttttaaggtgccagcacccaagacctctggcaaccccgccaatagcgcaagaaaacccgggagtgccggcggtcctaaagtgggcggagctagcaaagaaggaggcgctggcgctgtggatgaagacgactttatcaaggcattcaccgatgtgcctagcatacagatttactcttcccgcgaactggaggagaccctgaataaaatccgtgagatcctgtccgatgacaaacatgactgggaccagagggcgaatgctctgaagaagattaggtctctgcttgtggctggggccgcccagtacgattgtttttttcagcacctccggcttctggatggagctctgaaattgtctgctaaagatctgcgctcgcaggtggttagagaagcatgtatcaccgtagcacacttaagtacagttctggggaacaagtttgaccacggggcagaagctattgtgccgacactctttaacctagtgcctaacagcgccaaagtgatggctacatctggatgcgctgccattcggttcatcatccgccacacacatgtgccccggctgatccccctgatcaccagtaattgcaccagcaagagtgtccccgtgcgacggcggagtttcgaattccttgaccttctcctccaggagtggcaaactcactccctggagaggcacgcggctgttctggttgaaaccataaagaaggggatccatgacgccgacgctgaggcccgtgtggaggcccggaaaacatatatggggctaaggaatcacttcccgggagaagccgagacactttataatagtcttgaaccttcttatcagaagagccttcagacctatctcaagagtagcggttctgttgcttcgcttcctcagtccgacagatctagcagtagctcccaggagagtctcaataggccctttagctcaaaatggtccacggctaacccctctactgtggctggacgcgtgtccgctggctcatccaaggcaagctctctgcctgggtctctgcaacggtccaggtctgacatcgatgtgaatgccgctgccggcgcaaaggcacaccacgcggccggacagtccgtgaggtccgggagattaggtgcgggcgctctgaacgctgggagctatgcctccctggaggataccagtgacaaacttgatggcactgcaagcgaagacgggcgtgtgcgagctaaactatcagcccccctcgctgggatgggaaatgctaaagcagattctcgcggtaggtccagaacaaaaatggtgtcccagagccagcccggcagccggtccggaagcccggggcgtgtgctcacaactaccgccctgtcaacggtctcgtctggagttcagcgtgtccttgtgaattcagctagcgcacaaaaaagatctaaaatacctaggagtcagggctgctcccgagaagcgtctcctagcagattgagcgtagcacggtcaagcagaattccacgcccaagcgtaagtcaaggttgcagtcgggaggcctccagagagtcctctagggatacgtctccagtcagatcttttcaaccacttggacctggctatggcatttcacagtcaagccgtttatccagctccgttagcgccatgagagtgctgaacaccggtagcgacgtcgaggaagctgtggccgatgcattgctgctgggagacatacgcacgaaaaagaagccagcgcgccggaggtatgagtcatacgggatgcactcagacgacgacgcaaattcagacgcttcgtccgcctgttcagaaaggtcctactcaagccgcaatggaagcatccccacatatatgcgccagaccgaggatgtagccgaagtcttaaaccgttgtgcgagctctaattggagcgagagaaaggagggcctcctggggttgcagaacctgttgaagaatcagcgcacattgtctagggtggagctaaagcgcctctgtgagattttcacccggatgttcgcagatcctcacggcaaagtgttctctatgtttctggagaccctggtagattttattcaagtgcacaaggacgacttgcaggattggcttttcgtcttgctgacccagctgctcaaaaaaatgggagcggatctgctcggttccgtgcaggcaaaagttcaaaaagcattggacgtgacgagggagtcatttccaaatgacctgcaattcaatatcctgatgaggttcaccgtagatcagactcagacaccctctctgaaagtgaaagttgctattttaaagtatatcgaaacattggcaaagcagatggatcccggtgacttcatcaatagctcggaaaccagattagccgtatcacgggttattacttggacaacggagcctaaaagtagcgacgtgcgcaaagcagcccagtccgttctaatctcactgttcgaactcaatactccggaattcactatgctgctgggcgccctgcccaaaacattccaagacggcgccacaaaattgctccataaccatttgagaaacactggcaacggaacccagagctcaatgggaagccctctcacacggccaacgcccagaagccccgctaactggtccagccccctgacaagccccaccaacacctctcagaacaccctttcacccagcgcctttgattacgacacggagaacatgaactccgaagacatctactccagcttgaggggtgtgacggaagctattcagaacttttcattccgctcccaagaagatatgaacgaacctctgaaacgggactccaagaaggacgacggcgacagcatgtgcgggggccccgggatgagtgatcctagggccggcggtgacgcgactgattcatcgcagacagccctggacaacaaagcatctctcttacattctatgccaactcatagctccccccggagccgggactataatccttataattatagtgattccataagcccttttaataagtcggctctaaaggaggctatgttcgacgacgacgcagatcagtttccagatgacctcagtctggatcattcggatcttgttgctgaactactgaaagaactctcgaatcacaatgaacgcgtggaagagcggaaaatcgccctctacgagctcatgaagctcacccaggaagagagcttttctgtttgggatgaacactttaagactattctgctgttgctgctggagacgctcggcgacaaggagcctaccattagggctctcgcattaaaggttttacgggagatcttgaggcaccagccagccaggttcaaaaactatgcggaacttacagttatgaagaccctggaagcgcacaaagatccccacaaggaagtggtcagatccgctgaggaggccgcctcggtactggccactagtatatcaccagagcagtgtataaaagtgctctgtcccataattcaaaccgctgattacccaatcaacttggctgcaatcaaaatgcagaccaaggttatagaacgggtcagtaaggagacactgaatctcctgctccctgagataatgcctggtctgattcaagggtacgataattccgagtcatcagtcagaaaggcctgtgtgttctgtctggtcgcagtgcatgctgtgattggggacgagcttaaacctcatttatcgcaactgactgggtctaaaatgaagctactcaacctgtatatcaagcgggcccagaccggttctggtggcgccgaccctacgaccgacgtttccgggcagtcatag

SEQ ID NO: 287021 - DNA, 4542 bp, Artificial Sequence
  derived and/or modified sequence
atggagcccaggtccatggagtacttctgtgcccaggtgcagcagaaggatgtgggcggccgcctgcaggtgggccaggagctgctgctgtacctgggcgcccctggggccatcagtgacctggaggaggacctgggccgcctgggcaagacagtggatgccctgaccggctgggtgggcagcagcaactacagagtgtccctgatgggcctggagatcctgagcgcctttgtggaccggctgagcacccgcttcaagagctatgtggccatggtgattgtggccctgattgacaggatgggagatgccaaggacaaggtgagagatgaggcccagaccctcatcctgaagctgatggaccaggtggccccacccatgtacatctgggagcagctggccagcggcttcaagcacaagaacttccgcagccgggagggcgtgtgcctgtgcctgattgagaccctgaacatctttggagcccagcccctggtgatcagcaagctgatcccccacctgtgcatcctgtttggagacagcaacagccaggtgagagatgctgccatcctggccatcgtggagatctacagacatgtgggggagaaggtgaggatggacctgtacaagaggggcatccccccagcccggctggagatgatctttgccaagtttgatgaggtgcagagcagcggcggcatgatcctgtctgtgtgcaaggacaagagctttgatgatgaggagagcgtggatggcaaccggcccagcagcgctgccagcgccttcaaggtgcctgcccccaagaccagcggcaacccagccaacagcgccaggaagccaggcagcgctgggggccccaaggtgggcggggccagcaaggagggcggggccggggctgtggatgaagatgacttcatcaaggccttcacagatgtgcccagcatccagatctacagcagccgggagctggaggagaccctgaacaagatccgggagatcctgagtgatgacaagcatgactgggaccagagggccaatgccctgaagaagatccgcagcctgctggtggccggggccgcccagtatgactgcttcttccagcacctgcggctgctggatggagccctgaagctgagcgccaaggacctgcggagccaggtggtgcgggaggcctgcatcaccgtggcccacctgagcacagtgctgggcaacaagtttgaccacggggctgaggccatcgtgcccaccctcttcaacctggtgcccaacagcgccaaggtgatggccaccagcggctgtgccgccatccgcttcatcatccgccacacccacgtgcccaggctcatccccctcatcaccagcaactgcaccagcaagtctgtgcctgtgagaagaagaagctttgagttcctggacctgctgctgcaggagtggcagacccacagcctggagagacatgctgctgtgctggtggagaccatcaagaagggcatccatgatgctgatgctgaggcccgggtggaggccaggaagacctacatgggcctgaggaaccacttccctggagaggccgagaccctgtacaacagcctggagcccagctaccagaagagcctgcagacctacctgaagagcagcggctctgtggccagcctgccccagagcgacaggagcagcagcagcagccaggagagcctgaaccggcccttcagcagcaagtggagcacagccaaccccagcacagtggccggccgggtgtctgctggcagcagcaaggccagcagcctgcccggcagcctgcagaggagcagaagtgacattgatgtgaatgctgctgctggggccaaggcccaccacgccgccggccagagcgtgcgcagcggccgcctgggcgctggggccctgaatgccggcagctatgccagcctggaggacaccagtgacaagctggatggaacagcctctgaagatggccgggtgcgggccaagctgagcgcccccctggccggcatgggaaatgccaaggctgacagccggggccgcagcaggaccaagatggtgtcccagagccagcccggcagccgcagcggcagccctggccgggtgctgaccaccacagccctgagcacagtgtcctctggagtgcagagggtgctggtgaacagcgccagcgcccagaagaggagcaagatccccaggagccagggctgcagccgggaggccagccccagccggctgtctgtggcccggagcagccgcatcccccggcccagcgtgtcccagggctgcagccgggaggccagccgggagagcagccgggacaccagccctgtgcgctccttccagcccctgggccctggctacggcatcagccagagcagccggctgagcagctctgtgtctgccatgagggtgctgaacacaggcagtgatgtggaggaggccgtggctgatgccctgctgctgggggacatccgcaccaagaagaagccagcccggcggcgctatgagagctatggcatgcacagtgatgatgatgccaacagtgatgccagcagcgcctgcagcgagaggagctacagcagcagaaatggcagcatccccacctacatgaggcagacagaagatgtggccgaggtgctgaacagatgtgccagcagcaactggagcgagaggaaggagggcctgctgggcctgcagaacctgctgaagaaccagaggaccctgagccgggtggagctgaagaggctgtgtgagatcttcaccaggatgtttgctgacccccacggcaaggtgttctccatgttcctggagaccctggtggacttcatccaggtgcacaaggatgacctgcaggactggctgtttgtgctgctgacccagctgctgaagaagatgggcgctgacctgctgggctctgtgcaggccaaggtgcagaaggccctggatgtgacccgggagagcttccccaatgacctgcagttcaacatcctgatgaggttcaccgtggaccagacccagacccccagcctgaaggtgaaggtggccatcctgaagtacatcgagaccctggccaagcagatggaccccggggacttcatcaacagcagcgagacccggctggccgtgtccagggtcatcacctggaccacagagcccaagagcagtgatgtgaggaaggccgcccagagcgtgctgatcagcctgtttgagctgaacaccccagagttcaccatgctgctgggcgccctgcccaagaccttccaggatggagccaccaagctgctgcacaaccacctgagaaatactggaaatggcacccagagctccatgggcagccccctgacccggcccacccccaggagccctgccaactggagcagccccctgaccagccccaccaacaccagccagaacaccctgagccccagcgcctttgattatgacacagagaacatgaacagcgaggacatctacagcagcctgcggggcgtgacagaggccatccagaacttctccttccgcagccaggaggacatgaatgagcccctgaagagggacagcaagaaggatgatggagacagcatgtgtggcggccctggcatgtctgaccccagggctggaggagatgccacagacagcagccagacagccctggacaacaaggccagcctgctgcacagcatgcccacccacagcagccccaggagccgggactacaacccctacaactacagcgacagcatcagccccttcaacaagagcgccctgaaggaggccatgtttgatgatgatgctgaccagttcccagatgacctgagcctggaccacagcgacctggtggccgagctgctgaaggagctgagcaaccacaatgaaagagtggaggagaggaagatcgccctgtatgagctgatgaagctgacccaggaggagagcttctctgtgtgggatgagcacttcaagaccatcctgctgctgctgctggagaccctgggggacaaggagcccaccatccgggccctggccctgaaggtgctgcgggagatcctgcggcaccagcctgcccgcttcaagaactatgcagagctgactgtgatgaagaccctggaggcccacaaggacccccacaaggaggtggtgcgctctgctgaggaggccgcctctgtgctggccaccagcatcagccctgagcagtgcatcaaggtgctgtgccccatcatccagacagctgactaccccatcaacctggccgccatcaagatgcagaccaaggtgattgagcgggtgtccaaggagaccctgaacctgctgctgcctgagatcatgcctggcctcatccagggctatgacaacagcgagagctctgtgaggaaggcctgtgtgttctgcctggtggccgtgcatgctgtgattggagatgagctgaagccccacctgagccagctgaccggcagcaagatgaagctgctgaacctgtacatcaagagggcccagacaggcagcggcggcgctgaccccaccacagatgtgtctggccagagctag

SEQ ID NO: 287022 - DNA, 4542 bp, Artificial Sequence
  derived and/or modified sequence
atggagccccggagcatggagtacttctgcgcccaggtgcagcagaaggacgttggcggtcggctacaggtcggccaagagcttttactatatctgggcgcacccggcgccatttctgatcttgaggaagacctgggtagactagggaagaccgtggatgcccttaccggctgggtgggatccagcaactatcgcgtgtctctgatgggcctggaaattttgagtgcgttcgtggacaggctttctacccgctttaagtcctacgtggccatggtgatcgttgcgctcattgaccgtatgggcgacgccaaagacaaggttagggatgaggctcagacactaatcctgaagctgatggatcaggtggccccccccatgtatatctgggaacagctcgccagtggatttaaacacaagaacttccggtcgcgagagggcgtatgtttatgtctgatagaaaccctcaatatcttcggggctcaacctttggttatttctaagctgatccctcatctctgcatcctgtttggggacagcaattctcaggtgcgtgatgccgcgatcctggctattgtggaaatttaccggcacgtgggggagaaagttagaatggacctgtacaagcgcggaatcccacctgcccgactcgagatgattttcgccaagttcgacgaggtccagagttcaggtggaatgattctgtctgtttgtaaggataagtcttttgatgacgaggagtcagtggatggaaacagaccaagctctgcagcttccgcatttaaagtccccgcccccaagacgtccggcaatccagcaaacagcgccagaaagcccggctcagcaggcggcccgaaggtcggcggcgcctcaaaggagggcggggccggtgctgtcgacgaggacgactttattaaggctttcaccgatgtccccagcatccagatttacagctcccgagaactagaagagacattaaacaaaatccgagagatcttgtcagatgacaagcatgactgggatcagcgggccaacgccttaaagaaaattcgatcacttttggtcgcaggtgcagcccagtacgactgcttcttccagcatctgcgcctactggacggtgcattaaagctgtcagcgaaagacctgagaagtcaagtcgtgagagaagcgtgtatcaccgtcgcacatctgtccactgttctgggtaacaagtttgaccatggcgcagaagccatcgttccgaccctcttcaacctggtgcctaattccgctaaggtgatggccactagcggatgcgcagccatccggtttatcataagacatacgcacgtaccccgattgatccctctcatcaccagcaactgcactagtaaaagcgttcctgtacgacggaggagcttcgaatttctcgatctgctgctccaggaatggcaaacccattccctggaacgccacgccgccgtgctggtggaaaccatcaagaaggggatccacgacgctgacgcagaagccagagttgaagcgagaaagacctacatgggacttcgtaatcacttcccaggcgaagcggaaactctgtataactctttagagccttcctaccagaagtccctgcaaacgtatctgaagagttccggctccgtcgcctcccttccacaaagcgaccggtcttcgtctagttcccaggaaagcttaaaccgcccattttctagcaagtggtcaaccgccaatcccagcaccgtggccgggagggtgtctgctggctcttctaaggcaagtagccttccaggaagcctgcagcgttctcgaagtgacattgacgtcaatgctgctgctggggcgaaggcacatcacgctgcgggacagagtgtacgcagtggccgcttgggcgcaggcgccctaaacgctggatcctatgcctccctggaagacacatccgacaaattggatggaaccgcctctgaggatggccgggtgagagccaagctgtctgcgcccctggccggtatgggtaacgcgaaggcggacagccgcggacggtcacgtactaagatggtgtctcaatctcagccgggctctcggtctggcagtccaggtcgtgttctgacaactaccgcgctgagcacagtgtcctccggtgtgcagcgggtgctggttaacagcgcctccgctcagaaaaggtctaaaatcccaaggtcccaggggtgctcaagagaggcctctccaagcaggttgtctgtggcaaggtcatcacggattccccgtccaagtgtgtctcagggctgttcccgcgaggcgagcagggaatccagccgcgatacgtctccagtgagaagcttccaaccgttgggcccaggatacggaatctcacagagtagcaggctgtcctcctctgtgagtgcaatgcgagtgctcaacacgggctcagacgtagaagaggcagtggctgacgctctcctcctgggagatattcgaaccaaaaagaaaccagcgagacggcgctacgagtcttatggaatgcactctgacgacgacgcaaactccgacgcgagttccgcttgctcggagcgaagttactccagtcgaaatggctctatccccacatatatgcggcagacggaggacgttgctgaggtgttgaaccgctgcgcttcctccaattggtccgagcgcaaggagggcctgctggggctgcagaatctactcaagaaccaacgaactctgagccgagttgagctgaaaaggctttgtgagatcttcacccgcatgttcgcagatcctcacgggaaagtcttttcaatgttcttagagaccttagtggacttcattcaggtgcataaggacgatttacaggactggctcttcgtcctgctgacacaacttctgaaaaaaatgggagctgatctgctgggttctgtgcaggccaaagtgcagaaggctcttgatgtgacaagggaatccttccctaatgacctgcaatttaatatcctcatgaggttcactgtcgaccaaacccagacccctagtcttaaggtgaaagttgcaatccttaaatatattgagacccttgcaaagcagatggatccaggggattttattaactccagcgaaacccgtctcgcagtaagcagggttatcacgtggactactgaacctaaatccagtgatgttaggaaagcagcccagtcggtgctgatcagtctgttcgagctcaacacacctgaattcacaatgttgctcggtgccctgcctaagactttccaggacggggctactaaactgctccataatcatcttaggaatactgggaacggcacccaatctagcatgggttcgcccttgactaggcccacaccacgatctcccgcaaactggtcttctccacttacgtcccccactaacactagtcagaacactcttagtcccagtgctttcgactacgacacagagaatatgaattccgaggacatctacagttccctgagaggcgtaacagaggctatccaaaacttttcattccgtagccaggaggacatgaacgaaccactgaagcgcgatagcaagaaggatgatggcgactctatgtgcggcggtccaggcatgagcgacccaagggctggaggagacgctacagactccagccaaactgcgctcgataacaaagcatcactcctgcacagcatgcctacacatagcagcccccggtctcgggactacaacccatacaattactccgacagcataagtcccttcaataagtccgctctgaaggaggcaatgttcgatgacgacgcagaccagttccctgacgatttaagcctcgaccatagcgacttggtcgctgaactactgaaagaattgagcaatcacaacgagcgcgtagaggagaggaaaatcgctctctatgagctgatgaaactcacccaagaagaatcgttcagtgtctgggacgagcatttcaaaactatactgcttttactgctggagacccttggcgataaggagcccactattagggctctggccttgaaggtgcttagagagatcctccgacatcaacctgcccgtttcaagaattatgccgaacttaccgtcatgaaaacactggaggctcacaaggacccacacaaggaagtggtgaggtcagcagaagaggcagctagtgtgttggccacctccatctctccggaacagtgcatcaaggtgctatgtcccatcattcagacagccgattacccgattaacttagctgccataaaaatgcagactaaagtgatagagcgcgtttccaaggagaccttgaatctgctgttgcccgaaataatgcccggactgatccagggatatgataacagcgagagctctgtgagaaaagcctgcgtattttgtctcgtggccgttcatgctgtgataggtgatgaacttaaacctcatctctcccaacttaccggctcaaagatgaagctgctcaatctgtatatcaagagggctcaaaccggcagtggcggcgctgaccccactacagacgtgtcaggccagtcctag

SEQ ID NO: 287023 - DNA, 4542 bp, Artificial Sequence
  derived and/or modified sequence
atggagccacggagtatggaatatttctgtgcacaagtgcagcagaaagacgtcggcggtcggctgcaggtgggtcaggagttactactatacttgggagcacctggggcaattagtgatctcgaagaggatcttgggagactgggcaaaactgtcgacgctcttactggatgggtcggaagttcaaactatcgcgtaagccttatgggcctggagattctttccgcctttgtggaccggctaagtacccgcttcaagagctatgttgctatggtaatagtggcactgatcgacaggatgggtgatgcaaaggataaagttagagacgaagcccagaccctaatactgaagctaatggatcaggtggctcctccaatgtacatctgggaacagctcgccagcggttttaaacacaagaattttagatccagagagggcgtgtgtctttgcctcatcgaaaccctgaacatctttggcgctcagccactcgtgatatctaaactgatcccccatctgtgcatcctgttcggagacagcaattctcaggtgagagatgcagcaattctagctatcgttgaaatctatcgccacgtgggagaaaaggtgcgcatggatctttataaaagaggcattccccctgcgaggctcgaaatgatttttgctaagttcgacgaagtgcagtcttccggcggaatgattctcagcgtatgcaaagacaagagcttcgatgacgaggaaagtgtggatgggaatcgcccatcaagcgccgcatctgccttcaaggtgcccgctcccaaaacgtctgggaatccagctaattcagcccgtaagccaggaagtgccggtggacctaaggtaggcggagcttccaaagaaggaggcgcaggtgctgtggacgaagacgactttattaaggcgtttactgatgtgccgtcgattcagatatatagctctcgggaactagaggaaacattaaataagatccgagagatactctcagacgacaaacacgactgggaccaacgtgcaaatgcactgaaaaagattaggagccttcttgtggcaggcgctgcacagtacgattgtttcttccagcacttgagattgttggacggcgctctgaaactgagtgctaaagatctgcgctcccaagtcgtgagggaggcctgcattaccgtcgctcatctgtcaaccgtgctgggaaacaagtttgaccatggagctgaggctatcgtgcccacattgtttaacttagtaccaaactcagctaaagtgatggctacttcagggtgcgccgcaattcgcttcattattcggcacacccatgtgcccaggcttatccctttgataacttcaaattgtacaagcaagtctgtgcccgtcaggcgacgtagtttcgagttcctagacctgctgctgcaggagtggcagacccattcccttgagcgacatgcagccgtgctggttgagaccattaaaaaaggcatacacgacgccgatgcagaagccagagtggaggccagaaaaacatacatggggctcagaaatcacttccctggcgaagctgagaccctgtacaacagccttgaaccttcttaccagaagtccctgcagacctatctaaaatcttccggcagcgtggcctccctgccccagtctgaccggtcatcaagctccagtcaggaaagccttaacagaccattttcgtctaaatggtccactgccaacccatctacagtggccggtagggtgtctgcaggatcatctaaagcctcctctctacccggtagcctccagagaagccgctcagacattgacgtgaacgccgcagccggtgcaaaagcccatcatgccgctggccagtccgtgcgctcagggagactgggcgcaggcgcactgaatgcgggatcctacgccagccttgaagacacgagcgacaaactggacgggactgcgtcggaagatggcagagtgagagctaagctctctgcccctttagcaggtatgggcaatgccaaagctgacagtaggggacggtcgcgaacaaaaatggtgtcacagagccagcctggctccaggtcagggtcaccgggacgtgtgctgactaccacggccctgagcaccgtcagctccggcgtgcagagggtccttgtaaacagcgcatccgcccagaagcgcagcaagatccctaggagccaaggctgttcgagagaagccagcccctcaaggctgagcgtagctcgaagttctcgcatacccagaccctcagtatcacaggggtgttcccgcgaggcaagcagggagtcctcccgagatacgtctcccgtgcggagcttccagccactgggacctggctacgggatatcacagagctcgaggttgagttctagcgtgagcgccatgagggttctgaataccggctccgatgtggaagaggcagtggctgacgccctgttactgggggatatccgcacaaagaagaaacccgctagacggcgatatgagtcatatggcatgcactccgatgatgacgccaattctgatgcttccagcgcctgctctgagaggtcttacagcagccgcaatgggtccataccaacatacatgcgacaaacagaggatgtagccgaagtcctgaacagatgtgccagttcaaattggtcagaacggaaggaaggcctactcgggttacagaacttgctaaaaaaccagcgaaccctcagtagagtagagttgaaacgcctttgtgagatttttacgaggatgttcgctgaccctcacggcaaagtgttttccatgtttcttgagactctggtggacttcatccaggtgcacaaggacgacctgcaagactggctttttgtcctgctgactcagctactgaaaaaaatgggcgctgacctgcttggctccgtgcaagccaaggtccagaaggcgctggacgtgacacgggaaagctttcctaacgacttacaattcaacatcctgatgcgcttcacagtcgatcaaacccagaccccaagcctcaaggttaaggtagcaattctgaagtatatcgaaacactggcaaagcagatggaccctggggactttatcaattctagtgaaacaaggctggcagtcagccgagtgataacatggactacagagccaaaatctagcgatgtacggaaggcagcgcagagcgtccttatttccctgtttgaattgaatacaccagaattcacaatgcttttaggggctctccctaagacattccaggacggcgctacaaagcttttgcacaatcacctccgcaatacaggtaatggtacccagtcctcaatgggctcgcctctcacaagaccgacacccagatcacccgctaactggtctagccccctgacctctccgacaaacactagccaaaacactttatcaccatccgctttcgattacgatacagaaaacatgaactccgaagatatttacagtagcctccgcggtgtcacggaggccattcagaatttttccttcaggtcacaggaagacatgaacgagcctcttaagcgagattccaagaaagatgacggagacagtatgtgtgggggtcctggaatgtctgacccccgagccggaggggatgccacagactcaagccagactgcccttgacaacaaggccagcctgctgcactccatgccgacacactctagccccagatctagagattataatccatacaactactcggacagcatcagtcctttcaacaaatcggccctcaaggaggccatgttcgatgatgacgctgaccaatttcctgatgatctgtccctcgatcatagcgatttagtggccgagctgctgaaagagctctcaaaccataacgagagagttgaggaacgcaagattgcactgtacgaactgatgaagctcacacaagaggagtccttcagcgtgtgggatgagcacttcaaaactatcctgctgcttctgctggagaccctcggagacaaagaacctactatccgggcactggcccttaaggtattgagggagatactcaggcaccagccagctagattcaaaaactatgccgagctaacagtaatgaaaacactggaggctcacaaagaccctcataaagaggtggtgcgaagcgccgaagaagccgcttctgtgctagccacatctatttcgccggagcagtgtatcaaggtgctgtgccccattatacaaaccgccgattacccaatcaatctcgccgcaattaagatgcaaactaaagtaatcgaacgtgtctccaaggagaccttaaacttgctgttacctgagattatgcctgggctgattcagggctatgataatagtgaaagctccgtgaggaaggcatgcgtgttttgtctggtggccgtacacgcagtgataggcgatgagctaaagccccacctttcccaactgacaggaagcaagatgaagctactgaacctgtacatcaagcgggcacagacaggctctggcggtgctgacccgactactgatgtgtccggccagtcctag

SEQ ID NO: 287024 - DNA, 7282 bp, Artificial Sequence
  derived and/or modified sequence
agaggtcctatcgctcccagcggtttccgcagccacctccaccacctccgcagcaaaacgctagccggactggagggccctcgccggcgtcgtgctgacgtcacgcgcgtgctgacgtcgcccgcggccgcggcctctgaagcgggctggggatcggggggcgccgagtttgactagtttgggggcggctgggcgcttggcgttcctcccgccgcccgctgcgccccgcaagccgcgcccctggcgggctaagtgagtcccgcccgctcccgcggggacccgcactggaggctgggcggctctcggcgaaagttggccgctcacagactggcaggcgggcgggcggccgcagccatggagccccgcagcatggagtacttctgcgcccaggtgcagcagaaggacgtcggcggccggctgcaggtcggccaggagctcctgctctaccttggcgcccccggcgccatctcggacctggaggaggacctgggccgcctaggcaagacagtcgacgcgctcaccggctgggtgggttcgagcaactaccgggtatcattaatgggattggaaattttaagtgcctttgtggacagattatcaacacgctttaaatcctatgtagcaatggttattgtagctttaatagacagaatgggagatgccaaagacaaggttcgagatgaagctcagactctgatattgaagttaatggatcaagtagcaccacctatgtacatttgggagcagttggcttctggttttaaacacaagaattttcgatctcgagaaggcgtgtgtctgtgtcttattgaaaccttaaacatttttggggctcagccactagtcatcagcaaattgataccacatttgtgtatcctgtttggagactccaacagtcaggtgagagatgctgcaatattggctatagtggagatttatagacatgtgggagaaaaagtgaggatggatctttataagagaggaattccccctgctagattagaaatgatatttgccaaatttgatgaagtgcaaagttcaggcggtatgattttgagtgtctgcaaagataaaagcttcgatgatgaagaatcagtggatggaaataggccatcatcagctgcatcagccttcaaggttcctgcacctaaaacatccggaaatcctgccaacagtgcaaggaagcctggttcagcaggtggccctaaggttggaggtgcttctaaggaaggaggtgctggagcagttgatgaagatgattttataaaagcttttacagatgtcccttctattcagatttattctagtcgagaactcgaagaaacattaaataaaatcagggaaattttgtcagatgataaacatgactgggatcagcgtgccaatgcactgaagaaaattcgatcactgcttgttgctggagctgcacagtatgattgcttttttcaacatttacgattgttggatggagcacttaaactttcagctaaggatcttagatcccaggtggttagagaagcttgtattactgtagcccacctttcaacagttttgggaaacaagtttgatcatggcgctgaagccattgtacctacactttttaatctcgtccccaatagtgcaaaagtcatggcaacttctggatgtgcagcaatcagatttatcattcggcatactcatgtacccagacttatacctttaataacaagcaattgcacatcaaaatcagttcccgtgaggagacgttcatttgaatttttagatttattgttgcaagagtggcagactcattcattggaaagacatgcagccgtcttggttgaaactattaaaaagggaattcatgatgctgacgctgaggccagagtggaggcaagaaagacatacatgggtcttagaaaccactttcctggtgaagctgaaacattatataattcccttgagccatcttatcagaagagtcttcaaacttacttaaagagttctggcagtgtagcatctcttccacaatcagacaggtcctcatccagctcacaggaaagtctcaatcgccctttttcttccaaatggtctacagcaaatccatcaactgtggctggaagagtatcagcaggcagcagcaaagccagttcccttccaggaagcctgcagcgttcacgaagtgacattgatgtgaatgctgctgcaggtgccaaggcacatcatgctgctggacagtctgtgcgaagcgggcgcttaggtgcaggtgccctgaatgcaggttcctatgcgtcactagaggatacttctgacaagctggatggaacagcatctgaagatggccgggtgagagcaaaactttcagcaccacttgctggcatgggaaatgccaaggcagattctagaggaagaagtcgaacaaaaatggtgtctcaatcacagcctggtagccggtctgggtctccaggaagagttctgaccacaacagccctgtccactgtgagctctggtgttcaaagagtcctggtcaattcagcctcagcacaaaaaagaagcaagataccacggagccagggctgtagcagagaggctagtccatctaggctttcagtggcccgaagcagtcgtattcctcgaccaagtgtgagtcaaggatgcagccgggaagctagtcgggagagcagcagagacacaagtcctgttcgctcttttcagcccctcggtccaggttatgggatcagccaatcaagtcgactgtcgtcttctgttagtgccatgcgagtcctgaacacaggttctgatgtggaggaggcggtggcagatgccttgctcttaggagacatacggactaagaaaaaaccagctcgaagaagatatgaatcatatggaatgcattcagatgatgacgccaacagcgatgcatctagtgcttgttcagaacgctcctatagttctcgaaatggtagtattcctacatatatgaggcagacggaagatgtggcagaagtcctcaatagatgtgctagttccaattggtcagaaaggaaagaaggcctcctaggtctgcagaacttattaaaaaatcagagaacactaagtcgagttgaactgaaaagattatgtgaaattttcacaagaatgtttgctgaccctcatggcaaggtattcagcatgtttttggagactctagtggatttcatacaagtccacaaagatgatcttcaagattggttgtttgtactgctgacacaactactaaaaaaaatgggtgctgatttgcttggatctgttcaggcaaaagttcagaaagcccttgatgttacaagagagtcttttccaaatgatcttcagttcaatattctaatgagatttacagttgatcagacccagacaccaagcttaaaggtgaaggttgctatccttaaatacatagaaactctggccaaacagatggatccaggagattttataaattccagtgaaactcgcctagcagtgtctcgggtcatcacttggacaacagaacccaaaagttctgatgttcggaaggcagcacagtcagtgctgatttcattatttgaactcaataccccagagtttacaatgttattaggagctttaccaaaaacttttcaggatggtgctaccaagcttcttcataatcaccttcgaaacactggcaatggaacccagagttccatggggagtcctttgacaagaccaacaccacgatcaccagctaactggtccagtcctcttacttctcctaccaatacatcacagaatactttatctccaagtgcatttgattatgacacagaaaatatgaactctgaagatatttatagctctcttagaggtgtcactgaagcaatccagaatttcagcttccgtagccaagaagatatgaatgagccattgaaaagggattctaaaaaagatgatggcgattcaatgtgtggtggtcctgggatgtctgacccaagagcaggaggtgatgctactgactcaagtcaaacagctcttgataataaagcttcattgctccattcaatgcctactcactcctctccacgctctcgagactataatccatataactattcagatagcatcagtcccttcaacaagtctgccctcaaggaagccatgtttgatgatgatgctgaccagtttcctgacgatctttccctagatcattctgacctagttgcagagttgttgaaggagctgtctaaccataatgagcgtgtagaagaaagaaaaattgccctctatgaacttatgaaactgacacaggaagaatcttttagtgtttgggatgaacacttcaaaacaatattgcttttattgcttgaaacgcttggagataaagagcctacaatcagggctttggcattaaaggttttaagagaaatcctaaggcatcaaccagcaagatttaaaaactatgcagaattgactgtcatgaaaacattggaagcacataaagatcctcataaggaggtggtgagatctgctgaggaagcggcatcagtgttggccacttcaattagtccagagcagtgcatcaaagtgctttgtcctatcattcaaactgcagactacccaattaatctggctgcaatcaaaatgcaaacaaaagtgatagagagagtgtccaaggaaaccctaaacctgcttttgccagagattatgccaggtctaatacagggttatgataattcagagagcagtgttcggaaagcttgtgtcttctgcctggtggctgttcatgcggtaattggtgatgaactaaaaccacatctcagtcaacttactggcagtaaaatgaagctactgaatctttacatcaaacgtgcacaaacaggttctggaggagctgatcccactactgatgtttctggacaaagttagtgaagctcatcacagcgaaccaggtctctcaaaagaaaggacagatagaccaccctcatcaatgaaaggaagttctcaaacacatcctttggaacttactattgtttcccagttttagttttttgtttcgtttcgttttgtattttctgtaacagaggactatcctcagtctgcatgtaacttttatgatagttattccaaattcaagaagaagcagtattaacatcaattgatcgacacaaagtaatttttaatttaattcatcatttcacatgtttgtactttgtcttcccattaacctttgccagtgttatgattgtataaatttttttaaatgctggttaaacaggaatgcttaaagctttaaaagtttaacagtctaaaacatttttgcttttattcaactgcagaataatatttttattgctactttgagttttgtttcgtatcatgtcctatgctagaaatatttaaatgatgtgaaacaaagcaggactaatttgaactacagctggactccgtttgtgtgatggtgatacatgtcattagttgcaacttctttggggtgatctatagtttgaaaactaaaacctcaaagacagatgttacagaatcagccagttctgtaaaactgatattgtctattggttattgatcttgccatctttatttaaaaccatgtcccttctatgatcccttaagaaagctgcaccaaatcatctgcctgttttttcttgatacttactgaaatagaaggttttattgcagggtttattttggtttgtttatatctttgttgtgaatgatgcttttttgtatttattaatatcaaattcacttatgaataaacttgataatggaaacggacaaaaaaaatcaagtgcgtgtgtgtccttgaccgtcttctgtttctcacgtaataaacaaattatcgagacatgggagtgaccagcaccttttctttaaatggtggaacctggtttccttttaccatgaaattgtcttacttgaaaatattgatcctgatgagagagaagatggtgccaaggctgtctttgtataatgggctcaaattctctacctcttcagggctaatacttttaactgagctgctgcctatagtgtcttttggaaaactacttaaagggtgattttctgttactttttagcaaatttttttaatcacctcttgctacacccattcttttcatgtgcagccgactcaaaaattaccagttttggtgaaaggctaaattagataatttggaaccaggatactaatgatttctcatctttacttttttttaatcctaatataaagtgaatttgattgaaaaggcaaatagctattagggaagcagtttgccattgttgcagagttatctgtactttgtttaactgaaaaaaatgtagaaatatatgtaaagaatttaagacaagagtactgaatggatgatttgtcataggctttcccctttctttctgttctagcagcaggaaaagtttctctatatcctctccctctacctgtaacaattttgttttctactgttaattacattgtgtatttatagttctatgcttactgttgtgcatatactggcaataaaactgtacataacattacttgaaaaagttaataatgtatatcagtttttctgtctcactgtgtaacaagtcactcagttttattttaactttagacggtcttgtatcagtggtggtctcttgaattttgtaagttcatctgaggagaaaagatttttcaggtgtagctaccacaatcaaaggtatatagctacatacgcatgtatatattacagcttatctgtaagaagaaaatgcattttaaacacaactcttctcagtagcattttatgacctttggatatgtttgtaatcatttcgaatcaaaatattgatttaattttgacctctggtttaagatactgctttaactactgttgacaaccaagtagagtgacttaagctgaacagtaactaactggaaaattagataagcacctggcatctaatggcaggcaggcactcaagaaatgaattaactacataatggaaaagtatggtttaatgtgtccaaatgaaagctagtagatgtaaacatggaaaaattgtgtttacaattttataatctcagttgataagactataagaaagctgattatttaaatcactatatacaatacacccttaatttgttcattccagaaacatactgagatgtcagctacttaaaaatggtcacaaaaagctactgtttatatttttcctcctgctattctctcccaaattaattattaataagtgttgttcatttactgcactgctgagaactaattaaaattatatattccagattgtaaaa

SEQ ID NO: 287025 - DNA, 4542 bp, Artificial Sequence
  derived and/or modified sequence
atggagcccagaagcatggagtacttctgcgcccaggtgcagcagaaggacgtgggcggcagactgcaggtgggccaggagctgctgctgtacctgggcgcccccggcgccatcagcgacctggaggaggacctgggcagactgggcaagaccgtggacgccctgaccggctgggtgggcagcagcaactacagagtgagcctgatgggcctggagatcctgagcgccttcgtggacagactgagcaccagattcaagagctacgtggccatggtgatcgtggccctgatcgacagaatgggcgacgccaaggacaaggtgagagacgaggcccagaccctgatcctgaagctgatggaccaggtggccccccccatgtacatctgggagcagctggccagcggcttcaagcacaagaacttcagaagcagagagggcgtgtgcctgtgcctgatcgagaccctgaacatcttcggcgcccagcccctggtgatcagcaagctgatcccccacctgtgcatcctgttcggcgacagcaacagccaggtgagagacgccgccatcctggccatcgtggagatctacagacacgtgggcgagaaggtgagaatggacctgtacaagagaggcatcccccccgccagactggagatgatcttcgccaagttcgacgaggtgcagagcagcggcggcatgatcctgagcgtgtgcaaggacaagagcttcgacgacgaggagagcgtggacggcaacagacccagcagcgccgccagcgccttcaaggtgcccgcccccaagaccagcggcaaccccgccaacagcgccagaaagcccggcagcgccggcggccccaaggtgggcggcgccagcaaggagggcggcgccggcgccgtggacgaggacgacttcatcaaggccttcaccgacgtgcccagcatccagatctacagcagcagagagctggaggagaccctgaacaagatcagagagatcctgagcgacgacaagcacgactgggaccagagagccaacgccctgaagaagatcagaagcctgctggtggccggcgccgcccagtacgactgcttcttccagcacctgagactgctggacggcgccctgaagctgagcgccaaggacctgagaagccaggtggtgagagaggcctgcatcaccgtggcccacctgagcaccgtgctgggcaacaagttcgaccacggcgccgaggccatcgtgcccaccctgttcaacctggtgcccaacagcgccaaggtgatggccaccagcggctgcgccgccatcagattcatcatcagacacacccacgtgcccagactgatccccctgatcaccagcaactgcaccagcaagagcgtgcccgtgagaagaagaagcttcgagttcctggacctgctgctgcaggagtggcagacccacagcctggagagacacgccgccgtgctggtggagaccatcaagaagggcatccacgacgccgacgccgaggccagagtggaggccagaaagacctacatgggcctgagaaaccacttccccggcgaggccgagaccctgtacaacagcctggagcccagctaccagaagagcctgcagacctacctgaagagcagcggcagcgtggccagcctgccccagagcgacagaagcagcagcagcagccaggagagcctgaacagacccttcagcagcaagtggagcaccgccaaccccagcaccgtggccggcagagtgagcgccggcagcagcaaggccagcagcctgcccggcagcctgcagagaagcagaagcgacatcgacgtgaacgccgccgccggcgccaaggcccaccacgccgccggccagagcgtgagaagcggcagactgggcgccggcgccctgaacgccggcagctacgccagcctggaggacaccagcgacaagctggacggcaccgccagcgaggacggcagagtgagagccaagctgagcgcccccctggccggcatgggcaacgccaaggccgacagcagaggcagaagcagaaccaagatggtgagccagagccagcccggcagcagaagcggcagccccggcagagtgctgaccaccaccgccctgagcaccgtgagcagcggcgtgcagagagtgctggtgaacagcgccagcgcccagaagagaagcaagatccccagaagccagggctgcagcagagaggccagccccagcagactgagcgtggccagaagcagcagaatccccagacccagcgtgagccagggctgcagcagagaggccagcagagagagcagcagagacaccagccccgtgagaagcttccagcccctgggccccggctacggcatcagccagagcagcagactgagcagcagcgtgagcgccatgagagtgctgaacaccggcagcgacgtggaggaggccgtggccgacgccctgctgctgggcgacatcagaaccaagaagaagcccgccagaagaagatacgagagctacggcatgcacagcgacgacgacgccaacagcgacgccagcagcgcctgcagcgagagaagctacagcagcagaaacggcagcatccccacctacatgagacagaccgaggacgtggccgaggtgctgaacagatgcgccagcagcaactggagcgagagaaaggagggcctgctgggcctgcagaacctgctgaagaaccagagaaccctgagcagagtggagctgaagagactgtgcgagatcttcaccagaatgttcgccgacccccacggcaaggtgttcagcatgttcctggagaccctggtggacttcatccaggtgcacaaggacgacctgcaggactggctgttcgtgctgctgacccagctgctgaagaagatgggcgccgacctgctgggcagcgtgcaggccaaggtgcagaaggccctggacgtgaccagagagagcttccccaacgacctgcagttcaacatcctgatgagattcaccgtggaccagacccagacccccagcctgaaggtgaaggtggccatcctgaagtacatcgagaccctggccaagcagatggaccccggcgacttcatcaacagcagcgagaccagactggccgtgagcagagtgatcacctggaccaccgagcccaagagcagcgacgtgagaaaggccgcccagagcgtgctgatcagcctgttcgagctgaacacccccgagttcaccatgctgctgggcgccctgcccaagaccttccaggacggcgccaccaagctgctgcacaaccacctgagaaacaccggcaacggcacccagagcagcatgggcagccccctgaccagacccacccccagaagccccgccaactggagcagccccctgaccagccccaccaacaccagccagaacaccctgagccccagcgccttcgactacgacaccgagaacatgaacagcgaggacatctacagcagcctgagaggcgtgaccgaggccatccagaacttcagcttcagaagccaggaggacatgaacgagcccctgaagagagacagcaagaaggacgacggcgacagcatgtgcggcggccccggcatgagcgaccccagagccggcggcgacgccaccgacagcagccagaccgccctggacaacaaggccagcctgctgcacagcatgcccacccacagcagccccagaagcagagactacaacccctacaactacagcgacagcatcagccccttcaacaagagcgccctgaaggaggccatgttcgacgacgacgccgaccagttccccgacgacctgagcctggaccacagcgacctggtggccgagctgctgaaggagctgagcaaccacaacgagagagtggaggagagaaagatcgccctgtacgagctgatgaagctgacccaggaggagagcttcagcgtgtgggacgagcacttcaagaccatcctgctgctgctgctggagaccctgggcgacaaggagcccaccatcagagccctggccctgaaggtgctgagagagatcctgagacaccagcccgccagattcaagaactacgccgagctgaccgtgatgaagaccctggaggcccacaaggacccccacaaggaggtggtgagaagcgccgaggaggccgccagcgtgctggccaccagcatcagccccgagcagtgcatcaaggtgctgtgccccatcatccagaccgccgactaccccatcaacctggccgccatcaagatgcagaccaaggtgatcgagagagtgagcaaggagaccctgaacctgctgctgcccgagatcatgcccggcctgatccagggctacgacaacagcgagagcagcgtgagaaaggcctgcgtgttctgcctggtggccgtgcacgccgtgatcggcgacgagctgaagccccacctgagccagctgaccggcagcaagatgaagctgctgaacctgtacatcaagagagcccagaccggcagcggcggcgccgaccccaccaccgacgtgagcggccagagctag

SEQ ID NO: 287026 - protein, 995 aa, Artificial Sequence
  derived and/or modified sequence
MGLRNHFPGEAETLYNSLEPSYQKSLQTYLKSSGSVASLPQSDRSSSSSQESLNRPFSSKWSTANPSTVAGRVSAGSSKASSLPGSLQRSRSDIDVNAAAGAKAHHAAGQSVRSGRLGAGALNAGSYASLEDTSDKLDGTASEDGRVRAKLSAPLAGMGNAKADSRGRSRTKMVSQSQPGSRSGSPGRVLTTTALSTVSSGVQRVLVNSASAQKRSKIPRSQGCSREASPSRLSVARSSRIPRPSVSQGCSREASRESSRDTSPVRSFQPLGPGYGISQSSRLSSSVSAMRVLNTGSDVEEAVADALKKPARRRYESYGMHSDDDANSDASSACSERSYSSRNGSIPTYMRQTEDVAEVLNRCASSNWSERKEGLLGLQNLLKNQRTLSRVELKRLCEIFTRMFADPHGKRVFSMFLETLVDFIQVHKDDLQDWLFVLLTQLLKKMGADLLGSVQAKVQKALDVTRESFPNDLQFNILMRFTVDQTQTPSLKVKVAILKYIETLAKQMDPGDFINSSETRLAVSRVITWTTEPKSSDVRKAAQSVLISLFELNTPEFTMLLGALPKTFQDGATKLLHNHLRNTGNGTQSSMGSPLTRPTPRSPANWSSPLTSPTNTSQNTLSPSAFDYDTENMNSEDIYSSLRGVTEAIQNFSFRSQEDMNEPLKRDSKKDDGDSMCGGPGMSDPRAGGDATDSSQTALDNKASLLHSMPTHSSPRSRDYNPYNYSDSISPFNKSALKEAMFDDDADQFPDDLSLDHSDLVAELLKELSNHNERVEERKIALYELMKLTQEESFSVWDEHFKTILLLLLETLGDKEPTIRALALKVLREILRHQPARFKNYAELTVMKTLEAHKDPHKEVVRSAEEAASVLATSISPEQCIKVLCPIIQTADYPINLAAIKMQTKVIERVSKETLNLLLPEIMPGLIQGYDNSESSVRKACVFCLVAVHAVIGDELKPHLSQLTGSKMKLLNLYIKRAQTGSGGADPTTDVSGQS

SEQ ID NO: 287027 - protein, 1505 aa, Artificial Sequence
  derived and/or modified sequence
MEPRSMEYFCAQVQQKDVGGRLQVGQELLLYLGAPGAISDLEEDLGRLGKTVDALTGWVGSSNYRVSLMGLEILSAFVDRLSTRFKSYVAMVIVALIDRMGDAKDKVRDEAQTLILKLMDQVAPPMYIWEQLASGFKHKNFRSREGVCLCLIETLNIFGAQPLVISKLIPHLCILFGDSNSQVRDAAILAIVEIYRHVGEKVRMDLYKRGIPPARLEMIFAKFDEVQSSGGMILSVCKDKSFDDEESVDGNRPSSAASAFKVPAPKTSGNPANSARKPGSAGGPKVGGASKEGGAGAVDEDDFIKAFTDVPSIQIYSSRELEETLNKIREILSDDKHDWDQRANALKKIRSLLVAGAAQYDCFFQHLRLLDGALKLSAKDLRSQVVREACITVAHLSTVLGNKFDHGAEAIVPTLFNLVPNSAKVMATSGCAAIRFIIRHTHVPRLIPLITSNCTSKSVPVRRRSFEFLDLLLQEWQTHSLERHAAVLVETIKKGIHDADAEARVEARKTYMGLRNHFPGEAETLYNSLEPSYQKSLQTYLKSSGSVASLPQSDRSSSSSQESLNRPFSSKWSTANPSTVAGRVSAGSSKASSLPGSLQRSRSDIDVNAAAGAKAHHAAGQSVRSGRLGAGALNAGSYASLEDTSDKLDGTASEDGRVRAKLSAPLAGMGNAKADSRGRSRTKMVSQSQPGSRSGSPGRVLTTTALSTVSSGVQRVLVNSASAQKRSKIPRSQGCSREASPSRLSVARSSRIPRPSVSQGCSREASRESSRDTSPVRSFQPLGPGYGISQSSRLSSSVSAMRVLNTGSDVEEAVADALKKPARRRYESYGMHSDDDANSDASSACSERSYSSRNGSIPTYMRQTEDVAEVLNRCASSNWSERKEGLLGLQNLLKNQRTLSRVELKRLCEIFTRMFADPHGKVFSMFLETLVDFIQVHKDDLQDWLFVLLTQLLKKMGADLLGSVQAKVQKALDVTRESFPNDLQFNILMRFTVDQTQTPSLKVKVAILKYIETLAKQMDPGDFINSSETRLAVSRVITWTTEPKSSDVRKAAQSVLISLFELNTPEFTMLLGALPKTFQDGATKLLHNHLRNTGNGTQSSMGSPLTRPTPRSPANWSSPLTSPTNTSQNTLSPSAFDYDTENMNSEDIYSSLRGVTEAIQNFSFRSQEDMNEPLKRDSKKDDGDSMCGGPGMSDPRAGGDATDSSQTALDNKASLLHSMPTHSSPRSRDYNPYNYSDSISPFNKSALKEAMFDDDADQFPDDLSLDHSDLVAELLKELSNHNERVEERKIALYELMKLTQEESFSVWDEHFKTILLLLLETLGDKEPTIRALALKVLREILRHQPARFKNYAELTVMKTLEAHKDPHKEVVRSAEEAASVLATSISPEQCIKVLCPIIQTADYPINLAAIKMQTKVIERVSKETLNLLLPEIMPGLIQGYDNSESSVRKACVFCLVAVHAVIGDELKPHLSQLTGSKMKLLNLYIKRAQTGSGGADPTTDVSGQS

SEQ ID NO: 287028 - DNA, 2988 bp, Artificial Sequence
  derived and/or modified sequence
atgggactgcggaaccattttcctggtgaagccgagacactctataactccctggaacccagctaccagaagagtttgcagacatatctaaaaagctctggcagtgttgcaagtctcccacagtctgacaggtcatccagtagttctcaagagtcacttaacaggccattctcttcaaaatggtcgacggcaaacccgagtaccgtagccggccgagtgagcgccggcagttctaaagcctcttctctccctggctccttacaaagatcaaggtcagacatcgacgtgaatgccgccgccggagccaaggcccatcatgccgccggacagtctgtgagatcaggtaggctcggcgccggcgcattaaacgcagggtcctatgcctctctggaggacacctcggacaaactggatggcaccgccagcgaggatgggcgtgttcgcgccaagctgtcagccccactggcgggaatggggaatgcaaaagccgactcaagaggccgctcaagaaccaagatggtgtcccagagccagcccggatctcgctccggctccccgggcagggtgctgacaactactgccttgtccaccgtaagtagtggagtgcagagggtgctggtcaattcggcgtccgcccagaaaagaagtaagatcccaagatcgcagggatgtagtcgggaggcctccccctcaagactgagcgtggcacgatcctcacgtatccctagaccctctgtgagtcagggctgttctcgcgaagcgagtagagagagtagtcgtgacactagccctgtgcgctccttccaacccctcggtccaggctacggaatctcgcaatcttcccgactgtcttcgagcgtgagtgctatgagagtgcttaacacaggcagtgacgtcgaagaagcagtcgctgacgctttgaaaaaacccgccagaaggcgctatgaaagttatggcatgcattcagacgatgatgccaactctgacgctagttccgcctgcagtgagaggtcatattcttccagaaacggcagcatccccacttatatgcggcagaccgaagatgtggcggaagttctgaatagatgtgctagcagtaattggtccgaaagaaaagagggactcctgggtctccagaatctgctgaaaaatcagagaacactatctcgggtggagctgaagaggctgtgtgaaatcttcacgaggatgtttgcagatccccatggcaagcgggtgttttcaatgtttctggaaacactggtagacttcattcaggtgcacaaggacgacttgcaggactggttgtttgtgctcctcacccagttacttaaaaaaatgggcgccgaccttctggggtccgtccaggcaaaggtgcagaaagccctggatgttacacgcgagagctttccaaacgacctccaatttaacattctcatgcgattcacagtagaccagacccagaccccttccctgaaagtcaaggtggcaattctcaagtacattgagactttagccaaacagatggaccccggtgatttcattaacagttccgagacacgccttgcagtttcccgagtgatcacatggaccaccgagccaaaaagttcagatgttaggaaggccgctcagtctgtgctcatcagtctgtttgaattaaacacacccgaattcaccatgctgttaggtgcccttcccaaaacctttcaggatggagcaacgaagttattgcacaatcatctccgaaatacaggtaatggcacccagtccagcatgggctcgccactgactcgcccaaccccgcgttcaccagcgaactggtccagccccctgacgtctcccaccaacacctcgcagaacactctaagtccgagtgccttcgattatgacactgagaatatgaattctgaggacatttattcttccttaaggggtgtcacagaggctatccaaaatttttcttttaggagtcaagaagatatgaacgagcccctgaagagagacagtaaaaaggatgatggcgactctatgtgcggagggccaggcatgtcggatcctcgggccggaggcgacgcaactgacagcagccaaacggcccttgacaacaaagcctccctgctgcattcaatgccaacccacagctctccgcgaagtcgggactacaacccatataactactctgattcaattagtcccttcaataaatcagcgctcaaagaggccatgttcgacgatgatgcagaccagtttccagatgatctgtccctggaccacagtgaccttgtggctgaactcctaaaagagctgagtaaccacaacgagagagtcgaagagcggaaaattgccctgtatgagctgatgaagctgacccaagaggagtcctttagcgtctgggatgagcattttaaaactatcctcctgctgctccttgaaaccctgggtgataaggagcctactatcagagcactcgcactgaaggtcctgcgcgagatactgaggcatcaaccagcgcgatttaaaaactatgccgagcttaccgttatgaaaactctggaggcacacaaggatcctcacaaagaagtagtccgcagtgcagaagaggccgccagtgtgctggccaccagcatctcacctgagcagtgcattaaagtactgtgccctattatacagacagctgattatcccattaacctggcggctatcaagatgcagaccaaggttatagaaagagtgtctaaagagacactgaatctcctcttgcctgagataatgcctggtctgattcagggctatgataacagcgaaagttccgtgcggaaggcatgtgtgttctgcctggtcgccgtgcacgctgttattggtgacgaattaaagcctcacttatcacagttaacgggttccaaaatgaagttgctcaacctgtacattaaaagagcacaaacaggcagcggaggcgccgaccccactacggacgtgagcgggcaatcttag

SEQ ID NO: 287029 - DNA, 4518 bp, Artificial Sequence
  derived and/or modified sequence
atggagccacgctcaatggaatatttttgcgcccaagttcagcagaaagatgttggcggtcgtcttcaggttggccaggaactgctcctctacctgggtgccccaggcgctatcagcgacttggaggaagatttgggccgactggggaaaaccgtggatgcacttaccggctgggtgggctcctcgaattaccgtgtctcactgatggggcttgagatccttagcgccttcgtggatcgcctgagcacacggttcaaatcctacgtggccatggtgatcgtcgccctcattgaccgaatgggtgacgccaaagataaagtaagagacgaggcccagacactgattttgaaattgatggatcaagtggcacccccaatgtatatctgggaacaactcgcgtcaggcttcaaacataagaatttccgttctagggagggtgtctgtctttgtctgattgagactttaaacatctttggagcccagccactggtgatttccaagctaatcccccacctgtgcatcctgttcggggacagcaatagtcaggtccgggatgctgctattctcgccattgttgagatataccgccatgtcggcgagaaagtacgcatggacctatacaagcggggaatcccccccgccaggctagagatgattttcgccaagtttgatgaggtgcagagctcaggtggtatgatcctaagcgtttgcaaggacaagtctttcgatgatgaagaatcggtcgacggcaaccggcctagctcagccgcttcagccttcaaggtccccgcacctaagacgagcgggaaccccgccaacagcgccaggaaacctggtagcgcaggagggccaaaggtggggggggcctcaaaggagggcggggcgggagctgtggatgaggatgattttattaaggccttcactgacgtcccatctattcagatctactcctccagggaactcgaagaaaccttgaacaaaatccgagaaatattaagtgacgacaagcacgactgggaccagagagctaacgctctgaaaaaaatccggagtctgctagtggctggtgctgcacaatatgactgctttttccagcatttacggctactcgacggagctctgaagctgtcggctaaggatctgaggagtcaggttgtcagagaagcctgcattaccgtggcccacctgtctactgtgcttggcaataagttcgatcacggcgccgaggctatcgttcccactctttttaacttagtcccaaattctgctaaagtaatggccacgtctgggtgtgcagcaatccgattcatcatacggcacacacacgtaccacgcttaatcccactgattacatcgaattgtaccagcaagtcagtgccggtgcggcggaggagcttcgagtttctcgatctgctgctgcaagagtggcagactcactccttggaaagacatgccgctgtcctggtggagacgatcaagaaaggaattcacgatgctgatgcagaagctcgcgttgaagccagaaagacatacatgggcctgcggaaccactttcctggcgaggcggaaacactatacaacagcctcgaaccgagctatcagaagtcacttcagacttacctgaagagcagcggttcagttgccagcttacctcagtctgataggagttcaagttcctcacaggaatccctcaacaggcccttctcttctaagtggagtaccgctaacccttctaccgtggcggggcgagtatccgcaggctccagcaaggcgagttcactcccagggagtctgcagagaagtaggagcgacattgacgtgaacgctgccgccggcgccaaagcccaccacgcagcaggccaatctgtgaggagcggacgcctgggcgctggggcacttaatgctggcagttatgcatccttggaggatacctcagacaagctggacggaactgcgagcgaagacggcagggtaagggcaaaattatctgcccctctggcaggcatgggaaatgcaaaagcagattcacgcggacgcagccgaacaaaaatggtttcacaaagccagcctggttcacggtcaggatcaccgggccgagttcttactacaaccgccctgagtacagtttcgtccggtgtacaacgagtcctggtgaatagcgctagtgcacagaaacggtctaagatccccagaagccaaggttgctccagagaggcctcacccagccggttgtccgtggctagaagcagccgtatacccagaccttcagtgtctcagggttgctcacgcgaagcatctcgtgagagttctcgagataccagccctgtgcgttcttttcagccacttggacctggatacggtattagccaatcgtcacgactttcttcaagtgtgagcgccatgcgggttctgaataccggttcagatgtcgaagaagccgtggcagacgctctaaagaaaccagctagaaggcggtacgaatcctatggaatgcactctgacgacgacgccaactccgacgcaagctccgcttgctctgagagatcatacagctctcgcaacggaagcatccctacatacatgagacagaccgaggatgtggctgaggtgctgaaccgctgcgcatccagcaactggagcgagcgtaaggagggcctactgggcctccagaatctgctcaaaaatcaaagaacactctctcgggtggagctcaagcgcctgtgcgaaatcttcactcgaatgttcgccgatccgcatggcaaggtcttcagcatgttcttggagacattggttgacttcatccaggtccataaggacgatttacaagattggctgtttgtgctgctgacccagctcctgaaaaaaatgggagcggatttgttaggcagcgtgcaggctaaagtgcagaaggccctcgatgtgacaagggagtcctttccaaacgacctgcagttcaatatactcatgaggtttacggtcgatcaaacacagacaccgtccctgaaagtcaaggtggctattttaaagtacatcgaaaccttggctaagcaaatggaccctggcgatttcatcaattctagcgaaacgagactggctgtgagccgcgtgatcacctggacgaccgagcccaaatccagcgacgtgcgcaaggctgctcagtcagttctgatctctctgttcgaacttaacacccctgagtttaccatgttgttgggggccctcccaaaaacgtttcaggatggagcgaccaagttgctacacaatcacctgcgaaataccggcaatgggactcagtcttccatgggcagccccttgacccgcccgaccccgaggagccccgccaattggtcgagcccactgacgtcccccacgaacacatcccagaatactttgagcccgagcgccttcgattacgatacagaaaacatgaactctgaagatatatactcaagcctgcgcggggtcacagaagccatccagaattttagcttccgttcccaggaggacatgaatgaaccactgaaacgcgactctaaaaaagatgatggggactctatgtgcgggggcccaggcatgtcggacccacgggcaggaggcgacgccacagacagcagccagaccgccctcgacaataaagcttctctcctgcattccatgcctactcattctagccctcggagccgggattataatccgtacaattactccgattctattagtcctttcaacaagtcagccttaaaagaagcaatgtttgacgacgacgccgatcagttccctgatgatctgtcactggaccacagcgacttggtggccgaattgctgaaggagttgagcaaccacaatgagagagtggaagaacgcaagattgctttgtatgaactgatgaagttgacacaggaagagtctttttccgtttgggatgaacactttaagacaatactcctgttacttctcgagacattgggcgataaagaacctaccattagagccctggctcttaaggtattgcgtgaaatactgaggcaccagcccgcccgcttcaagaactatgccgagctgactgtgatgaagactctcgaggcccacaaagacccacacaaagaggtggtgcgatccgccgaggaggctgcctcagtgcttgcaacgagtattagccccgagcaatgcattaaagttctttgccctataatccaaactgctgattacccaatcaacctggcagctatcaagatgcagaccaaggtgatcgaaagagtctctaaagaaacgttgaatttattgctgccagagatcatgcctggcctcatacaagggtacgacaattccgagagctctgtgagaaaggcctgcgtattctgccttgttgccgtgcacgccgtgatcggagacgaactgaagccacacctgtctcaactcaccggatccaaaatgaagcttctgaacctatacattaaacgggcccagacagggtccggaggcgccgatccgaccacagacgttagcggacagtcctag

SEQ ID NO: 287030 - DNA, 2988 bp, Artificial Sequence
  derived and/or modified sequence
atgggcctgaggaaccacttccctggagaggccgagaccctgtacaacagcctggagcccagctaccagaagagcctgcagacctacctgaagagcagcggctctgtggccagcctgccccagagcgacaggagcagcagcagcagccaggagagcctgaaccggcccttcagcagcaagtggagcacagccaaccccagcacagtggccggccgggtgtctgctggcagcagcaaggccagcagcctgcccggcagcctgcagaggagcagaagtgacattgatgtgaatgctgctgctggggccaaggcccaccacgccgccggccagagcgtgcgcagcggccgcctgggcgctggggccctgaatgccggcagctatgccagcctggaggacaccagtgacaagctggatggaacagcctctgaagatggccgggtgcgggccaagctgagcgcccccctggccggcatgggaaatgccaaggctgacagccggggccgcagcaggaccaagatggtgtcccagagccagcccggcagccgcagcggcagccctggccgggtgctgaccaccacagccctgagcacagtgagcagcggcgtgcagagggtgctggtgaacagcgccagcgcccagaagaggagcaagatccccaggagccagggctgcagccgggaggccagccccagccggctgtctgtggcccggagcagccgcatcccccggcccagcgtgtcccagggctgcagccgggaggccagccgggagagcagccgggacaccagccctgtgcgctccttccagcccctgggccctggctacggcatcagccagagcagccggctgagcagctctgtgtctgccatgagggtgctgaacacaggcagtgatgtggaggaggccgtggctgatgccctgaagaagccagccaggagaagatatgagagctatggcatgcacagtgatgatgatgccaacagtgatgccagcagcgcctgcagcgagaggagctacagcagcagaaatggcagcatccccacctacatgaggcagacagaagatgtggccgaggtgctgaacagatgtgccagcagcaactggagcgagaggaaggagggcctgctgggcctgcagaacctgctgaagaaccagaggaccctgagccgggtggagctgaagaggctgtgtgagatcttcaccaggatgtttgctgacccccacggcaagagggtcttctccatgttcctggagaccctggtggacttcatccaggtgcacaaggatgacctgcaggactggctgtttgtgctgctgacccagctgctgaagaagatgggcgctgacctgctgggctctgtgcaggccaaggtgcagaaggccctggatgtgacccgggagagcttccccaatgacctgcagttcaacatcctgatgaggttcaccgtggaccagacccagacccccagcctgaaggtgaaggtggccatcctgaagtacatcgagaccctggccaagcagatggaccccggggacttcatcaacagcagcgagacccggctggccgtgtccagggtcatcacctggaccacagagcccaagagcagtgatgtgaggaaggccgcccagagcgtgctgatcagcctgtttgagctgaacaccccagagttcaccatgctgctgggcgccctgcccaagaccttccaggatggagccaccaagctgctgcacaaccacctgagaaatactggaaatggcacccagagctccatgggcagccccctgacccggcccacccccaggagccctgccaactggagcagccccctgaccagccccaccaacaccagccagaacaccctgagccccagcgcctttgattatgacacagagaacatgaacagcgaggacatctacagcagcctgcggggcgtgacagaggccatccagaacttctccttccgcagccaggaggacatgaatgagcccctgaagagggacagcaagaaggatgatggagacagcatgtgtggcggccctggcatgtctgaccccagggctggaggagatgccacagacagcagccagacagccctggacaacaaggccagcctgctgcacagcatgcccacccacagcagccccaggagccgggactacaacccctacaactacagcgacagcatcagccccttcaacaagagcgccctgaaggaggccatgtttgatgatgatgctgaccagttcccagatgacctgagcctggaccacagcgacctggtggccgagctgctgaaggagctgagcaaccacaatgaaagagtggaggagaggaagatcgccctgtatgagctgatgaagctgacccaggaggagagcttctctgtgtgggatgagcacttcaagaccatcctgctgctgctgctggagaccctgggggacaaggagcccaccatccgggccctggccctgaaggtgctgcgggagatcctgcggcaccagcctgcccgcttcaagaactatgcagagctgactgtgatgaagaccctggaggcccacaaggacccccacaaggaggtggtgcgctctgctgaggaggccgcctctgtgctggccaccagcatcagccctgagcagtgcatcaaggtgctgtgccccatcatccagacagctgactaccccatcaacctggccgccatcaagatgcagaccaaggtgattgagcgggtgtccaaggagaccctgaacctgctgctgcctgagatcatgcctggcctcatccagggctatgacaacagcgagagctctgtgaggaaggcctgtgtgttctgcctggtggccgtgcatgctgtgattggagatgagctgaagccccacctgagccagctgaccggcagcaagatgaagctgctgaacctgtacatcaagagggcccagacaggcagcggcggcgctgaccccaccacagatgtgtctggccagagctag

SEQ ID NO: 287031 - DNA, 4518 bp, Artificial Sequence
  derived and/or modified sequence
atggagcccaggtccatggagtacttctgtgcccaggtgcagcagaaggatgtgggcggccgcctgcaggtgggccaggagctgctgctgtacctgggcgcccctggggccatcagtgacctggaggaggacctgggccgcctgggcaagacagtggatgccctgaccggctgggtgggcagcagcaactacagagtgtccctgatgggcctggagatcctgagcgcctttgtggaccggctgagcacccgcttcaagagctatgtggccatggtgattgtggccctgattgacaggatgggagatgccaaggacaaggtgagagatgaggcccagaccctcatcctgaagctgatggaccaggtggccccacccatgtacatctgggagcagctggccagcggcttcaagcacaagaacttccgcagccgggagggcgtgtgcctgtgcctgattgagaccctgaacatctttggagcccagcccctggtgatcagcaagctgatcccccacctgtgcatcctgtttggagacagcaacagccaggtgagagatgctgccatcctggccatcgtggagatctacagacatgtgggggagaaggtgaggatggacctgtacaagaggggcatccccccagcccggctggagatgatctttgccaagtttgatgaggtgcagagcagcggcggcatgatcctgtctgtgtgcaaggacaagagctttgatgatgaggagagcgtggatggcaaccggcccagcagcgctgccagcgccttcaaggtgcctgcccccaagaccagcggcaacccagccaacagcgccaggaagccaggcagcgctgggggccccaaggtgggcggggccagcaaggagggcggggccggggctgtggatgaagatgacttcatcaaggccttcacagatgtgcccagcatccagatctacagcagccgggagctggaggagaccctgaacaagatccgggagatcctgagtgatgacaagcatgactgggaccagagggccaatgccctgaagaagatccgcagcctgctggtggccggggccgcccagtatgactgcttcttccagcacctgcggctgctggatggagccctgaagctgagcgccaaggacctgcggagccaggtggtgcgggaggcctgcatcaccgtggcccacctgagcacagtgctgggcaacaagtttgaccacggggctgaggccatcgtgcccaccctcttcaacctggtgcccaacagcgccaaggtgatggccaccagcggctgtgccgccatccgcttcatcatccgccacacccacgtgcccaggctcatccccctcatcaccagcaactgcaccagcaagtctgtgcctgtgagaagaagaagctttgagttcctggacctgctgctgcaggagtggcagacccacagcctggagagacatgctgctgtgctggtggagaccatcaagaagggcatccatgatgctgatgctgaggcccgggtggaggccaggaagacctacatgggcctgaggaaccacttccctggagaggccgagaccctgtacaacagcctggagcccagctaccagaagagcctgcagacctacctgaagagcagcggctctgtggccagcctgccccagagcgacaggagcagcagcagcagccaggagagcctgaaccggcccttcagcagcaagtggagcacagccaaccccagcacagtggccggccgggtgtctgctggcagcagcaaggccagcagcctgcccggcagcctgcagaggagcagaagtgacattgatgtgaatgctgctgctggggccaaggcccaccacgccgccggccagagcgtgcgcagcggccgcctgggcgctggggccctgaatgccggcagctatgccagcctggaggacaccagtgacaagctggatggaacagcctctgaagatggccgggtgcgggccaagctgagcgcccccctggccggcatgggaaatgccaaggctgacagccggggccgcagcaggaccaagatggtgtcccagagccagcccggcagccgcagcggcagccctggccgggtgctgaccaccacagccctgagcacagtgtcctctggagtgcagagggtgctggtgaacagcgccagcgcccagaagaggagcaagatccccaggagccagggctgcagccgggaggccagccccagccggctgtctgtggcccggagcagccgcatcccccggcccagcgtgtcccagggctgcagccgggaggccagccgggagagcagccgggacaccagccctgtgcgctccttccagcccctgggccctggctacggcatcagccagagcagccggctgagcagctctgtgtctgccatgagggtgctgaacacaggcagtgatgtggaggaggccgtggctgatgccctgaagaagccagcccggcggcgctatgagagctatggcatgcacagtgatgatgatgccaacagtgatgccagcagcgcctgcagcgagaggagctacagcagcagaaatggcagcatccccacctacatgaggcagacagaagatgtggccgaggtgctgaacagatgtgccagcagcaactggagcgagaggaaggagggcctgctgggcctgcagaacctgctgaagaaccagaggaccctgagccgggtggagctgaagaggctgtgtgagatcttcaccaggatgtttgctgacccccacggcaaggtgttctccatgttcctggagaccctggtggacttcatccaggtgcacaaggatgacctgcaggactggctgtttgtgctgctgacccagctgctgaagaagatgggcgctgacctgctgggctctgtgcaggccaaggtgcagaaggccctggatgtgacccgggagagcttccccaatgacctgcagttcaacatcctgatgaggttcaccgtggaccagacccagacccccagcctgaaggtgaaggtggccatcctgaagtacatcgagaccctggccaagcagatggaccccggggacttcatcaacagcagcgagacccggctggccgtgtccagggtcatcacctggaccacagagcccaagagcagtgatgtgaggaaggccgcccagagcgtgctgatcagcctgtttgagctgaacaccccagagttcaccatgctgctgggcgccctgcccaagaccttccaggatggagccaccaagctgctgcacaaccacctgagaaatactggaaatggcacccagagctccatgggcagccccctgacccggcccacccccaggagccctgccaactggagcagccccctgaccagccccaccaacaccagccagaacaccctgagccccagcgcctttgattatgacacagagaacatgaacagcgaggacatctacagcagcctgcggggcgtgacagaggccatccagaacttctccttccgcagccaggaggacatgaatgagcccctgaagagggacagcaagaaggatgatggagacagcatgtgtggcggccctggcatgtctgaccccagggctggaggagatgccacagacagcagccagacagccctggacaacaaggccagcctgctgcacagcatgcccacccacagcagccccaggagccgggactacaacccctacaactacagcgacagcatcagccccttcaacaagagcgccctgaaggaggccatgtttgatgatgatgctgaccagttcccagatgacctgagcctggaccacagcgacctggtggccgagctgctgaaggagctgagcaaccacaatgaaagagtggaggagaggaagatcgccctgtatgagctgatgaagctgacccaggaggagagcttctctgtgtgggatgagcacttcaagaccatcctgctgctgctgctggagaccctgggggacaaggagcccaccatccgggccctggccctgaaggtgctgcgggagatcctgcggcaccagcctgcccgcttcaagaactatgcagagctgactgtgatgaagaccctggaggcccacaaggacccccacaaggaggtggtgcgctctgctgaggaggccgcctctgtgctggccaccagcatcagccctgagcagtgcatcaaggtgctgtgccccatcatccagacagctgactaccccatcaacctggccgccatcaagatgcagaccaaggtgattgagcgggtgtccaaggagaccctgaacctgctgctgcctgagatcatgcctggcctcatccagggctatgacaacagcgagagctctgtgaggaaggcctgtgtgttctgcctggtggccgtgcatgctgtgattggagatgagctgaagccccacctgagccagctgaccggcagcaagatgaagctgctgaacctgtacatcaagagggcccagacaggcagcggcggcgctgaccccaccacagatgtgtctggccagagctag

SEQ ID NO: 287032 - DNA, 2988 bp, Artificial Sequence
  derived and/or modified sequence
atgggcctgcggaaccacttccccggcgaggccgagaccctgtacaacagcctggagccttcctaccaaaagtccttacaaacttatctgaagtcctctgggtctgtggcaagtcttccccaaagtgacagaagtagtagcagtagccaggagtctttgaacaggcccttttcctccaagtggagtaccgcaaaccctagcacagtggccggccgggtaagcgccggttcatccaaagcgtcaagtttgcctgggtctttacagagaagcaggtcggatatcgatgtcaacgccgcggccggggccaaggcccatcacgcagcgggccagtctgtccgttctggtagactcggcgccggcgcgctgaacgccggatcttatgccagcctggaagatacttcggacaagttagatggcacggcgtcagaggatgggagagtgagggctaagttaagcgcaccccttgctggaatggggaacgccaaagctgactcacgtggaaggagtagaactaaaatggtgagtcaaagccagcccggtagtcggtccgggagccctgggcgcgtgttgaccacaaccgccctgtccaccgtctctagtggcgtgcagagagtactggtgaatagcgcttcagcacagaagaggagtaaaatccctcgcagtcagggttgctcccgagaggcgagtccgtctcggctttcggtggcgagaagtagtcgcattcccaggccctctgtgtcacagggatgtagccgtgaagcaagcagagaatcctctcgggacaccagccctgtgcgatctttccagccactggggccaggctatggaatctctcagtcgagccggctcagctctagcgtgagcgcaatgcgtgttctgaacacaggcagcgacgtggaggaggccgtcgctgatgcactaaaaaaaccagcccgccgaagatatgaaagttatggcatgcacagtgacgacgatgccaattctgacgcatcctcagcttgtagcgaacggtcctatagctctaggaacggttccattcccacctatatgcggcaaactgaagatgtggctgaagttctaaatcggtgcgcatcatctaactggagtgaaaggaaggagggtctgcttggcctgcaaaacctcctgaaaaatcagcgcactctgagccgcgtggagctaaagagactctgcgagatcttcacacggatgtttgccgatccacatggaaagcgtgtattcagcatgttcctcgaaacattggttgatttcatccaggtgcataaggacgacctgcaagactggctcttcgtgctgctgacccagcttctgaagaaaatgggcgcagacctgctgggatccgttcaggcgaaagtccaaaaagccctggacgtcacaagagaatcattccccaatgaccttcaattcaacattctcatgagatttactgtggaccagacgcagacaccaagtttaaaagtgaaagtggctattctcaaatacatcgagacactggctaagcagatggacccaggcgactttatcaactcctccgaaactaggttggctgtgtcaagggtgatcacttggacgacagaacctaagagcagtgacgtccgaaaagctgcccagagcgtgcttataagtttattcgagctcaatactcctgaatttactatgctactgggcgctctccctaagacatttcaagacggggccacaaagttactacataaccacctaaggaatacagggaacgggacacagtctagcatggggtcccctttgactagacctactcctcgctcgccagcgaactggtcatccccccttacaagtccaacaaatacatctcaaaataccctgagtccctccgcgtttgattatgataccgaaaatatgaacagtgaagacatctatagcagcttgagaggcgtgacagaagccattcagaatttcagcttcaggtcccaggaggacatgaatgagccccttaagcgtgactccaaaaaggatgatggtgatagcatgtgtgggggcccaggcatgagcgaccctagagcggggggcgatgcgactgactcaagtcagacagcacttgacaataaggcatccctcttgcactctatgcccactcactcatcacctcgatcaagagattataacccctataactacagcgatagtatctccccttttaataaatctgctctcaaggaggccatgtttgatgatgacgcagatcaatttcccgacgacctctcgctggaccactccgatctagtagcagaactgctcaaagagcttagtaaccacaatgaacgagttgaggaacgcaagatagcactgtatgagttgatgaagttgactcaggaggagtccttttcagtttgggacgagcactttaagacgatcctgctactgcttctcgagactctaggggacaaagagccaactatcagagccctggcgctcaaagtgctccgggagatcttgcggcaccaacccgcgcgctttaaaaactacgctgaactgaccgtgatgaaaacgctggaggcccacaaggatccgcataaagaggtagtgcgcagtgcagaagaagccgcgagtgttttagccacttccatatcaccggaacagtgtatcaaggtgttgtgcccaatcattcagacagccgattatcccatcaacctggctgccatcaagatgcagaccaaagtgattgagagagtatccaaagaaaccctcaacctactgcttcctgagatcatgccgggcctgatacaaggctatgacaattcagagtccagcgtgcgtaaggcctgcgtcttctgcctggtggccgtacatgcagtgattggtgatgagcttaaaccccatctctcccagctcacaggttccaaaatgaagctgttgaacctttacattaaaagagcacagacagggtccggcggcgccgatccaaccacagatgtcagtggccagagctag

SEQ ID NO: 287033 - DNA, 4518 bp, Artificial Sequence
  derived and/or modified sequence
atggagccccggagcatggagtacttctgcgcccaggtgcagcagaaggacgtaggagggcgactacaagtcgggcaggagctgctgctgtatctcggcgccccaggggccatttcggatttagaggaggatcttggcaggctcgggaaaaccgtggatgctctcaccggctgggtgggatcttccaattatcgagtgtccctaatgggcctggagatccttagcgcgttcgtggacaggctctcaacgagattcaagtcgtatgtcgctatggtgatcgtggctcttattgatcgcatgggcgacgcgaaagataaggtgcgcgatgaggctcaaacccttatcctcaagttaatggatcaggtggcaccgcccatgtatatatgggagcagctggcctccgggttcaaacacaagaatttccggtcacgggaaggagtgtgtctctgcttaatcgaaacccttaatatttttggggcacagcccctggtcattagtaagcttatccctcatttatgtattctcttcggcgattcaaattcacaagttagagatgccgcgatccttgcaatcgtagagatctatcgacatgtgggagaaaaagtacgcatggacctatacaagaggggaatccctcccgcacgacttgagatgatttttgcaaagttcgacgaagttcaatcctccggaggcatgattctgtcagtgtgtaaggacaaatcattcgatgatgaggaatctgtagatggcaatagaccctccagcgccgcttctgccttcaaagtccctgctcctaagacttcagggaatccagccaactcagccaggaagcctgggagcgccgggggacccaaagttggcggtgcttccaaggaaggtggtgccggcgccgttgatgaggatgatttcataaaagcctttacagacgtgcccagcatccaaatttactccagtagggaactagaggagactcttaataaaatcagggagatccttagcgatgataagcatgactgggatcaaagggcaaatgcgctcaaaaagatcagaagtctgcttgtggctggtgcagctcagtacgattgtttcttccagcacctgcggctgctggacggggctctgaagctgagcgctaaggacctccgtagccaggttgtgcgggaggcctgcataaccgtggcccacctcagcaccgtgttaggtaataaattcgaccatggtgcagaagccattgttcctacactatttaacctggtgccaaactcagccaaggtgatggcgacctccgggtgcgccgccatacggttcataatccgccacacccatgtcccacggctgattcccctgattacgtcaaattgcactagcaagagcgttccagtgaggaggcgcagtttcgaatttttggatctgctactgcaagagtggcagacccatagcctggagcgtcatgctgccgtgctagtggagacgatcaagaagggaattcatgatgcagacgcggaagcaagagtagaggctcgaaagacgtacatgggactgcgcaaccattttcctggcgaagcagagactctgtataacagtctggaaccttcttaccagaaatctctgcagacatacctgaagagcagtggttccgtggcatctctcccccagtcagacaggtcgagttcgtcttcacaggagagcttgaatcgaccgtttagttcaaagtggtccaccgctaacccttctactgtggctggcagggtaagtgctggaagcagtaaggccagttcattgcctggatccctgcagagaagccgctccgacatagacgtgaatgccgccgccggcgctaaagcacaccatgcagcaggccaatctgttagaagtggccggctcggtgcaggtgccctgaatgcaggtagctatgctagcttagaagatacttccgacaagttagacgggacagccagcgaagacggcagagtgagagctaagctgagcgctccacttgcaggcatgggcaatgcaaaggcagattcgagaggccggtcccggaccaaaatggtcagtcagtctcaacccggcagccgttcagggtcacctggtcgcgtactaactaccaccgccctgtctacagtatcctctggcgtgcagcgggtgctcgtgaacagtgcctccgcccagaagcgtagtaagatccctagaagccagggatgtagtcgcgaggccagtcctagcagactctctgtggcaagatcatccagaattcctcgtccttcagtttcacaggggtgctcccgtgaggcgagtcgggagtccagcagagataccagcccagttcgttcttttcagcccctcgggcctggctacggcatttctcagtcctcaagactgtcatcaagcgtgtccgcgatgcgcgtgctgaataccggttctgacgttgaggaggcagtggccgatgcattgaagaaacctgcgcgtcgtcgctacgagagctacggcatgcattcggatgatgatgcgaatagcgatgcatccagtgcatgtagtgagaggtcctattccagtagaaacgggtctatccccacctacatgcggcagaccgaagacgtcgcggaagtcctgaaccgttgcgctagctcaaattggagtgaaaggaaggagggcttacttgggctgcaaaatttgctgaagaatcagcgcactctaagccgtgtggagttgaagcggctgtgtgagatcttcactagaatgtttgctgacccacacgggaaagtcttttcaatgtttctggaaacattagtggactttatccaggttcacaaagacgacctgcaggactggttgttcgtgctcctgacgcaactgctgaagaaaatgggcgctgacctattgggtagcgtacaggctaaagtccagaaggccctcgatgtaaccagggaatcctttcccaatgacctccagttcaatatattaatgcgatttaccgtagatcagactcagactcccagtctcaaggtcaaagtcgccatattaaaatatattgaaactctggccaagcagatggaccctggagattttattaattctagtgaaacgcggttggccgtgtcacgagtgatcacatggacaactgagcctaagtcttcggacgtgaggaaggccgcccaatccgtgttgatctctcttttcgagcttaatactccagaatttacgatgctcctcggagccctgcctaagacatttcaggacggcgccacgaaacttctgcacaaccatttgagaaacaccgggaacggtacacagtcaagtatggggtcaccgcttacaagaccgacccccagaagcccagctaattggtcaagccccctcacatccccaaccaatacatcccagaatacgctgtccccttccgcatttgattacgacacggagaatatgaactccgaggacatttactcatccttgcggggggtgacggaagccatccaaaacttttctttccggtcacaggaagatatgaacgagccactgaagcgggattcaaagaaggatgatggcgattcaatgtgcggcgggccgggtatgtcagaccccagggctggcggggatgctaccgattcgagccagaccgcactagataataaggcatctctgctccatagtatgcctacccatagctccccccggagcagagactacaatccttacaactactctgattccataagcccgtttaataagtcagcgctgaaggaggcaatgtttgacgacgacgccgatcaatttcctgacgacctgtccttggaccattctgacctggttgctgaattgctgaaggaactaagtaaccacaacgagagagtcgaagaacgaaaaatcgctctgtatgaactgatgaagttaacgcaagaagagtctttctccgtgtgggacgagcactttaagacaatcctccttctgcttctagaaacactgggcgataaggaaccaacaattcgtgccctggcattgaaagttcttagagagatcctccggcaccaacccgccagatttaaaaattatgctgaactgacagtgatgaagacactggaggcccataaagatcctcataaggaggtagtgcgttcggcggaagaggccgcctcggttttggcgacatccatatctccggaacagtgcatcaaagtcctgtgccccataatacagaccgctgattaccctattaacctggccgcaatcaagatgcagactaaagttattgaacgggtgtctaaggagactcttaaccttcttctgcccgagattatgccgggtttaatccaggggtacgacaattctgagtcttcagtcaggaaagcatgtgtattttgcctcgtagccgtgcatgccgtgattggcgacgaattgaagcctcatctgagccagctcaccggatcaaagatgaagctgctcaacttgtatatcaagcgggcgcagacaggctccgggggggcggatccgacgactgacgttagtggtcagagctag

SEQ ID NO: 287034 - DNA, 2988 bp, Artificial Sequence
  derived and/or modified sequence
atgggacttcggaaccacttccctggagaggcggaaacgctctataactcattggagccatcttaccaaaaatccctgcagacataccttaagtcttccggctccgttgcttcattaccacagtcagatagatcatcttcttcatcacaggaatccctgaaccgacccttcagctctaagtggtccaccgctaacccctcaaccgtcgctgggagggttagtgccggatctagtaaagcgtcatccctacctgggtcactgcagcgtagcaggtccgatatcgatgttaatgcagcagccggtgctaaagctcatcacgctgcaggtcaatccgttcggagtggtcggttgggcgctggtgctttaaacgccggttcctacgcctcacttgaggatacgagtgacaaactggatggcaccgcatccgaagatggcagagtaagggcaaagctgtctgcaccactggcgggaatgggaaacgccaaggctgattcccgtggacggagcagaaccaaaatggtgtcccagagccaacctggttcacgctcaggatctcctggaagggtgctgaccactaccgctctctccactgtaagcagcggggtccagagggtcctggttaattccgcctctgctcagaagagaagcaagatcccacgatctcaaggttgtagtcgggaagcttctccatccaggctgtcagttgcaagatctagcaggattccacgtcctagcgtaagtcaaggttgctctagagaggcctcgagagagtcttcacgtgacacttcacccgtgcggagcttccagcccctgggacccggttacgggataagtcaatcctccaggttgtcttcaagcgtgtcagctatgcgggtccttaataccgggtcagacgtggaagaggctgtggctgacgcactgaaaaaaccggcaagacgacgatacgagtcttacggtatgcacagtgatgatgatgcaaactctgatgcgtcaagcgcatgcagcgaacgatcctactctagccgaaacggctctattcccacctatatgagacagaccgaggacgtagcagaggtgctcaaccgctgcgcctcttccaattggtctgagcgcaaggagggcctgttaggcctgcagaacttacttaagaaccagcgcacactgagccgcgtagaacttaagaggctgtgtgagatattcacacgcatgttcgccgacccgcacgggaaaagagtatttagcatgttcctagaaactttggtagattttattcaggttcataaggatgacttgcaggactggctgttcgtgctgctgacccagctattaaaaaagatgggtgccgaccttctcggatccgtgcaggcaaaggtccagaaggccctcgatgtgacaagggagagcttccccaatgacctccaatttaatatccttatgaggttcacagttgatcaaactcagaccccgagtcttaaggtcaaggtggctatcctaaaatacatcgagacattggccaaacagatggacccaggggatttcattaattcatccgagacgcgactggccgtgagtagggttattacatggactaccgaacccaaaagctcagacgtcagaaaggccgctcagagtgtgctgattagcctgtttgagctcaacacacctgaatttactatgcttctgggcgcactcccgaaaacattccaggacggggcaactaagctcctgcacaatcatttgcgcaacacaggtaacggtacgcaaagctcaatgggctcgcctctgaccaggccaacgcccaggagtccagccaattggtcttccccactaacaagcccaacgaacacttcacagaatactctgagtccaagcgccttcgactatgatactgaaaatatgaactcagaagatatatattcttcccttaggggcgtgactgaggcaattcaaaacttctccttcagatcacaggaagatatgaacgaacctctcaaaagagactccaagaaggacgacggcgacagcatgtgtgggggtccaggcatgtccgaccctcgtgccggaggcgacgccacagatagttcacagaccgccttggacaacaaagcttccctgctgcattcgatgcctactcattcatcgccccgaagccgagattacaacccttacaattacagtgattctatctccccatttaacaagagtgccctaaaggaagctatgttcgacgatgatgctgaccagtttcctgacgatctaagcttagaccatagtgacctggtggccgagcttctgaaggaactttcaaaccacaatgagagagtcgaggaaagaaagatagccctgtacgaactcatgaagttgacccaggaagaaagcttctctgtttgggatgaacacttcaagacgatcctactcctgctgctcgagacgctgggcgacaaggaaccaaccatcagggccctcgctctcaaagtgttacgcgagatactccgacatcaaccggctcgttttaagaactacgccgagctcacggttatgaaaactcttgaagcccacaaggatccccacaaggaggtggtcaggtcagccgaggaagctgccagcgtgttagccacgagcatctccccggagcagtgcatcaaggtcctttgcccaattattcagaccgcagattaccctataaatctggctgccattaagatgcagacaaaagtcatagaacgggtctccaaagagaccttgaatcttctgctgcccgagattatgcctggtctgattcagggctacgacaactcggagtcttctgttcgaaaggcctgcgtcttctgtctggtagccgtgcatgccgtgattggggacgaactgaaaccccacctgtcacagctgaccggaagcaaaatgaagcttcttaatctatacattaagagggctcagacgggctcaggaggggctgatccaaccactgacgttagcgggcagtcctag

SEQ ID NO: 287035 - DNA, 4518 bp, Artificial Sequence
  derived and/or modified sequence
atggaacctaggagcatggaatacttttgtgcacaggtgcagcagaaggacgtgggagggcgactgcaagtgggccaagaacttcttctgtatctgggtgcgcctggagccatctccgaccttgaagaggacctggggcgtttaggcaagactgtcgacgccctcacggggtgggttggttcgtccaactacagagtgagcctgatgggacttgaaatattatccgcattcgtggacaggttatccaccaggtttaaatcatatgtcgctatggtgatcgttgctctaatcgatagaatgggagacgctaaggataaagtgcgcgacgaagcgcagactttgatcctaaagctgatggatcaagtggccccacccatgtacatctgggagcaactggccagcggtttcaagcataagaatttccgttctcgagaaggcgtctgcctctgcctgatcgaaaccctgaacatcttcggagcgcaacccctggtgatttcaaagttgatcccacacctatgcattctatttggggactctaattctcaggttcgcgatgccgcaattttagccatcgtggaaatataccggcatgtgggcgaaaaggtacgcatggatctctataagaggggtattccccctgctcgactggagatgatattcgccaaattcgacgaagtccagagttccggcggaatgatcctgagcgtgtgtaaggataagtcatttgatgatgaagagagtgtggacggaaatcgacccagcagtgcggcatctgcattcaaggttcccgcaccgaagacttctggaaatcccgcaaatagcgcaaggaagccagggtctgctggcggtcccaaggttgggggagccagcaaagagggtggcgctggcgctgttgatgaggatgattttatcaaggcatttaccgacgtaccttctatccaaatttatagttcacgggaattggaagagactctgaacaaaatcagggaaatcctctccgacgacaagcacgactgggaccagagagccaatgcattgaaaaaaattcgttctcttctagtggcgggagcggctcagtatgactgctttttccaacacctcagattgctggacggcgcattaaagctgtctgccaaagatctaagatctcaggttgtccgagaggcttgcatcactgtcgcgcaccttagcaccgttctggggaataaattcgaccacggcgcagaagctatagtgccaaccttatttaacttggttcccaatagtgctaaggtcatggccacatctggctgcgccgcaatacgttttatcatccgccacacgcacgtgcctagattaatccctctcattacatctaattgcacttctaagagtgtgcccgttcgtagacgcagttttgaattcctggacttgctgttgcaggagtggcagactcactctctagagagacacgccgcagtactagtggagaccattaagaaggggattcacgatgccgatgctgaggccagggtcgaggctaggaaaacttatatgggcttgcgcaatcatttccccggtgaagccgaaaccctctataattccctcgagccctcttatcagaagagcctgcaaacctatttaaaatcatctggcagcgtcgcatcactgccacagagtgaccggtccagctcctctagccaggagtccctgaatcgccctttttcctccaaatggagtacagctaatccttcaacggtggcaggtagagtgagcgccggaagttccaaagccagcagcctgcctggcagcctgcagcgaagccggtcagatatcgatgtcaacgcggctgccggagccaaagctcatcatgccgcaggacagtccgtgcggtcgggtcggctgggtgcgggtgctctgaacgcaggttcatacgccagtcttgaggatacttccgacaaactggacggcaccgccagcgaggacggccgtgtgagggcaaagcttagcgcaccactcgccggtatgggaaatgctaaggccgatagtcgtggcaggtcaaggactaagatggtgagtcaatcccaacccggtagtaggtctggctcacccggtcgggtgttgaccactacagctctgagtacagtgtccagtggggtgcagcgcgtcctggtcaactccgctagtgcacaaaagcgctctaagattcccaggagtcaaggctgttctcgagaggcaagcccaagccggctgagcgtggccagaagtagccgtatccctagaccatctgtctctcagggatgcagtcgggaagctagtagagagtcatcacgggatacctctcccgtgcgatcctttcagcctcttggccctggatacgggatctcccagtcttcaaggctgtccagctctgtatctgccatgagagttctgaatactggatctgatgtcgaggaggccgtggccgacgctctgaaaaagccggctcgtcgtagatacgaatcttacggaatgcattcggacgatgacgcaaactctgatgcatcaagcgcctgcagcgagaggtcctatagcagtagaaacggaagtatccctacatacatgcgacagacagaagatgtcgccgaagttttgaacaggtgcgcaagctccaactggagtgagcgaaaggaaggattgcttggcctccagaacctgctcaagaaccagcggactctcagcagggttgagctaaagcgtctctgcgagatatttacacgaatgttcgcggacccacacggaaaggtttttagtatgttcttggaaacactcgttgatttcattcaagtgcacaaagacgacttgcaggattggctgtttgtcctacttacgcagttgctcaagaagatgggggcagacttactggggagcgtgcaggccaaggttcaaaaagcgctggacgtgaccagagaatccttccccaatgacctgcagtttaacatcttaatgcgatttactgtcgatcagacacagaccccttcgctaaaggtgaaagttgctatcctgaaatatatagaaaccctggcgaaacagatggaccctggtgactttataaatagttccgaaacccgcctggccgtgtccagagtaattacctggaccacagagccaaaaagttccgatgtgaggaaagctgcccagtctgtactgatttctctattcgagctcaatacccctgagttcactatgctgttaggggcactgcccaaaacctttcaggacggggcaacgaaactcctgcacaaccatctacggaataccggcaacggcacgcaatccagcatgggcagcccacttactagaccaacccccaggagccccgctaattggtcaagccctcttaccagccctaccaataccagtcagaataccctctcccctagcgctttcgattatgacacggagaacatgaactccgaggacatttactctagtctgagaggggtcactgaggccattcagaatttctcattccgctcacaggaagacatgaacgaacccctgaagcgagacagtaagaaagacgacggagattctatgtgtgggggtcctggcatgtccgatcccagggcgggaggtgatgcaacagactcttctcagaccgctttagacaataaagctagtcttcttcacagcatgcccacacattcatctccccgatctcgcgactacaacccttataattacagtgactctatctcgcccttcaataagtcagcgctaaaggaagcgatgttcgatgatgatgcggaccagtttccagatgatctctcccttgatcactctgacctggtcgctgaactgctcaaagaactgtctaatcacaacgaaagggtagaggaacgaaaaattgcactgtatgagctgatgaaactgacccaagaggagtccttctcagtttgggatgagcactttaagactatcctccttctcctcctcgagaccctgggggataaagagcccaccataagggcgctcgcccttaaggtcctgagggaaatcctgcgccatcagccagcccgttttaagaactacgccgagctcacggtgatgaagaccctggaggctcacaaggaccctcacaaggaagtggtgcgatctgcggaggaggccgctagcgtcctggccacctctatctctccagaacagtgtatcaaggtgctgtgtcctatcattcagactgccgactaccccatcaaccttgccgcaatcaagatgcaaaccaaggtaatcgaacgtgtatctaaggagaccctgaatctcctgctgcctgagatcatgccaggactgatccaagggtacgataatagtgagtctagcgtgcgcaaggcttgtgtgttctgcctggtagccgtgcacgccgtcatcggcgacgaactcaagccacatctgagccagttgacgggcagtaagatgaagctgctcaacttgtacatcaaaagagctcagaccggttcgggcggagcagaccctaccactgacgtcagtggacaaagctag

SEQ ID NO: 287036 - DNA, 7257 bp, Artificial Sequence
  derived and/or modified sequence
agaggtcctatcgctcccagcggtttccgcagccacctccaccacctccgcagcaaaacgctagccggactggagggccctcgccggcgtcgtgctgacgtcacgcgcgtgctgacgtcgcccgcggccgcggcctctgaagcgggctggggatcggggggcgccgagtttgactagtttgggggcggctgggcgcttggcgttcctcccgccgcccgctgcgccccgcaagccgcgcccctggcgggctaagtgagtcccgcccgctcccgcggggacccgcactggaggctgggcggctctcggcgaaagttggccgctcacagactggcaggcgggcgggcggccgcagccatggagccccgcagcatggagtacttctgcgcccaggtgcagcagaaggacgtcggcggccggctgcaggtcggccaggagctcctgctctaccttggcgcccccggcgccatctcggacctggaggaggacctgggccgcctaggcaagacagtcgacgcgctcaccggctgggtgggttcgagcaactaccgggtatcattaatgggattggaaattttaagtgcctttgtggacagattatcaacacgctttaaatcctatgtagcaatggttattgtagctttaatagacagaatgggagatgccaaagacaaggttcgagatgaagctcagactctgatattgaagttaatggatcaagtagcaccacctatgtacatttgggagcagttggcttctggttttaaacacaagaattttcgatctcgagaaggcgtgtgtctgtgtcttattgaaaccttaaacatttttggggctcagccactagtcatcagcaaattgataccacatttgtgtatcctgtttggagactccaacagtcaggtgagagatgctgcaatattggctatagtggagatttatagacatgtgggagaaaaagtgaggatggatctttataagagaggaattccccctgctagattagaaatgatatttgccaaatttgatgaagtgcaaagttcaggcggtatgattttgagtgtctgcaaagataaaagcttcgatgatgaagaatcagtggatggaaataggccatcatcagctgcatcagccttcaaggttcctgcacctaaaacatccggaaatcctgccaacagtgcaaggaagcctggttcagcaggtggccctaaggttggaggtgcttctaaggaaggaggtgctggagcagttgatgaagatgattttataaaagcttttacagatgtcccttctattcagatttattctagtcgagaactcgaagaaacattaaataaaatcagggaaattttgtcagatgataaacatgactgggatcagcgtgccaatgcactgaagaaaattcgatcactgcttgttgctggagctgcacagtatgattgcttttttcaacatttacgattgttggatggagcacttaaactttcagctaaggatcttagatcccaggtggttagagaagcttgtattactgtagcccacctttcaacagttttgggaaacaagtttgatcatggcgctgaagccattgtacctacactttttaatctcgtccccaatagtgcaaaagtcatggcaacttctggatgtgcagcaatcagatttatcattcggcatactcatgtacccagacttatacctttaataacaagcaattgcacatcaaaatcagttcccgtgaggagacgttcatttgaatttttagatttattgttgcaagagtggcagactcattcattggaaagacatgcagccgtcttggttgaaactattaaaaagggaattcatgatgctgacgctgaggccagagtggaggcaagaaagacatacatgggtcttagaaaccactttcctggtgaagctgaaacattatataattcccttgagccatcttatcagaagagtcttcaaacttacttaaagagttctggcagtgtagcatctcttccacaatcagacaggtcctcatccagctcacaggaaagtctcaatcgccctttttcttccaaatggtctacagcaaatccatcaactgtggctggaagagtatcagcaggcagcagcaaagccagttcccttccaggaagcctgcagcgttcacgaagtgacattgatgtgaatgctgctgcaggtgccaaggcacatcatgctgctggacagtctgtgcgaagcgggcgcttaggtgcaggtgccctgaatgcaggttcctatgcgtcactagaggatacttctgacaagctggatggaacagcatctgaagatggccgggtgagagcaaaactttcagcaccacttgctggcatgggaaatgccaaggcagattctagaggaagaagtcgaacaaaaatggtgtctcaatcacagcctggtagccggtctgggtctccaggaagagttctgaccacaacagccctgtccactgtgagctctggtgttcaaagagtcctggtcaattcagcctcagcacaaaaaagaagcaagataccacggagccagggctgtagcagagaggctagtccatctaggctttcagtggcccgaagcagtcgtattcctcgaccaagtgtgagtcaaggatgcagccgggaagctagtcgggagagcagcagagacacaagtcctgttcgctcttttcagcccctcggtccaggttatgggatcagccaatcaagtcgactgtcgtcttctgttagtgccatgcgagtcctgaacacaggttctgatgtggaggaggcggtggcagatgccttgaaaaaaccagctcgaagaagatatgaatcatatggaatgcattcagatgatgacgccaacagcgatgcatctagtgcttgttcagaacgctcctatagttctcgaaatggtagtattcctacatatatgaggcagacggaagatgtggcagaagtcctcaatagatgtgctagttccaattggtcagaaaggaaagaaggcctcctaggtctgcagaacttattaaaaaatcagagaacactaagtcgagttgaactgaaaagattatgtgaaattttcacaagaatgtttgctgaccctcatggcaagagggtattcagcatgtttttggagactctagtggatttcatacaagtccacaaagatgatcttcaagattggttgtttgtactgctgacacaactactaaaaaaaatgggtgctgatttgcttggatctgttcaggcaaaagttcagaaagcccttgatgttacaagagagtcttttccaaatgatcttcagttcaatattctaatgagatttacagttgatcagacccagacaccaagcttaaaggtgaaggttgctatccttaaatacatagaaactctggccaaacagatggatccaggagattttataaattccagtgaaactcgcctagcagtgtctcgggtcatcacttggacaacagaacccaaaagttctgatgttcggaaggcagcacagtcagtgctgatttcattatttgaactcaataccccagagtttacaatgttattaggagctttaccaaaaacttttcaggatggtgctaccaagcttcttcataatcaccttcgaaacactggcaatggaacccagagttccatggggagtcctttgacaagaccaacaccacgatcaccagctaactggtccagtcctcttacttctcctaccaatacatcacagaatactttatctccaagtgcatttgattatgacacagaaaatatgaactctgaagatatttatagctctcttagaggtgtcactgaagcaatccagaatttcagcttccgtagccaagaagatatgaatgagccattgaaaagggattctaaaaaagatgatggcgattcaatgtgtggtggtcctgggatgtctgacccaagagcaggaggtgatgctactgactcaagtcaaacagctcttgataataaagcttcattgctccattcaatgcctactcactcctctccacgctctcgagactataatccatataactattcagatagcatcagtcccttcaacaagtctgccctcaaggaagccatgtttgatgatgatgctgaccagtttcctgacgatctttccctagatcattctgacctagttgcagagttgttgaaggagctgtctaaccataatgagcgtgtagaagaaagaaaaattgccctctatgaacttatgaaactgacacaggaagaatcttttagtgtttgggatgaacacttcaaaacaatattgcttttattgcttgaaacgcttggagataaagagcctacaatcagggctttggcattaaaggttttaagagaaatcctaaggcatcaaccagcaagatttaaaaactatgcagaattgactgtcatgaaaacattggaagcacataaagatcctcataaggaggtggtgagatctgctgaggaagcggcatcagtgttggccacttcaattagtccagagcagtgcatcaaagtgctttgtcctatcattcaaactgcagactacccaattaatctggctgcaatcaaaatgcaaacaaaagtgatagagagagtgtccaaggaaaccctaaacctgcttttgccagagattatgccaggtctaatacagggttatgataattcagagagcagtgttcggaaagcttgtgtcttctgcctggtggctgttcatgcggtaattggtgatgaactaaaaccacatctcagtcaacttactggcagtaaaatgaagctactgaatctttacatcaaacgtgcacaaacaggttctggaggagctgatcccactactgatgtttctggacaaagttagtgaagctcatcacagcgaaccaggtctctcaaaagaaaggacagatagaccaccctcatcaatgaaaggaagttctcaaacacatcctttggaacttactattgtttcccagttttagttttttgtttcgtttcgttttgtattttctgtaacagaggactatcctcagtctgcatgtaacttttatgatagttattccaaattcaagaagaagcagtattaacatcaattgatcgacacaaagtaatttttaatttaattcatcatttcacatgtttgtactttgtcttcccattaacctttgccagtgttatgattgtataaatttttttaaatgctggttaaacaggaatgcttaaagctttaaaagtttaacagtctaaaacatttttgcttttattcaactgcagaataatatttttattgctactttgagttttgtttcgtatcatgtcctatgctagaaatatttaaatgatgtgaaacaaagcaggactaatttgaactacagctggactccgtttgtgtgatggtgatacatgtcattagttgcaacttctttggggtgatctatagtttgaaaactaaaacctcaaagacagatgttacagaatcagccagttctgtaaaactgatattgtctattggttattgatcttgccatctttatttaaaaccatgtcccttctatgatcccttaagaaagctgcaccaaatcatctgcctgttttttcttgatacttactgaaatagaaggttttattgcagggtttattttggtttgtttatatctttgttgtgaatgatgcttttttgtatttattaatatcaaattcacttatgaataaacttgataatggaaacggacaaaaaaaatcaagtgcgtgtgtgtccttgaccgtcttctgtttctcacgtaataaacaaattatcgagacatgggagtgaccagcaccttttctttaaatggtggaacctggtttccttttaccatgaaattgtcttacttgaaaatattgatcctgatgagagagaagatggtgccaaggctgtctttgtataatgggctcaaattctctacctcttcagggctaatacttttaactgagctgctgcctatagtgtcttttggaaaactacttaaagggtgattttctgttactttttagcaaatttttttaatcacctcttgctacacccattcttttcatgtgcagccgactcaaaaattaccagttttggtgaaaggctaaattagataatttggaaccaggatactaatgatttctcatctttacttttttttaatcctaatataaagtgaatttgattgaaaaggcaaatagctattagggaagcagtttgccattgttgcagagttatctgtactttgtttaactgaaaaaaatgtagaaatatatgtaaagaatttaagacaagagtactgaatggatgatttgtcataggctttcccctttctttctgttctagcagcaggaaaagtttctctatatcctctccctctacctgtaacaattttgttttctactgttaattacattgtgtatttatagttctatgcttactgttgtgcatatactggcaataaaactgtacataacattacttgaaaaagttaataatgtatatcagtttttctgtctcactgtgtaacaagtcactcagttttattttaactttagacggtcttgtatcagtggtggtctcttgaattttgtaagttcatctgaggagaaaagatttttcaggtgtagctaccacaatcaaaggtatatagctacatacgcatgtatatattacagcttatctgtaagaagaaaatgcattttaaacacaactcttctcagtagcattttatgacctttggatatgtttgtaatcatttcgaatcaaaatattgatttaattttgacctctggtttaagatactgctttaactactgttgacaaccaagtagagtgacttaagctgaacagtaactaactggaaaattagataagcacctggcatctaatggcaggcaggcactcaagaaatgaattaactacataatggaaaagtatggtttaatgtgtccaaatgaaagctagtagatgtaaacatggaaaaattgtgtttacaattttataatctcagttgataagactataagaaagctgattatttaaatcactatatacaatacacccttaatttgttcattccagaaacatactgagatgtcagctacttaaaaatggtcacaaaaagctactgtttatatttttcctcctgctattctctcccaaattaattattaataagtgttgttcatttactgcactgctgagaactaattaaaattatatattccagattgt

SEQ ID NO: 287037 - DNA, 7254 bp, Artificial Sequence
  derived and/or modified sequence
agaggtcctatcgctcccagcggtttccgcagccacctccaccacctccgcagcaaaacgctagccggactggagggccctcgccggcgtcgtgctgacgtcacgcgcgtgctgacgtcgcccgcggccgcggcctctgaagcgggctggggatcggggggcgccgagtttgactagtttgggggcggctgggcgcttggcgttcctcccgccgcccgctgcgccccgcaagccgcgcccctggcgggctaagtgagtcccgcccgctcccgcggggacccgcactggaggctgggcggctctcggcgaaagttggccgctcacagactggcaggcgggcgggcggccgcagccatggagccccgcagcatggagtacttctgcgcccaggtgcagcagaaggacgtcggcggccggctgcaggtcggccaggagctcctgctctaccttggcgcccccggcgccatctcggacctggaggaggacctgggccgcctaggcaagacagtcgacgcgctcaccggctgggtgggttcgagcaactaccgggtatcattaatgggattggaaattttaagtgcctttgtggacagattatcaacacgctttaaatcctatgtagcaatggttattgtagctttaatagacagaatgggagatgccaaagacaaggttcgagatgaagctcagactctgatattgaagttaatggatcaagtagcaccacctatgtacatttgggagcagttggcttctggttttaaacacaagaattttcgatctcgagaaggcgtgtgtctgtgtcttattgaaaccttaaacatttttggggctcagccactagtcatcagcaaattgataccacatttgtgtatcctgtttggagactccaacagtcaggtgagagatgctgcaatattggctatagtggagatttatagacatgtgggagaaaaagtgaggatggatctttataagagaggaattccccctgctagattagaaatgatatttgccaaatttgatgaagtgcaaagttcaggcggtatgattttgagtgtctgcaaagataaaagcttcgatgatgaagaatcagtggatggaaataggccatcatcagctgcatcagccttcaaggttcctgcacctaaaacatccggaaatcctgccaacagtgcaaggaagcctggttcagcaggtggccctaaggttggaggtgcttctaaggaaggaggtgctggagcagttgatgaagatgattttataaaagcttttacagatgtcccttctattcagatttattctagtcgagaactcgaagaaacattaaataaaatcagggaaattttgtcagatgataaacatgactgggatcagcgtgccaatgcactgaagaaaattcgatcactgcttgttgctggagctgcacagtatgattgcttttttcaacatttacgattgttggatggagcacttaaactttcagctaaggatcttagatcccaggtggttagagaagcttgtattactgtagcccacctttcaacagttttgggaaacaagtttgatcatggcgctgaagccattgtacctacactttttaatctcgtccccaatagtgcaaaagtcatggcaacttctggatgtgcagcaatcagatttatcattcggcatactcatgtacccagacttatacctttaataacaagcaattgcacatcaaaatcagttcccgtgaggagacgttcatttgaatttttagatttattgttgcaagagtggcagactcattcattggaaagacatgcagccgtcttggttgaaactattaaaaagggaattcatgatgctgacgctgaggccagagtggaggcaagaaagacatacatgggtcttagaaaccactttcctggtgaagctgaaacattatataattcccttgagccatcttatcagaagagtcttcaaacttacttaaagagttctggcagtgtagcatctcttccacaatcagacaggtcctcatccagctcacaggaaagtctcaatcgccctttttcttccaaatggtctacagcaaatccatcaactgtggctggaagagtatcagcaggcagcagcaaagccagttcccttccaggaagcctgcagcgttcacgaagtgacattgatgtgaatgctgctgcaggtgccaaggcacatcatgctgctggacagtctgtgcgaagcgggcgcttaggtgcaggtgccctgaatgcaggttcctatgcgtcactagaggatacttctgacaagctggatggaacagcatctgaagatggccgggtgagagcaaaactttcagcaccacttgctggcatgggaaatgccaaggcagattctagaggaagaagtcgaacaaaaatggtgtctcaatcacagcctggtagccggtctgggtctccaggaagagttctgaccacaacagccctgtccactgtgagctctggtgttcaaagagtcctggtcaattcagcctcagcacaaaaaagaagcaagataccacggagccagggctgtagcagagaggctagtccatctaggctttcagtggcccgaagcagtcgtattcctcgaccaagtgtgagtcaaggatgcagccgggaagctagtcgggagagcagcagagacacaagtcctgttcgctcttttcagcccctcggtccaggttatgggatcagccaatcaagtcgactgtcgtcttctgttagtgccatgcgagtcctgaacacaggttctgatgtggaggaggcggtggcagatgccttgaaaaaaccagctcgaagaagatatgaatcatatggaatgcattcagatgatgacgccaacagcgatgcatctagtgcttgttcagaacgctcctatagttctcgaaatggtagtattcctacatatatgaggcagacggaagatgtggcagaagtcctcaatagatgtgctagttccaattggtcagaaaggaaagaaggcctcctaggtctgcagaacttattaaaaaatcagagaacactaagtcgagttgaactgaaaagattatgtgaaattttcacaagaatgtttgctgaccctcatggcaaggtattcagcatgtttttggagactctagtggatttcatacaagtccacaaagatgatcttcaagattggttgtttgtactgctgacacaactactaaaaaaaatgggtgctgatttgcttggatctgttcaggcaaaagttcagaaagcccttgatgttacaagagagtcttttccaaatgatcttcagttcaatattctaatgagatttacagttgatcagacccagacaccaagcttaaaggtgaaggttgctatccttaaatacatagaaactctggccaaacagatggatccaggagattttataaattccagtgaaactcgcctagcagtgtctcgggtcatcacttggacaacagaacccaaaagttctgatgttcggaaggcagcacagtcagtgctgatttcattatttgaactcaataccccagagtttacaatgttattaggagctttaccaaaaacttttcaggatggtgctaccaagcttcttcataatcaccttcgaaacactggcaatggaacccagagttccatggggagtcctttgacaagaccaacaccacgatcaccagctaactggtccagtcctcttacttctcctaccaatacatcacagaatactttatctccaagtgcatttgattatgacacagaaaatatgaactctgaagatatttatagctctcttagaggtgtcactgaagcaatccagaatttcagcttccgtagccaagaagatatgaatgagccattgaaaagggattctaaaaaagatgatggcgattcaatgtgtggtggtcctgggatgtctgacccaagagcaggaggtgatgctactgactcaagtcaaacagctcttgataataaagcttcattgctccattcaatgcctactcactcctctccacgctctcgagactataatccatataactattcagatagcatcagtcccttcaacaagtctgccctcaaggaagccatgtttgatgatgatgctgaccagtttcctgacgatctttccctagatcattctgacctagttgcagagttgttgaaggagctgtctaaccataatgagcgtgtagaagaaagaaaaattgccctctatgaacttatgaaactgacacaggaagaatcttttagtgtttgggatgaacacttcaaaacaatattgcttttattgcttgaaacgcttggagataaagagcctacaatcagggctttggcattaaaggttttaagagaaatcctaaggcatcaaccagcaagatttaaaaactatgcagaattgactgtcatgaaaacattggaagcacataaagatcctcataaggaggtggtgagatctgctgaggaagcggcatcagtgttggccacttcaattagtccagagcagtgcatcaaagtgctttgtcctatcattcaaactgcagactacccaattaatctggctgcaatcaaaatgcaaacaaaagtgatagagagagtgtccaaggaaaccctaaacctgcttttgccagagattatgccaggtctaatacagggttatgataattcagagagcagtgttcggaaagcttgtgtcttctgcctggtggctgttcatgcggtaattggtgatgaactaaaaccacatctcagtcaacttactggcagtaaaatgaagctactgaatctttacatcaaacgtgcacaaacaggttctggaggagctgatcccactactgatgtttctggacaaagttagtgaagctcatcacagcgaaccaggtctctcaaaagaaaggacagatagaccaccctcatcaatgaaaggaagttctcaaacacatcctttggaacttactattgtttcccagttttagttttttgtttcgtttcgttttgtattttctgtaacagaggactatcctcagtctgcatgtaacttttatgatagttattccaaattcaagaagaagcagtattaacatcaattgatcgacacaaagtaatttttaatttaattcatcatttcacatgtttgtactttgtcttcccattaacctttgccagtgttatgattgtataaatttttttaaatgctggttaaacaggaatgcttaaagctttaaaagtttaacagtctaaaacatttttgcttttattcaactgcagaataatatttttattgctactttgagttttgtttcgtatcatgtcctatgctagaaatatttaaatgatgtgaaacaaagcaggactaatttgaactacagctggactccgtttgtgtgatggtgatacatgtcattagttgcaacttctttggggtgatctatagtttgaaaactaaaacctcaaagacagatgttacagaatcagccagttctgtaaaactgatattgtctattggttattgatcttgccatctttatttaaaaccatgtcccttctatgatcccttaagaaagctgcaccaaatcatctgcctgttttttcttgatacttactgaaatagaaggttttattgcagggtttattttggtttgtttatatctttgttgtgaatgatgcttttttgtatttattaatatcaaattcacttatgaataaacttgataatggaaacggacaaaaaaaatcaagtgcgtgtgtgtccttgaccgtcttctgtttctcacgtaataaacaaattatcgagacatgggagtgaccagcaccttttctttaaatggtggaacctggtttccttttaccatgaaattgtcttacttgaaaatattgatcctgatgagagagaagatggtgccaaggctgtctttgtataatgggctcaaattctctacctcttcagggctaatacttttaactgagctgctgcctatagtgtcttttggaaaactacttaaagggtgattttctgttactttttagcaaatttttttaatcacctcttgctacacccattcttttcatgtgcagccgactcaaaaattaccagttttggtgaaaggctaaattagataatttggaaccaggatactaatgatttctcatctttacttttttttaatcctaatataaagtgaatttgattgaaaaggcaaatagctattagggaagcagtttgccattgttgcagagttatctgtactttgtttaactgaaaaaaatgtagaaatatatgtaaagaatttaagacaagagtactgaatggatgatttgtcataggctttcccctttctttctgttctagcagcaggaaaagtttctctatatcctctccctctacctgtaacaattttgttttctactgttaattacattgtgtatttatagttctatgcttactgttgtgcatatactggcaataaaactgtacataacattacttgaaaaagttaataatgtatatcagtttttctgtctcactgtgtaacaagtcactcagttttattttaactttagacggtcttgtatcagtggtggtctcttgaattttgtaagttcatctgaggagaaaagatttttcaggtgtagctaccacaatcaaaggtatatagctacatacgcatgtatatattacagcttatctgtaagaagaaaatgcattttaaacacaactcttctcagtagcattttatgacctttggatatgtttgtaatcatttcgaatcaaaatattgatttaattttgacctctggtttaagatactgctttaactactgttgacaaccaagtagagtgacttaagctgaacagtaactaactggaaaattagataagcacctggcatctaatggcaggcaggcactcaagaaatgaattaactacataatggaaaagtatggtttaatgtgtccaaatgaaagctagtagatgtaaacatggaaaaattgtgtttacaattttataatctcagttgataagactataagaaagctgattatttaaatcactatatacaatacacccttaatttgttcattccagaaacatactgagatgtcagctacttaaaaatggtcacaaaaagctactgtttatatttttcctcctgctattctctcccaaattaattattaataagtgttgttcatttactgcactgctgagaactaattaaaattatatattccagattgt

SEQ ID NO: 287038 - DNA, 2988 bp, Artificial Sequence
  derived and/or modified sequence
atgggcctgagaaaccacttccccggcgaggccgagaccctgtacaacagcctggagcccagctaccagaagagcctgcagacctacctgaagagcagcggcagcgtggccagcctgccccagagcgacagaagcagcagcagcagccaggagagcctgaacagacccttcagcagcaagtggagcaccgccaaccccagcaccgtggccggcagagtgagcgccggcagcagcaaggccagcagcctgcccggcagcctgcagagaagcagaagcgacatcgacgtgaacgccgccgccggcgccaaggcccaccacgccgccggccagagcgtgagaagcggcagactgggcgccggcgccctgaacgccggcagctacgccagcctggaggacaccagcgacaagctggacggcaccgccagcgaggacggcagagtgagagccaagctgagcgcccccctggccggcatgggcaacgccaaggccgacagcagaggcagaagcagaaccaagatggtgagccagagccagcccggcagcagaagcggcagccccggcagagtgctgaccaccaccgccctgagcaccgtgagcagcggcgtgcagagagtgctggtgaacagcgccagcgcccagaagagaagcaagatccccagaagccagggctgcagcagagaggccagccccagcagactgagcgtggccagaagcagcagaatccccagacccagcgtgagccagggctgcagcagagaggccagcagagagagcagcagagacaccagccccgtgagaagcttccagcccctgggccccggctacggcatcagccagagcagcagactgagcagcagcgtgagcgccatgagagtgctgaacaccggcagcgacgtggaggaggccgtggccgacgccctgaagaagcccgccagaagaagatacgagagctacggcatgcacagcgacgacgacgccaacagcgacgccagcagcgcctgcagcgagagaagctacagcagcagaaacggcagcatccccacctacatgagacagaccgaggacgtggccgaggtgctgaacagatgcgccagcagcaactggagcgagagaaaggagggcctgctgggcctgcagaacctgctgaagaaccagagaaccctgagcagagtggagctgaagagactgtgcgagatcttcaccagaatgttcgccgacccccacggcaagagagtgttcagcatgttcctggagaccctggtggacttcatccaggtgcacaaggacgacctgcaggactggctgttcgtgctgctgacccagctgctgaagaagatgggcgccgacctgctgggcagcgtgcaggccaaggtgcagaaggccctggacgtgaccagagagagcttccccaacgacctgcagttcaacatcctgatgagattcaccgtggaccagacccagacccccagcctgaaggtgaaggtggccatcctgaagtacatcgagaccctggccaagcagatggaccccggcgacttcatcaacagcagcgagaccagactggccgtgagcagagtgatcacctggaccaccgagcccaagagcagcgacgtgagaaaggccgcccagagcgtgctgatcagcctgttcgagctgaacacccccgagttcaccatgctgctgggcgccctgcccaagaccttccaggacggcgccaccaagctgctgcacaaccacctgagaaacaccggcaacggcacccagagcagcatgggcagccccctgaccagacccacccccagaagccccgccaactggagcagccccctgaccagccccaccaacaccagccagaacaccctgagccccagcgccttcgactacgacaccgagaacatgaacagcgaggacatctacagcagcctgagaggcgtgaccgaggccatccagaacttcagcttcagaagccaggaggacatgaacgagcccctgaagagagacagcaagaaggacgacggcgacagcatgtgcggcggccccggcatgagcgaccccagagccggcggcgacgccaccgacagcagccagaccgccctggacaacaaggccagcctgctgcacagcatgcccacccacagcagccccagaagcagagactacaacccctacaactacagcgacagcatcagccccttcaacaagagcgccctgaaggaggccatgttcgacgacgacgccgaccagttccccgacgacctgagcctggaccacagcgacctggtggccgagctgctgaaggagctgagcaaccacaacgagagagtggaggagagaaagatcgccctgtacgagctgatgaagctgacccaggaggagagcttcagcgtgtgggacgagcacttcaagaccatcctgctgctgctgctggagaccctgggcgacaaggagcccaccatcagagccctggccctgaaggtgctgagagagatcctgagacaccagcccgccagattcaagaactacgccgagctgaccgtgatgaagaccctggaggcccacaaggacccccacaaggaggtggtgagaagcgccgaggaggccgccagcgtgctggccaccagcatcagccccgagcagtgcatcaaggtgctgtgccccatcatccagaccgccgactaccccatcaacctggccgccatcaagatgcagaccaaggtgatcgagagagtgagcaaggagaccctgaacctgctgctgcccgagatcatgcccggcctgatccagggctacgacaacagcgagagcagcgtgagaaaggcctgcgtgttctgcctggtggccgtgcacgccgtgatcggcgacgagctgaagccccacctgagccagctgaccggcagcaagatgaagctgctgaacctgtacatcaagagagcccagaccggcagcggcggcgccgaccccaccaccgacgtgagcggccagagctag

SEQ ID NO: 287039 - DNA, 4518 bp, Artificial Sequence
  derived and/or modified sequence
atggagcccagaagcatggagtacttctgcgcccaggtgcagcagaaggacgtgggcggcagactgcaggtgggccaggagctgctgctgtacctgggcgcccccggcgccatcagcgacctggaggaggacctgggcagactgggcaagaccgtggacgccctgaccggctgggtgggcagcagcaactacagagtgagcctgatgggcctggagatcctgagcgccttcgtggacagactgagcaccagattcaagagctacgtggccatggtgatcgtggccctgatcgacagaatgggcgacgccaaggacaaggtgagagacgaggcccagaccctgatcctgaagctgatggaccaggtggccccccccatgtacatctgggagcagctggccagcggcttcaagcacaagaacttcagaagcagagagggcgtgtgcctgtgcctgatcgagaccctgaacatcttcggcgcccagcccctggtgatcagcaagctgatcccccacctgtgcatcctgttcggcgacagcaacagccaggtgagagacgccgccatcctggccatcgtggagatctacagacacgtgggcgagaaggtgagaatggacctgtacaagagaggcatcccccccgccagactggagatgatcttcgccaagttcgacgaggtgcagagcagcggcggcatgatcctgagcgtgtgcaaggacaagagcttcgacgacgaggagagcgtggacggcaacagacccagcagcgccgccagcgccttcaaggtgcccgcccccaagaccagcggcaaccccgccaacagcgccagaaagcccggcagcgccggcggccccaaggtgggcggcgccagcaaggagggcggcgccggcgccgtggacgaggacgacttcatcaaggccttcaccgacgtgcccagcatccagatctacagcagcagagagctggaggagaccctgaacaagatcagagagatcctgagcgacgacaagcacgactgggaccagagagccaacgccctgaagaagatcagaagcctgctggtggccggcgccgcccagtacgactgcttcttccagcacctgagactgctggacggcgccctgaagctgagcgccaaggacctgagaagccaggtggtgagagaggcctgcatcaccgtggcccacctgagcaccgtgctgggcaacaagttcgaccacggcgccgaggccatcgtgcccaccctgttcaacctggtgcccaacagcgccaaggtgatggccaccagcggctgcgccgccatcagattcatcatcagacacacccacgtgcccagactgatccccctgatcaccagcaactgcaccagcaagagcgtgcccgtgagaagaagaagcttcgagttcctggacctgctgctgcaggagtggcagacccacagcctggagagacacgccgccgtgctggtggagaccatcaagaagggcatccacgacgccgacgccgaggccagagtggaggccagaaagacctacatgggcctgagaaaccacttccccggcgaggccgagaccctgtacaacagcctggagcccagctaccagaagagcctgcagacctacctgaagagcagcggcagcgtggccagcctgccccagagcgacagaagcagcagcagcagccaggagagcctgaacagacccttcagcagcaagtggagcaccgccaaccccagcaccgtggccggcagagtgagcgccggcagcagcaaggccagcagcctgcccggcagcctgcagagaagcagaagcgacatcgacgtgaacgccgccgccggcgccaaggcccaccacgccgccggccagagcgtgagaagcggcagactgggcgccggcgccctgaacgccggcagctacgccagcctggaggacaccagcgacaagctggacggcaccgccagcgaggacggcagagtgagagccaagctgagcgcccccctggccggcatgggcaacgccaaggccgacagcagaggcagaagcagaaccaagatggtgagccagagccagcccggcagcagaagcggcagccccggcagagtgctgaccaccaccgccctgagcaccgtgagcagcggcgtgcagagagtgctggtgaacagcgccagcgcccagaagagaagcaagatccccagaagccagggctgcagcagagaggccagccccagcagactgagcgtggccagaagcagcagaatccccagacccagcgtgagccagggctgcagcagagaggccagcagagagagcagcagagacaccagccccgtgagaagcttccagcccctgggccccggctacggcatcagccagagcagcagactgagcagcagcgtgagcgccatgagagtgctgaacaccggcagcgacgtggaggaggccgtggccgacgccctgaagaagcccgccagaagaagatacgagagctacggcatgcacagcgacgacgacgccaacagcgacgccagcagcgcctgcagcgagagaagctacagcagcagaaacggcagcatccccacctacatgagacagaccgaggacgtggccgaggtgctgaacagatgcgccagcagcaactggagcgagagaaaggagggcctgctgggcctgcagaacctgctgaagaaccagagaaccctgagcagagtggagctgaagagactgtgcgagatcttcaccagaatgttcgccgacccccacggcaaggtgttcagcatgttcctggagaccctggtggacttcatccaggtgcacaaggacgacctgcaggactggctgttcgtgctgctgacccagctgctgaagaagatgggcgccgacctgctgggcagcgtgcaggccaaggtgcagaaggccctggacgtgaccagagagagcttccccaacgacctgcagttcaacatcctgatgagattcaccgtggaccagacccagacccccagcctgaaggtgaaggtggccatcctgaagtacatcgagaccctggccaagcagatggaccccggcgacttcatcaacagcagcgagaccagactggccgtgagcagagtgatcacctggaccaccgagcccaagagcagcgacgtgagaaaggccgcccagagcgtgctgatcagcctgttcgagctgaacacccccgagttcaccatgctgctgggcgccctgcccaagaccttccaggacggcgccaccaagctgctgcacaaccacctgagaaacaccggcaacggcacccagagcagcatgggcagccccctgaccagacccacccccagaagccccgccaactggagcagccccctgaccagccccaccaacaccagccagaacaccctgagccccagcgccttcgactacgacaccgagaacatgaacagcgaggacatctacagcagcctgagaggcgtgaccgaggccatccagaacttcagcttcagaagccaggaggacatgaacgagcccctgaagagagacagcaagaaggacgacggcgacagcatgtgcggcggccccggcatgagcgaccccagagccggcggcgacgccaccgacagcagccagaccgccctggacaacaaggccagcctgctgcacagcatgcccacccacagcagccccagaagcagagactacaacccctacaactacagcgacagcatcagccccttcaacaagagcgccctgaaggaggccatgttcgacgacgacgccgaccagttccccgacgacctgagcctggaccacagcgacctggtggccgagctgctgaaggagctgagcaaccacaacgagagagtggaggagagaaagatcgccctgtacgagctgatgaagctgacccaggaggagagcttcagcgtgtgggacgagcacttcaagaccatcctgctgctgctgctggagaccctgggcgacaaggagcccaccatcagagccctggccctgaaggtgctgagagagatcctgagacaccagcccgccagattcaagaactacgccgagctgaccgtgatgaagaccctggaggcccacaaggacccccacaaggaggtggtgagaagcgccgaggaggccgccagcgtgctggccaccagcatcagccccgagcagtgcatcaaggtgctgtgccccatcatccagaccgccgactaccccatcaacctggccgccatcaagatgcagaccaaggtgatcgagagagtgagcaaggagaccctgaacctgctgctgcccgagatcatgcccggcctgatccagggctacgacaacagcgagagcagcgtgagaaaggcctgcgtgttctgcctggtggccgtgcacgccgtgatcggcgacgagctgaagccccacctgagccagctgaccggcagcaagatgaagctgctgaacctgtacatcaagagagcccagaccggcagcggcggcgccgaccccaccaccgacgtgagcggccagagctag

SEQ ID NO: 287040 - DNA, 1296 bp, Artificial Sequence
  derived and/or modified sequence
atgaggagattgatttgtaagcgtatctgcgactataagtccttcgacgatgaggaaagtgtagatgggaaccggccatcaagtgcagccagcgccttcaaggttcccgccccaaagacatctgggaacccagccaattcagctagaaaaccggggagcgccggcgggcctaaggtgggaggggccagtaaagagggtggcgctggcgctgtggatgaggacgactttattaaagccttcaccgatgtcccctccatccagatctactcttctagagagctggaggagaccctgaacaagatccgcgaaatcctgtcagacgataagcacgactgggaccagcgggctaatgcactaaagaagattcggtccttgctggtcgccggagccgctcagtatgactgttttttccagcacctgagactgctggacggcgctctgaagctgagtgccaaggacctcagatcccaggttgttcgagaggcatgtataactgtggctcatttaagcaccgtactgggcaataagttcgatcacggagccgaagccattgttccaaccctctttaatctcgtgcccaactctgccaaagtgatggccacctctgggtgtgccgctattagattcatcatccgtcatactcacgtgcctagactgataccgcttatcacttcgaactgcacaagtaagtccgtgccagttagaaggcgatcattcgagtttctagatctgctgttacaggagtggcagacgcacagccttgagaggcatgccgctgttctcgtagaaacgattaagaagggtatccatgacgcggacgccgaggctagggtggaagcaaggaagacttatatgggcctgagaaatcatttcccgggcgaggccgaaacactttataattctctggaaccatcttaccagaagtctttgcaaacatacctgaagtcttccgggtcagtggcatcgctgccccaatcagaccggtcttcaagtagcagccaagagagtcttaacagacctttctcatcaaaatggtctacagccaaccctagtaccgtcgctggccgtgtgagcgcggggagttctaaagcctcttcgctgccgggatcccttcagcgctcaaggtccgatattgatgtaaacgccgccgccggggccaaagcccaccacgccgccggacagtccgttcgatccggtagactgggggcaggcgcgctgaacgcagggagctatgcgagtttagagtgcgaagcgttttggcgcagcggcagaactgccaagctctacagtgtttag

SEQ ID NO: 287041 - DNA, 1296 bp, Artificial Sequence
  derived and/or modified sequence
atgaggaggctcatctgcaagaggatctgtgactacaagagctttgatgatgaggagagcgtggatggcaaccggcccagcagcgctgccagcgccttcaaggtgcctgcccccaagaccagcggcaacccagccaacagcgccaggaagccaggcagcgctgggggccccaaggtgggcggggccagcaaggagggcggggccggggctgtggatgaagatgacttcatcaaggccttcacagatgtgcccagcatccagatctacagcagccgggagctggaggagaccctgaacaagatccgggagatcctgagtgatgacaagcatgactgggaccagagggccaatgccctgaagaagatccgcagcctgctggtggccggggccgcccagtatgactgcttcttccagcacctgcggctgctggatggagccctgaagctgagcgccaaggacctgcggagccaggtggtgcgggaggcctgcatcaccgtggcccacctgagcacagtgctgggcaacaagtttgaccatggagctgaggccatcgtgcccaccctcttcaacctggtgcccaacagcgccaaggtgatggccaccagcggctgtgccgccatccgcttcatcatccgccacacccacgtgcccaggctcatccccctcatcaccagcaactgcaccagcaagtctgtgcctgtgagaagaagaagctttgagttcctggacctgctgctgcaggagtggcagacccacagcctggagagacatgctgctgtgctggtggagaccatcaagaagggcatccatgatgctgatgctgaggcccgggtggaggccaggaagacctacatgggcctgaggaaccacttccctggagaggccgagaccctgtacaacagcctggagcccagctaccagaagagcctgcagacctacctgaagagcagcggctctgtggccagcctgccccagagcgacaggagcagcagcagcagccaggagagcctgaaccggcccttcagcagcaagtggagcacagccaaccccagcacagtggccggccgggtgtctgctggcagcagcaaggccagcagcctgcccggcagcctgcagaggagcagaagtgacattgatgtgaatgctgctgctggggccaaggcccaccacgccgccggccagagcgtgcgcagcggccgcctgggcgctggggccctgaatgccggcagctatgccagcctggagtgtgaggccttctggaggagcggccgcacagccaagctgtacagcgtgtag

SEQ ID NO: 287042 - DNA, 1296 bp, Artificial Sequence
  derived and/or modified sequence
atgcggcggctgatctgcaagcggatctgcgactacaagagcttcgacgatgaagagtctgtcgacggtaaccggccttcctcagccgcttccgcctttaaagttcccgcccccaagacctccggtaaccctgcaaacagcgcaaggaaacccggcagtgcaggaggccccaaggtgggcggcgcttcaaaggaggggggcgctggggcggttgacgaagacgattttattaaggctttcacggatgtcccttcaatccagatatactcgtcacgagaattggaggaaactctgaataaaatacgggaaattttatctgatgacaaacacgattgggaccagcgagccaatgctcttaagaagatccggtcccttctagttgctggggccgcgcagtatgattgtttctttcagcatctgagactgctggacggcgctcttaagctctcagctaaggatctgagaagccaggtggtacgagaggcatgcattacagttgcacacctgtccacagtgctgggaaataagttcgaccacggggccgaggctatcgtgccaactctatttaatcttgtgccaaacagtgctaaagttatggctacaagcggctgtgctgcgattcggtttattatccgacatacccatgtgccaaggttaattcccctgatcacgtcaaattgcacatctaagtcggtgcccgttagacgtagatctttcgaattcctggatctactgttacaagaatggcaaacacattccctggaacgccatgccgccgtgcttgttgagacaataaaaaaagggattcacgacgccgacgccgaggctcgcgtagaagctcgtaagacatacatgggtttgcgaaaccacttccctggagaggccgaaacactttataacagcctggaacctagttatcagaagtccctgcagacgtaccttaagtcttccggctcagttgcctctctacctcaatccgacaggtcctcgtcgagcagtcaggagtcactaaacaggccattttcttccaagtggtcaaccgccaatccttccacagtcgcaggaagagtctcagctggaagcagcaaagcatcttcactccccggcagcttgcaacgctccagaagcgacatagacgttaacgccgcagccggagctaaggcccaccatgctgccggccagagcgtgcggagcggccgcctgggcgctggcgctctcaacgcgggaagctacgccagtctcgaatgtgaagccttctggaggtccggcagaaccgctaagttgtacagtgtctag

SEQ ID NO: 287043 - DNA, 1296 bp, Artificial Sequence
  derived and/or modified sequence
atgagaaggctgatttgcaagagaatctgtgactacaaatcatttgatgacgaagagagcgttgacgggaacaggccctcgtcagccgcttctgcatttaaggtccccgctccaaagacatctggcaatcctgctaactccgctagaaagccgggatccgctgggggaccaaaggtcggcggagcctccaaggagggaggcgctggggctgtcgatgaggacgactttatcaaagctttcactgacgtgccttccatacagatctactcaagccgcgaactggaagagacactcaataaaataagggagatcttatcagatgacaagcacgattgggatcaacgggcaaatgcacttaaaaaaataaggagcctgctggtggccggagctgcccagtacgactgtttttttcaacacctgcgactcttagatggcgcactgaagttgtctgctaaggatctgagaagccaagtggtccgcgaggcttgcatcaccgtggcccacttgagcacagtgctgggtaacaaatttgaccacggggcagaggccattgtcccaaccctgtttaatctggtaccaaattctgccaaggtcatggcgacttctggttgcgcagctattcgattcatcatccggcatactcacgtaccccgactcattcccctgattacttccaactgtacttccaaaagtgttccagtacgaaggagatctttcgagttcctcgaccttctgttacaagagtggcaaactcatagtctcgagagacacgccgcagtgctggtggaaaccatcaagaaggggattcacgacgcagatgctgaagcgcgagtcgaggctaggaagacgtacatgggcctgcgtaaccattttcccggtgaggccgaaacactttataacagcctggagccaagttatcagaaatccctgcagacctacctgaagtcatcagggagcgtggcctctctaccacaatctgatcgcagctcttcgagcagccaggaatcattgaaccgcccattcagctctaagtggtcaacagctaacccatccacagtcgccggacgcgtgagtgccggatcctcaaaagcatcaagtctcccaggtagtctgcaaaggtctagatctgatattgacgtcaacgccgcagcaggcgcaaaagcacatcatgcagccggtcaaagcgtgaggtcaggtcggctcggggctggcgctctgaatgccggaagctacgccagtttagaatgtgaggcattttggcgctcaggacgaactgccaagctctatagcgtgtag

SEQ ID NO: 287044 - DNA, 1597 bp, Artificial Sequence
  derived and/or modified sequence
acagcacctagggcagggaagagaaagaaaaatgccggcacaaacctcagtggtggttctgtggttgtttctgtctttttttgatagaatctttgattagtatcgaatttactgtatttggccatgtgaactattgggagcctcctagggtgagggaaattaagagctttcagaggaatgaggcgactgatttgcaaacggatctgtgattataaaagcttcgatgatgaagaatcagtggatggaaataggccatcatcagctgcatcagccttcaaggttcctgcacctaaaacatccggaaatcctgccaacagtgcaaggaagcctggttcagcaggtggccctaaggttggaggtgcttctaaggaaggaggtgctggagcagttgatgaagatgattttataaaagcttttacagatgtcccttctattcagatttattctagtcgagaactcgaagaaacattaaataaaatcagggaaattttgtcagatgataaacatgactgggatcagcgtgccaatgcactgaagaaaattcgatcactgcttgttgctggagctgcacagtatgattgcttttttcaacatttacgattgttggatggagcacttaaactttcagctaaggatcttagatcccaggtggttagagaagcttgtattactgtagcccacctttcaacagttttgggaaacaagtttgatcatggcgctgaagccattgtacctacactttttaatctcgtccccaatagtgcaaaagtcatggcaacttctggatgtgcagcaatcagatttatcattcggcatactcatgtacccagacttatacctttaataacaagcaattgcacatcaaaatcagttcccgtgaggagacgttcatttgaatttttagatttattgttgcaagagtggcagactcattcattggaaagacatgcagccgtcttggttgaaactattaaaaagggaattcatgatgctgacgctgaggccagagtggaggcaagaaagacatacatgggtcttagaaaccactttcctggtgaagctgaaacattatataattcccttgagccatcttatcagaagagtcttcaaacttacttaaagagttctggcagtgtagcatctcttccacaatcagacaggtcctcatccagctcacaggaaagtctcaatcgccctttttcttccaaatggtctacagcaaatccatcaactgtggctggaagagtatcagcaggcagcagcaaagccagttcccttccaggaagcctgcagcgttcacgaagtgacattgatgtgaatgctgctgcaggtgccaaggcacatcatgctgctggacagtctgtgcgaagcgggcgcttaggtgcaggtgccctgaatgcaggttcctatgcgtcactagaatgtgaagccttttggagatctgggagaactgcaaagctctactctgtctaaccaaaccctaaacatatattccaaaactctattcagtttgatttcttcatgtttttatgtctatcaaattaaaaagttgacgttggtttgcgtatctcttcttcatgcttccatttttttcttt

SEQ ID NO: 287045 - DNA, 1296 bp, Artificial Sequence
  derived and/or modified sequence
atgagaagactgatctgcaagagaatctgcgactacaagagcttcgacgacgaggagagcgtggacggcaacagacccagcagcgccgccagcgccttcaaggtgcccgcccccaagaccagcggcaaccccgccaacagcgccagaaagcccggcagcgccggcggccccaaggtgggcggcgccagcaaggagggcggcgccggcgccgtggacgaggacgacttcatcaaggccttcaccgacgtgcccagcatccagatctacagcagcagagagctggaggagaccctgaacaagatcagagagatcctgagcgacgacaagcacgactgggaccagagagccaacgccctgaagaagatcagaagcctgctggtggccggcgccgcccagtacgactgcttcttccagcacctgagactgctggacggcgccctgaagctgagcgccaaggacctgagaagccaggtggtgagagaggcctgcatcaccgtggcccacctgagcaccgtgctgggcaacaagttcgaccacggcgccgaggccatcgtgcccaccctgttcaacctggtgcccaacagcgccaaggtgatggccaccagcggctgcgccgccatcagattcatcatcagacacacccacgtgcccagactgatccccctgatcaccagcaactgcaccagcaagagcgtgcccgtgagaagaagaagcttcgagttcctggacctgctgctgcaggagtggcagacccacagcctggagagacacgccgccgtgctggtggagaccatcaagaagggcatccacgacgccgacgccgaggccagagtggaggccagaaagacctacatgggcctgagaaaccacttccccggcgaggccgagaccctgtacaacagcctggagcccagctaccagaagagcctgcagacctacctgaagagcagcggcagcgtggccagcctgccccagagcgacagaagcagcagcagcagccaggagagcctgaacagacccttcagcagcaagtggagcaccgccaaccccagcaccgtggccggcagagtgagcgccggcagcagcaaggccagcagcctgcccggcagcctgcagagaagcagaagcgacatcgacgtgaacgccgccgccggcgccaaggcccaccacgccgccggccagagcgtgagaagcggcagactgggcgccggcgccctgaacgccggcagctacgccagcctggagtgcgaggccttctggagaagcggcagaaccgccaagctgtacagcgtgtag

SEQ ID NO: 287046 - protein, 686 aa, Artificial Sequence
  derived and/or modified sequence
MAISQHQFYLDRKQSKAKIPSARSLDEIAMDLTETGTQRASKLVTLETKSQFIMASNGSLISSGSQDSEVSEEQKREKILELKKKEKLLQEKLLKKVEELKKICLREAELTGKMPKEYPLNIGEKPPQVRRRVGTAFKLDDNLLPSEEDPALQELESNFLIQQKLVEAAKKLANEPDLCKTVKKKRKQDYTDAMKKLQEIENAINEYRIRCGKKPSQKATVLPEDIIPSESSSLSDTTTYDDPSDAFTFPGQRSSSVPHSPRILPPKSLGIERIHFRKSSINEQFVDTRQSREMLSTHSSPYKTLERRPQGGRSMPTTPVLTRNAYSSSHLEPESSSQHCRQRSGSLESQSHLLSEMDSDKPFFSLSKSQRSSSTEILDDGSSYTSQSSTEYYCVTPVTGPYYTTQTLDTRTRGRRRSKKQNVSTSNSGSMPNLAQKDSLRNGVYSKSQEPPSSSYYIAGYTPYAECDFYYSGGYVYENDTEGQYSVNPSYRSSAHYGYERQRDYSRSFHEDEVDRVPHNPYATLRLPRKAAAKSEHITKNIHKALVAEHLRGWYQRASGQKDQGHSPQTSFDSDRGSQRCLGFAGLQVPCSPSSRASSYSSVSSTNASGNWRTQLTIGLSDYETPAHSSYTSCYGNVYNPLPSPSRQYTEISQLDGTDGNQLEDNLESSEQRLFWHEDSKPGTLV

SEQ ID NO: 287047 - DNA, 3761 bp, Artificial Sequence
  derived and/or modified sequence
attgtaactcttcctgtagaacctgttcatgtccagggtgagtaaactagggtagaaatgtcttcctaaaacagcctccggtgaaattcgtccttggattcaaagcaacttacttcctaggaagtatcaggcaaatcccaactgccctccattttagaaaggtctcttttctgggaaaatctgccactgagaactttgccctcctctccctgatgggaggaaggagtagaattagggaggtgtcactcaggagagttgctgatgtcagtagtgtgtcagccgtgggaggctcagtttgtgaaattgagttacacctaagtgtcttatgaaactcagttcagaactcaccggagctgccgtctgggaggggggagggcggaagaaccctgaggtttttcctcacatttctgtcccatttttggaacctctggatttaaagaaatgaaaacctcaagtttgtggagattttaagaaatggttattccaatggaaacagctggagaacttatatttccgtgagaaaaaatttgctgttgaagttcatgatccacgaaggatttcagtttcaagaagaacctttgggcaaagtggcttgtttgtgcaaacatggtatgctaactcttctctcatcaagtccatttgggtaatggcaattagtcagcatcagttttacttggaccggaagcaaagcaaagcaaaaattccttcagccaggagtttagatgagattgcaatggatttgacagagacaggaacacaaagggcctccaagctggtgacactggagacgaaaagtcagttcatcatggcaagtaatggcagtttaatctcctcaggttctcaagactcagaagttagtgaagagcaaaagagagaaaaaatccttgaactaaagaagaaggagaaactattacaagaaaaacttctgaaaaaagttgaggagcttaagaagatctgtctgcgggaggctgagctcacaggcaaaatgccaaaggagtatcccctgaacataggcgagaagcctcctcaggtcagaagacgtgtgggtactgcgttcaaattagatgacaacttgctgccgagtgaagaagatcctgctttgcaagaactggagagtaattttctaatacaacaaaagctggtggaagctgcaaagaaacttgccaatgagccagacctttgtaaaactgtgaagaaaaagcgaaagcaagattacacagatgcgatgaaaaagcttcaggagattgaaaatgcaataaacgaataccgaattaggtgtggaaagaaacccagccagaaagcaacagtgttaccagaagacataatcccctcagagagtagctctttgtctgacaccaccacctatgatgatcccagtgatgccttcacttttcctgggcagcgatcaagttcagtacctcattctccaagaattcttccccccaagtctcttggtattgagcgaatccatttcagaaagtcgtccatcaatgaacagtttgtggataccaggcagtccagagaaatgctgtccacacacagcagcccttacaaaactctggagaggcggccccagggaggacgaagcatgcccaccacgccagttcttacccgaaacgcctacagcagcagccacttggaacccgaatcttcatctcagcactgccgccagcggagtggaagcctggagtcccagtcccacctgctctccgagatggacagcgataagccatttttctccctctccaaatcccaaagaagcagcagcacagaaatcctcgatgacgggtcttcttatacaagccaatcaagcacagagtattactgtgtgacaccagttaccggcccctattacaccacccagaccctggacactcgcaccaggggtcggaggaggtcaaagaaacagaatgtttctacttcaaattcaggaagcatgcccaacctagcacaaaaggatagtttgaggaatggtgtttactcaaagagtcaggagccaccgtcttccagttactacattgccgggtacacaccctatgcagagtgtgacttttattacagtggtggttatgtctatgagaatgacaccgagggacagtatagtgtcaacccttcctaccggtcctcagcccactatggatatgagcgccagagggactacagcagatcctttcacgaagatgaggtcgaccgggtaccccataacccatatgcaactctccggctgccaaggaaggctgctgcaaaatcggagcacatcaccaaaaacatccacaaggccttagttgccgagcacttgcgtggctggtaccagcgggcctctgggcagaaggatcagggacacagcccgcagaccagctttgactcagacaggggatcacagagatgcctggggtttgcggggctgcaagtaccttgttctccaagcagtcgtgcatcctcgtactcttcagtgtcttctacaaatgcttctgggaactggaggacccagttaaccatagggctgtcggattacgagactccagcacattcttcttacaccagctgctatggcaatgtctataatcctttaccctctccaagcagacaatacacagaaatcagtcaactggatggtacagatggaaaccagctggaagacaacctggagagtagtgagcagagactcttttggcatgaagattcaaagcctggaacattagtctgaactgcagttggacctcctgaccaagcactgcgttctcacactagtgtgccttgcaaattgtatttgtcttccgagaggatgttcgttttagaaacctaaagacatcaaaggttgaagagaagacttagttgccctggaagtgaatcagtgaatcacacaccaagccccacaaagcccctaaaggaggatttggcctttcaaactctaggcactaacgtaactgtagggtctgcccacatgttgaagtattgccaagagaggactcagtgtgaagccttcatcaatagcaagcactttttaagggagtaaaagttgttaaaggcaaacctcaaaaacatgaaagggcattcaggatgtcccatggcaataagaacaggggaaatctcagagcacaattcagcaggatgagagaaggggaaccagaagctccggagtcattgctcacttcagagtttgaattcgtgagctgacaaagagtaacatgctctttctacacagacatggacaatttagacagtattggaaaattacttgaagctggattttcatgaagttctgaatgagtgtaaatgttttttaggatactataaagagtgatgtttttcataagcaccataaaatgggttctggaaaaactgattaccttagcatcctgtaatataacttatggtagcagattggggaaaatgaagcagcccactgaataattgacaaagtctgcttggagaacattctaaggtacaatatcatggagctcctttttcctttctccactaattgcgtgatgagctattgttctggctgttaattctccaactcggctgtcatttgaagtggcagacttaatatggaaagtttttataattatgagtttgaaaaagcattttaagatgatacagaaagtatccaaaacaacagaaaaaaaaagccacgtcattttagatgaattgcgtgccttaaaatggtgaacgttagaaaattaaacaagtctggattccacaagtagttccaagtcaccaagtgacaaaaacaaggttaacattaaaaaagaaaa

SEQ ID NO: 287048 - protein, 960 aa, Artificial Sequence
  derived and/or modified sequence
MPTEKKISSASDCINSMVEGSELKKVRSNSRIYHRYFLLDADMQSLRWEPSKKDSEKAKIDIKSIKEVRTGKNTDIFRSNGISDQISEDCAFSVIYGENYESLDLVANSADVANIWVTGLRYLISYGKHTLDMLESSQDNMRTSWVSQMFSEIDVDNLGHITLCNAVQCIRNLNPGLKTSKIELKFKELHKSKDKAGTEVTKEEFIEVFHELCTRPEIYFLLVQFSSNKEFLDTKDLMMFLEAEQGVAHINEEISLEIIHKYEPSKEGQEKGWLSIDGFTNYLMSPDCYIFDPEHKKVCQDMKQPLSHYFINSSHNTYLIEDQFRGPSDITGYIRALKMGCRSVELDVWDGPDNEPVIYTGHTMTSQIVFRSVIDIINKYAFFASEYPLILCLENHCSIKQQKVMVQHMKKLLGDKLYTTSPNVEESYLPSPDVLKGKILIKAKKLSSNCSGVEGDVTDEDEGAEMSQRMGKENMEQPNNVPVKRFQLCKELSELVSICKSVQFKEFQVSFQVQKYWEVCSFNEVLASKYANENPGDFVNYNKRFLARVFPSPMRIDSSNMNPQDFWKCGCQIVAMNFQTPGLMMDLNIGWFRQNGNCGYVLRPAIMREEVSFFSANTKDSVPGVSPQLLHIKIISGQNFPKPKGSGAKGDVVDPYVYVEIHGIPADCAEQRTKTVHQNGDAPIFDESFEFQINLPELAMVRFVVLDDDYIGDEFIGQYTIPFECLQTGYRHVPLQSLTGEVLAHASLFVHVAITNRRGGGKPHKRGLSVRKGKKSREYASLRTLWIKTVDEVFKNAQPPIRDATDLRENMQNAVVSFKELCGLSSVANLMQCMLAVSPRFLGPDNTPLVVLNLSEQYPTMELQGIVPEVLKKIVTTYDMMIQSLKALIENADAVYEKIVHCQKAAMEFHEHLHSIGTKEGLKERKLQKAVESFTWNITILKIRKTGRRSIFVPQTPIMV

SEQ ID NO: 287049 - DNA, 3940 bp, Artificial Sequence
  derived and/or modified sequence
gaaacgtacctaagtattattggacagccggagtattttacagtggttgctgctcaggaaatttgagtgaaggactgcaaaagaggagcaaagcagacccgagagagaaggcagcagtgctcccctgtgacgtgctccatcaccgggcagggaagacaccgctgccacctctccacagccttgttcaagagcactggaaattgatggtacaaaacagaagagggaacggaaaaagacagtctcattcagcagcatgccaacagagaagaagatcagcagtgcaagtgattgtattaattcaatggttgagggttcagaactcaaaaaggttcgctccaactctagaatttatcataggtactttttactggatgctgacatgcagagcctaaggtgggagccatctaagaaggattctgagaaagccaagattgacattaaatccatcaaggaagtgagaacaggaaaaaacacagacatattccgcagcaatggcatttctgaccagatatctgaagattgtgcgttttccgtcatatatggagagaattatgagtcactggatttggttgccaactccgcagatgttgcaaacatctgggttacaggactgcggtacctaatttcttatggaaaacatacacttgatatgttagaaagtagccaagataacatgaggacttcttgggtttcacaaatgtttagtgaaattgatgtagataaccttggacatataactctgtgtaatgctgtgcaatgtatcagaaacctcaatcctggtttaaaaacgagcaaaattgagcttaagttcaaagaattgcataaatcaaaggacaaagctggtaccgaggtcacaaaggaagaatttattgaggtttttcatgagctttgtactagacctgaaatttatttccttttagttcagttttcaagcaataaagaattccttgataccaaggaccttatgatgtttcttgaggcagaacagggtgtggcacatataaatgaggaaataagccttgaaattattcacaaatatgaaccatccaaagagggtcaggaaaagggctggctctccatagacgggttcactaattaccttatgtcacctgactgttatatattcgatccagaacataagaaggtctgtcaggatatgaagcaacctctgtctcattactttataaactcatctcataatacatacttaatagaggatcagttccgaggtccctccgacatcacaggatatattcgagctcttaaaatgggttgccggagtgttgaattagatgtatgggatgggccggacaatgaacctgtaatttacacaggccacaccatgacctctcagatagttttccgcagtgtcattgatattattaacaagtatgcattctttgcttcagagtatcctcttatcttgtgtttagaaaaccactgttccattaaacaacagaaggtaatggttcagcacatgaagaaacttttaggagacaagctctatacaacatcacccaatgttgaggaatcttatctaccatccccagatgtcctgaaagggaaaatactaattaaagcaaagaagctgtcctcaaattgctctggggtagaaggagatgttactgacgaagatgaaggagcagaaatgtctcagaggatgggaaaagagaacatggagcaacccaataatgtgcctgtgaagcgatttcagctttgtaaagaactgtctgaactggtcagcatctgcaaatcagttcagttcaaagaatttcaggtgtcgtttcaggttcagaagtactgggaagtctgttcctttaatgaagtgcttgccagcaagtacgccaatgaaaatccaggggactttgtaaattacaacaaacgttttcttgctagggtttttcccagtccaatgagaattgattccagtaacatgaatcctcaagatttttggaaatgtggttgccaaattgtagccatgaactttcagacaccaggactgatgatggacctgaatattggctggtttaggcagaacggaaactgtggctatgtcctccggccagccatcatgagggaggaggtctccttcttcagcgccaatacaaaagactctgtcccaggggtctcacctcaacttcttcacattaaaatcatcagtgggcagaactttcccaagcccaaaggatcaggtgccaaaggtgatgtggtagatccttatgtctatgttgaaatccatggaatccctgctgattgtgcagaacaaaggacaaaaacagtgcaccagaatggagacgctcccatttttgatgaaagctttgaatttcaaatcaacctgcctgaactggccatggtgcgctttgtagtgctggatgatgactacattggggatgaattcatcggccagtacacaattccctttgaatgtttacagacgggctaccgccatgtccccctgcagtccttaactggagaggtccttgcacatgcttctttatttgtccacgtggctattactaaccgaagaggaggaggaaagcctcataaaaggggcctttctgtgagaaaagggaagaaatccagggaatatgcatctttgagaacactgtggattaaaaccgtggatgaggtattcaagaatgcccagccccctatacgggatgccacagatctgagagaaaacatgcagaatgcggtggtgtcattcaaggagctgtgtggcctctcctctgtggccaatctcatgcagtgcatgttggcggtgtctccccgctttctggggcccgataacacacccctagtggtcctaaatctcagcgagcagtaccccacaatggagctgcagggaattgtgccggaggttctgaagaagatcgtaacaacttatgacatgatgattcagtccctcaaggcgttgattgaaaatgcagatgctgtatatgaaaagatcgtacattgtcagaaggcagccatggaattccatgaacacttgcacagcataggcaccaaggaaggtttgaaggaaagaaaactacaaaaagcagtggagagctttacctggaatattaccatcttaaagggacaagcagatcttttgaaatatgctaagaatgagacattggagaacctgaaacaaatccattttgctgctgtttcatgtggactgaataaaccaggcaccgaaaatgctgatgtccagaagccacgccggagcttggaagtcatacccgaaaaagcaaacgatgaaactggagaatgaggaaacttacaataaaccattatggagtttataactctaggaccaattgtagtcagatgggacatttgctttgcactcactaatgagaataatattcgggattttaaagcacaactggaatagctaattacagtctattaaaactgtgaatgtatgtagcaatcctgcgtgtgaaggcaaataaactctttaacaggcaattatattgctggccaaaatatgctatatttgtatacaaagacattctaactcagttccagtatgaagaaagattattcactctagctccactgagaaacattttcctaagtgaaaacaatttcttaagatggaaatggattggattgtcaaattattatttattggagaaaaaaacctgatctacacatttttacttatatggggttgccagagtctctgggttctagatgattttggtggcatgcttgctgagccataattactaaagagaatgtaagtggacgggttccctgaatccccggggtccttggagagccatcgaggagaatgtgcaattggactgaagctccctggctgaagatacatgccgagtcagcacatgggtagagatgatgtaaaagcagccaatctggaaacaatacattgtaaatagtttttcattgtatgaagtagtgttcacattaaaaagatgttttatga

SEQ ID NO: 287050 - protein, 287 aa, Artificial Sequence
  derived and/or modified sequence
MDLLDGLKLETELLDGKTKLILSPYEHKSKISVKMGNKAKIAKCPLRTKTGHILKSTQDTCIGSEKLLQKKPVGSETSQAKGEKNGMTFSSTKDLCKQCIDKDCLHIQKEISPATPNMQKTRNTVNTSLVGKQKPHKKHITAENMKSSLVCLTQDQLQQILMTVNQGNRSLSLTENGKEAKSQYSLYLNSISNQPKDENIMGLFKKTEMVSSVPAENKSVLNEHQETSKQCEQKIAIENEWKPADIFSTLGERECDRSSLEAKKAQWRKELVLQTVQAWYQHLLGFW

SEQ ID NO: 287051 - DNA, 381 bp, Artificial Sequence
  derived and/or modified sequence
atgtccctggccgatcgcggaaaccctggaaatataacaagtcgactcatggagaaggaaaaggcgcgcgattgcctgatccctatgggaattacatcagagaatgtcgctgagcgctttgggataagcagggagaagcaggacacttttgcactggcttcccagcagaaagccgcacgagcgcagagcaaggggtgttttcaggccgagatcgtacctgtcacaactactgtgcacgatgataaaggcaccaaacgctccattaccgtcacgcaggacgagggaattcgcccctccacaaccatggagggacttgccaagctcaagccagcctttaagaaggatggcagcacaactgcaggcgaaactggcccaggatag

SEQ ID NO: 287052 - DNA, 381 bp, Artificial Sequence
  derived and/or modified sequence
atgagcctggccgaccggggcaaccctggcaacatcaccagccggctgatggagaaggagaaggcccgggactgcctgatccccatgggcatcaccagtgaaaatgtggccgagcgcttcggcatcagccgggagaagcaggacacctttgccctggccagccagcagaaggccgcccgggcccagagcaagggctgcttccaggccgagatcgtgcctgtgaccaccaccgtgcatgatgacaagggcaccaagaggagcatcaccgtgacccaggatgagggcatccggcccagcaccaccatggagggcctggccaagctgaagccagccttcaagaaggatggcagcaccacagctggggagactggacctggatag

SEQ ID NO: 287053 - DNA, 381 bp, Artificial Sequence
  derived and/or modified sequence
atgagcctggccgaccggggcaaccccggcaacatcaccagccggctgatggaaaaggagaaagctagagactgcctaatacctatgggaattactagcgagaacgtagctgagaggttcggcatctctagggagaaacaggatacatttgccctggcctcgcagcagaaggctgccagggcacagtcaaaagggtgtttccaagccgaaatcgtgccggtgactacaaccgtgcatgatgacaagggtacgaagcgttctatcaccgtgactcaagacgaggggattaggcccagtactaccatggaaggactggctaaactgaagccagcatttaagaaagacggctcaaccactgctggtgaaaccgggcctggttag

SEQ ID NO: 287054 - DNA, 381 bp, Artificial Sequence
  derived and/or modified sequence
atgagcctcgcagacagaggcaaccccggtaatatcacctcccgacttatggaaaaggagaaggctagggactgcctcatcccaatgggcatcacatcagagaatgttgccgaaaggttcggaatttctagagagaagcaggataccttcgcactggccagccagcagaaagccgcacgggctcagtccaaaggctgcttccaagccgagatcgtcccagtaacgacgactgttcacgacgacaagggcacaaaacggtcaatcacagtaactcaggatgaaggaatccgacctagtaccacaatggaggggctagctaagttaaagcccgcatttaagaaagatggcagcacaaccgcgggtgagactgggccaggttag

SEQ ID NO: 287055 - DNA, 381 bp, Artificial Sequence
  derived and/or modified sequence
atgagcctggccgacagaggcaaccccggcaacatcaccagcagactgatggagaaggagaaggccagagactgcctgatccccatgggcatcaccagcgagaacgtggccgagagattcggcatcagcagagagaagcaggacaccttcgccctggccagccagcagaaggccgccagagcccagagcaagggctgcttccaggccgagatcgtgcccgtgaccaccaccgtgcacgacgacaagggcaccaagagaagcatcaccgtgacccaggacgagggcatcagacccagcaccaccatggagggcctggccaagctgaagcccgccttcaagaaggacggcagcaccaccgccggcgagaccggccccggctag

SEQ ID NO: 287056 - DNA, 1643 bp, Artificial Sequence
  derived and/or modified sequence
cgcggtcctcggagacacgcggcggtgtcctgtgttggccatggccgactacctgattagtgggggcacgtcctacgtgccagacgacggactcacagcacagcagctcttcaactgcggagacggcctcacctacaatgactttctcattctccctgggtacatcgacttcactgcagaccaggtggacctgacttctgctctgaccaagaaaatcactcttaagaccccactggtttcctctcccatggacacagtcacagaggctgggatggccatagcaatggcgcttacaggcggtattggcttcatccaccacaactgtacacctgaattccaggccaatgaagttcggaaagtgaagaaatatgaacagggattcatcacagaccctgtggtcctcagccccaaggatcgcgtgcgggatgtttttgaggccaaggcccggcatggtttctgcggtatcccaatcacagacacaggccggatggggagccgcttggtgggcatcatctcctccagggacattgattttctcaaagaggaggaacatgactgtttcttggaagagataatgacaaagagggaagacttggtggtagcccctgcaggcatcacactgaaggaggcaaatgaaattctgcagcgcagcaagaagggaaagttgcccattgtaaatgaagatgatgagcttgtggccatcattgcccggacagacctgaagaagaatcgggactacccactagcctccaaagatgccaagaaacagctgctgtgtggggcagccattggcactcatgaggatgacaagtataggctggacttgctcgcccaggctggtgtggatgtagtggttttggactcttcccagggaaattccatcttccagatcaatatgatcaagtacatcaaagacaaataccctaatctccaagtcattggaggcaatgtggtcactgctgcccaggccaagaacctcattgatgcaggtgtggatgccctgcgggtgggcatgggaagtggctccatctgcattacgcaggaagtgctggcctgtgggcggccccaagcaacagcagtgtacaaggtgtcagagtatgcacggcgctttggtgttccggtcattgctgatggaggaatccaaaatgtgggtcatattgcgaaagccttggcccttggggcctccacagtcatgatgggctctctcctggctgccaccactgaggcccctggtgaatacttcttttccgatgggatccggctaaagaaatatcgcggtatgggttctctcgatgccatggacaagcacctcagcagccagaacagatatttcagtgaagctgacaaaatcaaagtggcccagggagtgtctggtgctgtgcaggacaaagggtcaatccacaaatttgtcccttacctgattgctggcatccaacactcatgccaggacattggtgccaagagcttgacccaagtccgagccatgatgtactctggggagcttaagtttgagaagagaacgtcctcagcccaggtggaaggtggcgtccatagcctccattcgtatgagaagcggcttttctgaaaagggatccagcacacctcctcggtttttttttcaataaaagtttagaaagaaaaaa

SEQ ID NO: 287057 - DNA, 1111 bp, Artificial Sequence
  derived and/or modified sequence
cgcggtcctcggagacacgcggcggtgtcctgtgttggccatggccgactacctgattagtgggggcacgtcctacgtgccagacgacggactcacagcacagcagctcttcaactgcggagacggcctcacctacaatgactttctcattctccctgggtacatcgacttcactgcagaccaggtggacctgacttctgctctgaccaagaaaatcactcttaagaccccactggtttcctctcccatggacacagtcacagaggctgggatggccatagcaatggcgcttacaggcggtattggcttcatccaccacaactgtacacctgaattccaggccaatgaagttcggaaagtgaagaaatatgaacagggattcatcacagaccctgtggtcctcagccccaaggatcgcgtgcgggatgtttttgaggccaaggcccggcatggtttctgcggtatcccaatcacagacacaggccggatggggagccgcttggtgggcatcatctcctccagggacattgattttctcaaagaggaggaacatgactgtttcttggaagagataatgacaaagagggaagacttggtggtagcccctgcaggcatcacactgaaggaggcaaatgaaattctgcagcgcagcaagaagggaaagttgcccattgtaaatgaagatgatgagcttgtggccatcattgcccggacagacctgaagaagaatcgggactacccactagcctccaaagatgccaagaaacagctgctgtgtggggcagccattggcactcatgaggatgacaagtataggctggacttgctcgcccaggctggtgtggatgtagtggttttggactcttcccagggaaattccatcttccagatcaatatgatcaagtacatcaaagacaaataccctaatctccaagtcattggaggcaatgtggtcactgctgcccaggccaagaacctcattgatgcaggtgtggatgccctgcgggtgggcatgggaagtggctccatctgcattacgcaggaagtgctggcctgtgggcggccccaagcaacagcagtatgcacacaaaaacagcaccctcatttccag

SEQ ID NO: 287058 - protein, 670 aa, Artificial Sequence [sequence omitted]

SEQ ID NO: 287059 - DNA, 315 bp, Artificial Sequence
  derived and/or modified sequence
atgggggcccaagatcggccccaatgccacttcgacatcgagatcaacagggaaccagtcggacgaatcatgtttcagttattctctgatatctgccccaagacatgtaagaacttcttatgcctgtgctctggcgaaaagggtttgggcaaaactaccggtaagaaactgtgttacaagggcagtacgttccacagagtcgtgaagaactttatgatccaaggcggtgatttctcagaggggaacgggaaaggcggagagtccatctatggcggatatttcaaggagaatgtggtgttctgtaagatgaaatag

SEQ ID NO: 287060 - DNA, 315 bp, Artificial Sequence
  derived and/or modified sequence
atgggcgcccaggaccggccccagtgccactttgatattgagatcaaccgggagcctgtgggccgcatcatgttccagctgttcagtgacatctgccccaagacctgcaagaacttcctgtgcctgtgcagcggggagaagggcctgggcaagaccaccgggaagaagctgtgctacaagggcagcaccttccaccgggtggtgaagaacttcatgatccagggcggggacttcagcgagggcaatggcaagggcggggagagcatctacggcggctacttcaaggaaaatgtggtgttctgcaagatgaagtag

SEQ ID NO: 287061 - DNA, 560 bp, Artificial Sequence
  derived and/or modified sequence
aggctggaggccagccaggtgaagagctcgcccgcatgcgtgcgcgctgcgtgggagccgcgaggcccggggcgggagggggcctcgtcttggcctcctgcgctgtcgcgacgggccggcgtgaggcaccgtggcgcggacttcgtctcagccccgccctcgcccctgccctcgcccccgccctcgcccctgccctgaccgcttttctccccctctctcccagctcttgccgccacctcggtcgcgatgggggcgcaggaccggccgcagtgccacttcgacatcgagatcaaccgggagccggttggtcgcattatgtttcagctcttctcagacatatgtccaaaaacatgcaaaaacttcctttgcttgtgctcaggagagaaaggccttgggaaaacaactgggaagaagttatgttataaaggttctacgttccatcgtgtggttaaaaactttatgattcagggtggggacttcagtgaaggtaatggaaaaggtggagaatcaatttatggtggatattttaaagagaatgtggtcttttgcaaaatgaaaag

SEQ ID NO: 287062 - DNA, 315 bp, Artificial Sequence
  derived and/or modified sequence
atgggcgcccaggaccggccccagtgccacttcgacatcgagatcaaccgggagccagtgggacggatcatgttccagctcttttccgacatttgcccaaaaacgtgcaagaattttctctgcctgtgctctggagagaagggactgggtaagacgaccggcaagaagttatgctataagggcagtacctttcatagagtcgtgaaaaacttcatgatacaggggggggatttttccgaagggaacggcaaagggggagaaagcatctatggtgggtatttcaaggagaacgtggtcttctgcaagatgaaatag

SEQ ID NO: 287063 - DNA, 315 bp, Artificial Sequence
  derived and/or modified sequence
atgggagcccaagatcgacctcagtgtcacttcgacatagaaattaacagggaacctgttggaagaatcatgtttcagctgttttcagatatttgtcccaaaacatgcaagaactttctgtgcctgtgttctggagagaagggcctaggcaagacgacaggaaagaagctgtgctataagggttctaccttccacagggttgtcaaaaattttatgatacagggtggagacttcagcgagggcaatgggaaaggtggcgagtcaatatatggcggttactttaaagagaacgtggtgttctgtaagatgaaatag

SEQ ID NO: 287064 - DNA, 315 bp, Artificial Sequence
  derived and/or modified sequence
atgggcgcccaggacagaccccagtgccacttcgacatcgagatcaacagagagcccgtgggcagaatcatgttccagctgttcagcgacatctgccccaagacctgcaagaacttcctgtgcctgtgcagcggcgagaagggcctgggcaagaccaccggcaagaagctgtgctacaagggcagcaccttccacagagtggtgaagaacttcatgatccagggcggcgacttcagcgagggcaacggcaagggcggcgagagcatctacggcggctacttcaaggagaacgtggtgttctgcaagatgaagtag

SEQ ID NO: 287065 - DNA, 1775 bp, Artificial Sequence
  derived and/or modified sequence
aggtgcagggggcggggctcggcctggccgcagccattttggtgcgagagaaacaataggacggaaacgccgaggaacccggctgaggcggcagcagagcatcctggccagaacaagccaaggagccaagacgagagggacacacggacaaacaacagacagaagacgtactggccgctggactccgctgcctcccccatctccccgccatctgcgcccggaggatgagcccagccttcagggccatggatgtggagccccgcgccaaaggcgtccttctggagccctttgtccaccaggtcggggggcactcatgcgtgctccgcttcaatgagacaaccctgtgcaagcccctggtcccaagggaacatcagttctacgagaccctccctgctgagatgcgcaaattcactccccagtacaaaggtgtggtatctgtgcgctttgaagaagatgaagacaggaacttgtgtctaatagcatatccattgaaaggggaccatggaattgtggacattgtagataattcagactgtgaaccaaaaagtaagctcctaaggtggacaacaaacaaaaaacatcatgtcttagaaacagaaaagacccctaaggactgggtgcgtcagcaccgtaaagaggagaaaatgaagagccataagttagaagaagaatttgagtggctaaagaaatctgaagtcttgtactacactgtagagaagaaggggaatataagttcccagcttaaacactataacccttggagcatgaaatgtcaccagcaacagttacagagaatgaaggagaatgcaaagcatcggaaccagtacaaatttatcttactggaaaacctgacttcccgctacgaggtgccttgtgtccttgacctcaagatgggcacacgacaacatggtgatgatgcttcagaggagaaggcagccaaccagatccgaaaatgtcagcagagcacatctgcagtcattggtgtgcgtgtgtgtggcatgcaggtgtaccaagcaggcagtgggcagctcatgttcatgaacaagtaccatggacggaagctatcggtgcagggcttcaaggaggcacttttccagttcttccacaatgggcggtacctgcgccgtgaactcctgggccctgtgctcaagaagctgactgagctcaaggcagtgttggagcgacaggagtcctaccgcttctactcaagctccctgctggtcatttatgatggcaaggagcggcccgaagtggtcctggactcagatgctgaggatttggaggacctgtcagaggaatcagctgatgagtctgctggtgcctatgcctacaaacccatcggcgccagctctgtagatgtgcgcatgatcgactttgcacacaccacctgcaggctgtatggcgaggacaccgtggtgcatgagggccaggatgctggctatatcttcgggctccagagcctgatagacattgtcacagagataagtgaggagagtggggagtgagcttgctagctgctccagtacttgagagcgactctgtgtcccaggcacagctgtgctgcgtcagggaggaagccagtatggccaggtggtggctcctgcagcctggagctgatgtgcagtggcctctgtgagccccagcctgagccagtcccagctgtgcttggagtctttatttattttaactatttcttcaacattccacatttgatgatgatacctctttcttccctgagtgtatatgttctaatacaaatctttttgtttattgta

SEQ ID NO: 287066 - DNA, 222 bp, Artificial Sequence
  derived and/or modified sequence
atggaatcgcagccattcctgaatatgaagtttgagaccgactactttgtaaaagtcgtcccctttcccagcatcaaaaacgagagcaattatcatccattttttttcagaaccagagcttgcgatcttttgcttcagcccgacaatctggcgtgtaaaccattctggaagccccggaaccttaatatcagtcagcacggttctgatatgcaagtgagctag

SEQ ID NO: 287067 - DNA, 222 bp, Artificial Sequence
  derived and/or modified sequence
atggagagccagcccttcctgaacatgaagtttgaaacagactactttgtgaaggtggtgcccttccccagcatcaagaatgaaagcaactaccaccccttcttcttccgcacccgggcctgtgacctgctgctgcagcctgacaacctggcctgcaagcccttctggaagcccaggaacctgaacatcagccagcacggcagtgacatgcaggtgtcctag

SEQ ID NO: 287068 - DNA, 222 bp, Artificial Sequence
  derived and/or modified sequence
atggagagccagcccttcctgaacatgaagttcgagaccgactacttcgtcaaagtggtccctttcccatccatcaaaaatgagagcaactaccatcctttcttcttccgcacacgcgcctgcgatctgctcttgcagccggataacttagcctgcaaaccattctggaagcccagaaatctgaatataagccagcatgggtcagacatgcaggtttcctag

SEQ ID NO: 287069 - DNA, 222 bp, Artificial Sequence
  derived and/or modified sequence
atggaatctcagcctttccttaatatgaaatttgagacagattattttgtgaaggtggtcccgttcccgagtattaaaaacgaatccaactatcacccattctttttccggacacgagcatgtgatttgctcttgcagcccgataatctggcatgtaagcctttctggaagcccaggaatctcaatatctctcagcatggtagcgacatgcaggttagctag

SEQ ID NO: 287070 - DNA, 222 bp, Artificial Sequence
  derived and/or modified sequence
atggagagccagcccttcctgaacatgaagttcgagaccgactacttcgtgaaggtggtgcccttccccagcatcaagaacgagagcaactaccaccccttcttcttcagaaccagagcctgcgacctgctgctgcagcccgacaacctggcctgcaagcccttctggaagcccagaaacctgaacatcagccagcacggcagcgacatgcaggtgagctag

SEQ ID NO: 287071 - DNA, 565 bp, Artificial Sequence
  derived and/or modified sequence
ggctagtccctctgagacgagcgagcaggcagccattcactaacatgcgttcattccacaatcacaaagagtgtgtaggccagccccggtcacagagtgcaccgtatcctgtcacttctggatgtgagggagaagtgagtcatctcattcccctccgtggatcagaggacttggactagatagaagcatgtggtgtctcctacgaggcctgggccggcctggagccctggcacggggagccctggggcagcagcaatccctgggtgcccgggccctggccagcgcaggctctgagagccgggacgagtacagctatgtggtggtgggcgcgggctcggcgggctgcgtgctggctgggaggctcacggaggaccccgccgagcgcgtgctgctgctggaggccgggcccaaggacgtgctcgcggggagcaagcggctctcgtggaagatccacatgcccgcggccctggtggccaacctgtgcgacgacaggtacaactggtgctaccacacagaggtgcagcggggcctggacggccgcgtgctgtactggccacgcggccgc

SEQ ID NO: 287072 - DNA, 631 bp, Artificial Sequence
  derived and/or modified sequence
tcggcacacaggctttgagacaaccagggtgcggagacaatcacaaagagtgtgtaggccagccccggtcacagagtgcaccgtatcctgtcacttctggatgtgagggagaagtgagtcatctcattcccctccgtggatcagaggacttggactagatagaagcatgtggtgtctcctacgaggcctgggccggcctggagccctggcacggggagccctggggcagcagcaatccctgggtgcccgggccctggccagcgcaggctctgagagccgggacgagtacagctatgtggtggtgggcgcgggctcggcgggctgcgtgctggctgggaggctcacggaggaccccgccgagcgcgtgctgctgctggaggccgggcccaaggacgtgctcgcggggagcaagcggctctcgtggaagatccacatgcccgcggccctggtggccaacctgtgcgacgacaggtacaactggtgctaccacacagaggtgcagcggggcctggacggccgcgtgctgtactggccacgcggccgcgtctggggtggctcctcatccctcaatgccatggtctacgtccgtgggcacgccgaggactacgagcgctggcagcgccagggcgcc

SEQ ID NO: 287073 - DNA, 381 bp, Artificial Sequence
  derived and/or modified sequence
atgtggtgcctgctgagaggcctgggcagacccggcgccctggccagaggcgccctgggccagcagcagagcctgggcgccagagccctggccagcgccggcagcgagagcagagacgagtacagctacgtggtggtgggcgccggcagcgccggctgcgtgctggccggcagactgaccgaggaccccgccgagagagtgctgctgctggaggccggccccaaggacgtgctggccggcagcaagagactgagctggaagatccacatgcccgccgccctggtggccaacctgtgcgacgacagatacaactggtgctaccacaccgaggtgcagagaggcctggacggcagagtgctgtactggcccagaggcagatag

SEQ ID NO: 287074 - DNA, 468 bp, Artificial Sequence
  derived and/or modified sequence
atgtggtgcctgctgagaggcctgggcagacccggcgccctggccagaggcgccctgggccagcagcagagcctgggcgccagagccctggccagcgccggcagcgagagcagagacgagtacagctacgtggtggtgggcgccggcagcgccggctgcgtgctggccggcagactgaccgaggaccccgccgagagagtgctgctgctggaggccggccccaaggacgtgctggccggcagcaagagactgagctggaagatccacatgcccgccgccctggtggccaacctgtgcgacgacagatacaactggtgctaccacaccgaggtgcagagaggcctggacggcagagtgctgtactggcccagaggcagagtgtggggcggcagcagcagcctgaacgccatggtgtacgtgagaggccacgccgaggactacgagagatggcagagacagggcgcctag

SEQ ID NO: 287075 - DNA, 381 bp, Artificial Sequence
  derived and/or modified sequence
atgtggtgtttactccgtggtctgggccgaccaggggcattagcacgcggggcacttggacagcaacagtctctcggagcacgagcactggcttctgcagggagtgagtctagggatgaatactcttatgtggtggtcggcgccggctctgctgggtgcgtactagcaggccggttgacagaagacccagccgagcgcgttctgttgctggaagccggccctaaggatgtactcgcgggctcaaaaaggcttagctggaagatccatatgccggcggcccttgtggctaatctgtgcgatgaccgctacaactggtgctaccatactgaggttcagagaggattagacggacgggttctttattggcctcggggaagatag

SEQ ID NO: 287076 - DNA, 468 bp, Artificial Sequence
  derived and/or modified sequence
atgtggtgcctgctgcgcggcctgggccgcccaggtgccctggcccggggagccctgggccagcagcagtcacttggtgctcgtgcgctcgccagcgctggcagtgaaagtcgagatgagtatagctacgtggtggtcggcgctgggagcgctggatgcgtcctggccggtagactcactgaggatcctgctgagagagtgctgcttcttgaagcaggtcccaaagatgttttggcggggtctaaacgcttgtcctggaagatacatatgcccgctgccctggtagcaaatctgtgtgacgaccggtataactggtgttaccacacggaagtgcagaggggacttgacgggcgggtcctgtactggcctagaggaagagtgtggggagggtccagcagcctcaatgccatggtttatgttcggggccacgccgaagattacgaacggtggcagagacagggagcttag

SEQ ID NO: 287077 - DNA, 381 bp, Artificial Sequence
  derived and/or modified sequence
atgtggtgcctgctgcggggcctgggccggcctggggccctggcccggggggccctgggccagcagcagagcctgggcgcccgggccctggccagcgctggcagcgagagcagagatgagtacagctatgtggtggtgggcgccggcagcgctggctgtgtgctggccggccgcctgacagaagatcctgctgagcgggtgctgctgctggaggccggccccaaggatgtgctggccggcagcaagaggctgtcctggaagatccacatgcctgctgccctggtggccaacctgtgtgatgaccgctacaactggtgctaccacacagaggtgcagaggggcctggatggccgggtgctgtactggccccggggccgctag

SEQ ID NO: 287078 - DNA, 468 bp, Artificial Sequence
  derived and/or modified sequence
atgtggtgcctgctgcggggcctgggccggcctggggccctggcccggggggccctgggccagcagcagagcctgggcgcccgggccctggccagcgctggcagcgagagcagagatgagtacagctatgtggtggtgggcgccggcagcgctggctgtgtgctggccggccgcctgacagaagatcctgctgagcgggtgctgctgctggaggccggccccaaggatgtgctggccggcagcaagaggctgtcctggaagatccacatgcctgctgccctggtggccaacctgtgtgatgaccgctacaactggtgctaccacacagaggtgcagaggggcctggatggccgggtgctgtactggccccggggccgggtgtggggcggcagcagcagcctgaatgccatggtgtatgtgcggggccacgcagaagattatgagcgctggcagaggcagggcgcctag

SEQ ID NO: 287079 - DNA, 381 bp, Artificial Sequence
  derived and/or modified sequence
atgtggtgcctgctgcggggcctgggccggcccggcgccctggccagaggtgcactcgggcaacagcagagtctcggcgcacgggcattagcttccgctggctcagagagcagagacgagtactcttacgtagtcgtgggcgccggttcagctggatgtgtcctggccggaaggttgaccgaagaccccgctgaaagggtgttgctgctggaagccggaccaaaggatgttctggccggatccaagagactttcttggaagatccatatgcctgcagcgctggtggccaacctttgcgacgataggtataattggtgttatcacacagaggttcagcgcggcctcgacggtcgggtgctgtattggccgcgggggcgttag

SEQ ID NO: 287080 - DNA, 468 bp, Artificial Sequence
  derived and/or modified sequence
atgtggtgcctgctgcggggcctgggccggcccggcgccctggcccgcggtgccctcggccagcagcagtcattgggggcccgagccttagcctccgccggctctgagagcagagacgaatatagctatgtggtggtgggggctggcagcgcagggtgtgtgctggccggccgcctcaccgaagatccggcagaacgcgtgctcctgctggaggctgggccaaaggacgtgttagccgggtctaagcggctgtcatggaagatacatatgcctgccgctctcgtcgcaaacctttgtgatgaccgctacaattggtgctaccacaccgaagttcagcgaggactcgacgggcgggtactgtactggccgcgggggcgcgtgtggggcgggagttccagcctaaacgcgatggtctatgtcaggggtcatgccgaagactacgagcgatggcaaagacagggggcgtag

SEQ ID NO: 287081 - DNA, 381 bp, Artificial Sequence
  derived and/or modified sequence
atgtggtgtcttctgcgtggactgggcagaccaggggcacttgcacggggtgccctcggacagcagcagagtttgggggctcgagccctcgcctctgccggttctgagagtcgggatgagtatagctatgtggtggtgggtgctggatctgcgggttgcgtgctcgcgggaaggctgaccgaggaccccgctgagcgcgtactgttactggaagccggacccaaagacgtgttagctgggagtaagcggttgagctggaagatacatatgcccgcagcgctggtggctaatctgtgtgatgatcggtacaactggtgttatcacaccgaagtgcagcgaggcctggacggacgcgtcctgtattggccgagagggcgttag

SEQ ID NO: 287082 - DNA, 468 bp, Artificial Sequence
  derived and/or modified sequence
atgtggtgtctcctcaggggcctgggaagaccgggtgccttagctaggggagctctgggacaacagcaaagcctgggggcacgggcactagcctcagctgggagcgagtcccgcgatgagtacagctatgtcgtggtcggcgcaggttccgccggatgcgtgctggcaggaaggttaacagaagacccagctgaacgcgtgctgctgctcgaggctggtcccaaggacgtgctggcaggcagcaaacgcctttcgtggaagattcatatgccagctgctttagtcgcgaacctgtgcgatgacaggtacaattggtgctaccacaccgaagtacagcgcggactggacggcagagtgctgtactggcctcggggtagggtatggggtggatcttcatctcttaatgccatggtctacgtgagaggtcacgcggaggactacgaaagatggcaaagacaaggtgcttag

SEQ ID NO: 287083 - protein, 676 aa, Artificial Sequence
  derived and/or modified sequence
MAPFLRIAFNSYELGSLQAEDEANQPFCAVKMKEALSTERGKTLVQKKPTMYPEWKSTFDAHIYEGRVIQIVLMRAAEEPVSEVTVGVSVLAERCKKNNGKAEFWLDLQPQAKVLMSVQYFLEDVDCKQSMRSEDEAKFPTMNRRGAIKQAKIHYIKNHEFIATFFGQPTFCSVCKDFVWGLNKQGYKCRQCNAAIHKKCIDKIIGRCTGTAANSRDTIFQKERFNIDMPHRFKVHNYMSPTFCDHCGSLLWGLVKQGLKCEDCGMNVHHKCREKVANLCGINQKLLAEALNQVTQRASRRSDSASSEPVGIYQGFEKKTGVAGEDMQDNSGTYGKIWEGSSKCNINNFIFHKVLGKGSFGKVLLGELKGRGEYFAIKALKKDVVLIDDDVECTMVEKRVLTLAAENPFLTHLICTFQTKDHLFFVMEFLNGGDLMYHIQDKGRFELYRATFYAAEIMCGLQFLHSKGIIYRDLKLDNVLLDRDGHIKIADFGMCKENIFGESRASTFCGTPDYIAPEILQGLKYTFSVDWWSFGVLLYEMLIGQSPFHGDDEDELFESIRVDTPHYPRWITKESKDILEKLFEREPTKRLGVTGNIKIHPFFKTINWTLLEKRRLEPPFRPKVKSPRDYSNFDQEFLNEKARLSYSDKNLIDSMDQSAFAGFSFVNPKFEHLLED

SEQ ID NO: 287084 - DNA, 2810 bp, Artificial Sequence
  derived and/or modified sequence
ggcctggcagggcgaggcctggcgggggcggggcctggcgggggcggggccggcggcacctgggtgaggtcgctcggccccgccccctcgcacttccgtgtgccgcggcgccggagcccgaggcggctgtagcccacatctcccgagcgacccccggcgcccgcccgccgcgcggaggcccgggccacacctcactggccgcttggcccatcccagtcagcgccgcgccgaaccccgtccgcgcgcgccggggagcggcgcccccgccgctgccgccgcgacccttggcgcctgcccctgcaacgggagccccactgcaggccccaccatggcgccgttcctgcgcatcgccttcaactcctatgagctgggctccctgcaggccgaggacgaggcgaaccagcccttctgtgccgtgaagatgaaggaggcgctcagcacagagcgtgggaaaacactggtgcagaagaagccgaccatgtatcctgagtggaagtcgacgttcgatgcccacatctatgaggggcgcgtcatccagattgtgctaatgcgggcagcagaggagccagtgtctgaggtgaccgtgggtgtgtcggtgctggccgagcgctgcaagaagaacaatggcaaggctgagttctggctggacctgcagcctcaggccaaggtgttgatgtctgttcagtatttcctggaggacgtggattgcaaacagtctatgcgcagtgaggacgaggccaagttcccaacgatgaaccgccgcggagccatcaaacaggccaaaatccactacatcaagaaccatgagtttatcgccaccttctttgggcaacccaccttctgttctgtgtgcaaagactttgtctggggcctcaacaagcaaggctacaaatgcaggcaatgtaacgctgccatccacaagaaatgcatcgacaagatcatcggcagatgcactggcaccgcggccaacagccgggacactatattccagaaagaacgcttcaacatcgacatgccgcaccgcttcaaggttcacaactacatgagccccaccttctgtgaccactgcggcagcctgctctggggactggtgaagcagggattaaagtgtgaagactgcggcatgaatgtgcaccataaatgccgggagaaggtggccaacctctgcggcatcaaccagaagcttttggctgaggccttgaaccaagtcacccagagagcctcccggagatcagactcagcctcctcagagcctgttgggatatatcagggtttcgagaagaagaccggagttgctggggaggacatgcaagacaacagtgggacctacggcaagatctgggagggcagcagcaagtgcaacatcaacaacttcatcttccacaaggtcctgggcaaaggcagcttcgggaaggtgctgcttggagagctgaagggcagaggagagtactttgccatcaaggccctcaagaaggatgtggtcctgatcgacgacgacgtggagtgcaccatggttgagaagcgggtgctgacacttgccgcagagaatccctttctcacccacctcatctgcaccttccagaccaaggaccacctgttctttgtgatggagttcctcaacgggggggacctgatgtaccacatccaggacaaaggccgctttgaactctaccgtgccacgttttatgccgctgagataatgtgtggactgcagtttctacacagcaagggcatcatttacagggacctcaaactggacaatgtgctgctggaccgggatggccacatcaagattgccgactttgggatgtgcaaagagaacatattcggggagagccgggccagcaccttctgcggcacccctgactatatcgcccctgagatcctacagggcctgaagtacacattctctgtggactggtggtctttcggggtccttctgtacgagatgctcattggccagtcccccttccatggtgatgatgaggatgaactcttcgagtccatccgtgtggacacgccacattatccccgctggatcaccaaggagtccaaggacatcctggagaagctctttgaaagggaaccaaccaagaggctgggagtgaccggaaacatcaaaatccaccccttcttcaagaccataaactggactctgctggaaaagcggaggttggagccacctttcaggcccaaagtgaagtcacccagagactacagtaactttgaccaggagttcctgaacgagaaggcgcgcctctcctacagcgacaagaacctcatcgactccatggaccagtctgcattcgctggcttctcctttgtgaaccccaaattcgagcacctcctggaagattgaggttcctggacagatcaggctagccctgccctccacccacacctgcccgctccccacgataagcaccagtgggactgtggtgacttctgctgctggccccgcccctgcccccagagcgtccttggctgccgtctggccgggctctcatggtacttcctctgtgaactgtgtgtgaatctgcttttcctctgccttcggagggaaattgtaaatcctgtgtttcattacttgaatgtagttatctattgaaaatatatattatatacatagacatatatatatatataataggctgtatatattgctcagtagagaaaaaccatgggggactggtgatatgttgatctttttcaaaaaaatatatatatgacaaaaaaaaaaaaaaaggagcacaagctgtttgaaccaccaggtttatttgtgtgtctaaataaacaccaaatagtaccaa

SEQ ID NO: 287085 - DNA, 589 bp, Artificial Sequence
  derived and/or modified sequence
aaggattagggagtcctgagccccaggctgctctgctcagtcttggaaggcctcacgcaacccccttcacaaagcctgcccgattgtgtcctcaagggacaatttatagcatgcaatgacagtgcggagggcaggtctgtctggggagatgaaacgacctgtgcgattacaggagattcctactttcctcgcccccagtcctcaaggtcttctcagaggttcccactaggaggccggctgcagtgccctggacgaccctcacacccaggacctcagttgctccatccaaggaatgggcgagctcaggtcttcctgactttcctggagaacaaagaggccccactgcaggccccaccatggcgccgttcctgcgcatcgccttcaactcctatgagctgggctccctgcaggccgaggacgaggcgaaccagcccttctgtgccgtgaagatgaaggaggcgctcagcacagagcgtgggaaaacactggtgcagaagaagccgaccatgtatcctgagtggaagtcgacgttcgatgcccacatctatgaggggcgcgtcatccagattgtgctaatgcgggcagcaga

SEQ ID NO: 287086 - DNA, 732 bp, Artificial Sequence
  derived and/or modified sequence
atgatcgccttcaagctggacgaggacctgtgcgccgcccccgccaacggcggcaacgtgagcagaccccccgtgaccctgagactggtgatccccgccagccagtgcggcagcctgatcggcaaggccggcaccaagatcaaggagatcagagaggtgaccaagctgcagcagctgagcagccacgccgtgcccttcgccacccccagcgtggtgcccggcctggaccccggcacccagaccagcagccaggagttcctggtgcccaacgacctgatcggctgcgtgatcggcagacagggcagcaagatcagcgagatcagacagatgagcggcgcccacatcaagatcggcaaccaggccgagggcgccggcgagagacacgtgaccatcaccggcagccccgtgagcatcgccctggcccagtacctgatcaccgcctgcctggagaccgccaagagcaccagcggcggcacccccagcagcgcccccgccgacctgcccgcccccttcagcccccccctgaccgccctgcccaccgccccccccggcctgctgggcaccccctacgccatcagcctgagcaacttcatcggcctgaagcccatgcccttcctggccctgccccccgccagccccggccccccccccggcctggccgcctacaccgccaagatggccgccgccaacggcagcaagaaggccgagagacagaagttcagcccctactag

SEQ ID NO: 287087 - DNA, 1083 bp, Artificial Sequence
  derived and/or modified sequence
atgagcggcagcgacggcggcctggaggaggagcccgagctgagcatcaccctgaccctgagaatgctgatgcacggcaaggaggtgggcagcatcatcggcaagaagggcgagaccgtgaagagaatcagagagcagagcagcgccagaatcaccatcagcgagggcagctgccccgagagaatcaccaccatcaccggcagcaccgccgccgtgttccacgccgtgagcatgatcgccttcaagctggacgaggacctgtgcgccgcccccgccaacggcggcaacgtgagcagaccccccgtgaccctgagactggtgatccccgccagccagtgcggcagcctgatcggcaaggccggcaccaagatcaaggagatcagagagagcccccccaagggcgccaccatcccctaccaccccagcctgagcctgggcaccgtgctgctgagcgccaaccagggcttcagcgtgcagggccagtacggcgccgtgacccccgccgaggtgaccaagctgcagcagctgagcagccacgccgtgcccttcgccacccccagcgtggtgcccggcctggaccccggcacccagaccagcagccaggagttcctggtgcccaacgacctgatcggctgcgtgatcggcagacagggcagcaagatcagcgagatcagacagatgagcggcgcccacatcaagatcggcaaccaggccgagggcgccggcgagagacacgtgaccatcaccggcagccccgtgagcatcgccctggcccagtacctgatcaccgcctgcctggagaccgccaagagcaccagcggcggcacccccagcagcgcccccgccgacctgcccgcccccttcagcccccccctgaccgccctgcccaccgccccccccggcctgctgggcaccccctacgccatcagcctgagcaacttcatcggcctgaagcccatgcccttcctggccctgccccccgccagccccggccccccccccggcctggccgcctacaccgccaagatggccgccgccaacggcagcaagaaggccgagagacagaagttcagcccctactag

SEQ ID NO: 287088 - DNA, 732 bp, Artificial Sequence
  derived and/or modified sequence
atgatcgcctttaaactcgatgaggacttatgcgcagcacccgcaaacggtggcaacgtctctcgcccacctgttactctccggttggtaatccctgcgagtcagtgcggaagcctcataggtaaagcggggaccaaaatcaaagaaatcagggaggtgactaagctgcagcagctttcctcccatgcggtgcccttcgccacgccgtcagttgttcccggtttagatccgggaactcagacctcctctcaggagtttctggtgcctaatgacctgattggctgcgtgatcgggcggcagggatcaaagatctccgaaattcgccaaatgagcggagcgcacattaaaattggcaaccaagccgaaggggcaggcgagcgccatgtcacgatcactgggtctcccgtctcaatcgcgctggcacagtacctaatcacggcctgcctagagactgcgaaatccacgtcaggtgggaccccttcatctgcgcctgcagatctcccggccccattcagccctcccctgacagcgttgccaaccgcccccccgggcctgcttggtaccccatacgcaattagtctgtcaaacttcatcggtctcaagcctatgcctttcctggctctgcctcccgcctccccaggaccaccaccgggtctggcagcgtatacagctaaaatggctgccgcgaacggcagcaagaaggccgaaagacaaaagttctcaccctattag

SEQ ID NO: 287089 - DNA, 1083 bp, Artificial Sequence
  derived and/or modified sequence
atgagtggatccgacggaggtctggaagaagagcctgaactgagcattactctgacactccgcatgcttatgcatggtaaggaggtcggttctatcatcgggaaaaaaggggaaacagtgaagcggatccgggaacagagctctgcacgcataacaatctctgagggaagctgccctgagagaatcacaacaataactggtagtactgctgctgtgttccatgcagtgtctatgatagcatttaaacttgacgaggatctgtgcgccgcccccgccaatggagggaacgtgagccgtccacctgtgacactccggctagtcatacccgctagccaatgcggcagtctaataggcaaagccggcactaagattaaggaaatccgcgagtctccaccaaagggggccaccatcccatatcacccctccctgtccttagggaccgtgcttttatccgccaaccagggtttcagcgtgcagggccagtacggagccgtgacccccgctgaggttacaaagctccagcaactctcgagccacgcggtcccattcgccacaccatccgtcgtgcctggactcgacccaggaactcagactagtagccaggaatttctggtccccaacgacctgattggttgtgtgatcggccgccagggcagtaagattagcgagatcagacagatgtccggagcccacatcaagatcggaaatcaggccgagggcgccggggaaaggcatgtgactatcaccggatcccctgtaagtattgctctggcccagtacctcattacagcttgtctggaaaccgccaaaagtacatcaggtggcactccaagctctgcacctgccgatctcccagctccctttagcccgcctttgacagcgctgccaacagctcctccgggcctcctgggcaccccctatgccatctctctgagtaactttatcggccttaaacccatgccatttctcgccctcccccctgcctcgcctggcccccccccgggtctggcagcctacaccgccaaaatggctgcagccaacggctcaaaaaaagctgagagacaaaaatttagcccttactag

SEQ ID NO: 287090 - DNA, 1083 bp, Artificial Sequence
  derived and/or modified sequence
atgagcgggtcagacggcggccttgaggaagagcctgaactttcgatcaccctcacgctccgcatgctgatgcatggtaaggaagtcggctccattataggcaaaaaaggagagactgtgaagaggattcgagagcagtcctccgctaggatcaccattagcgagggttcctgtcctgaacggatcactactataactggatcaacagctgcggttttccatgctgtgagcatgattgcatttaagctggatgaggacctgtgcgccgctccagccaacggggggaacgtgtcaaggcctcctgtcaccctacgcctcgtaataccagcttctcaatgtggcagcctaattggaaaagctgggacaaagatcaaggagattcgggaaagtccaccaaaaggagccaccattccctaccatcctagcctctctttggggacggtgctgctttcagcgaaccagggtttcagcgtgcagggacagtatggcgcagttactccagccgaagtgacaaaacttcagcagctgtcaagccacgccgtgcctttcgctaccccttctgtggtcccaggtctcgatcccgggactcagaccagcagtcaggaatttttagttcccaacgatctgatcggctgcgttataggcagacagggctcaaaaatttcagaaatcagacagatgtctggggcccatatcaagattgggaaccaggcagagggtgccggagagagacatgtgacgattacaggatctcctgtgtcaatcgcgctggcgcagtacctgattactgcctgcctggaaacggcaaagtcaacgtctggtggaacccccagcagcgcccccgcggacttacccgcccccttcagtcccccactgaccgctctgcctactgccccccctgggttgctgggaacgccttacgccatctccttgtccaattttattggcctcaaacctatgcccttcttggcactccccccagcttcacctgggccacctcccgggctggcggcttatactgcaaagatggccgcagccaacggatcaaagaaggctgagcggcagaaattctccccctattag

SEQ ID NO: 287091 - DNA, 732 bp, Artificial Sequence
  derived and/or modified sequence
atgattgccttcaagctggatgaggacctgtgtgccgccccagccaacggcggcaatgtgtccaggcctcctgtgaccctgcggctggtgatcccagccagccagtgtggcagcctcatcggcaaggccggcaccaagatcaaggagatccgggaggtgaccaagctgcagcagctgagcagccatgctgtgccctttgccacccccagcgtggtgcccggcctggaccccggcacccagaccagcagccaggagttcctggtgcccaatgacctgattggctgtgtgattggccggcagggcagcaagatcagcgagatccggcagatgtctggggcccacatcaagattggcaaccaggccgagggcgctggggagcggcacgtgaccatcaccggcagccctgtgtccatcgccctggcccagtacctgatcacagcctgcctggagacagccaagagcaccagcggcggcacccccagcagcgccccagctgacctgcctgcccccttcagcccccccctgacagccctgcccacagcccctcctggcctgctgggcaccccctatgccatcagcctgagcaacttcatcggcctgaagcccatgcccttcctggccctgcccccagccagccctggccccccacctggcctggccgcctacacagccaagatggccgccgccaacggcagcaagaaggccgagcggcagaagttcagcccctactag

SEQ ID NO: 287092 - DNA, 1083 bp, Artificial Sequence
  derived and/or modified sequence
atgagcggcagtgatggcggcctggaggaggagcctgagctgagcatcaccctgaccctgaggatgctgatgcacggcaaggaggtgggcagcatcatcggcaagaagggggagaccgtgaagaggatccgggagcagagcagcgcccgcatcaccatcagcgagggcagctgcccagagcgcatcaccaccatcaccggcagcacagctgctgtgttccacgctgtgtccatgattgccttcaagctggatgaggacctgtgtgccgccccagccaatggaggaaatgtgtcccggccccctgtgaccctgcggctggtgatcccagccagccagtgtggcagcctgattggcaaggccggcaccaagatcaaggagatccgggagagcccccccaagggggccaccatcccctaccaccccagcctgagcctgggcaccgtgctgctgagcgccaaccagggcttctctgtgcagggccagtacggggctgtgaccccagctgaggtgaccaagctgcagcagctgagcagccatgctgtgccctttgccaccccatctgtggtgcccggcctggaccccggcacccagaccagcagccaggagttcctggtgcccaatgacctgattggctgcgtcatcggccggcagggcagcaagatcagcgagatccggcagatgtctggggcccacatcaagattggcaaccaggccgagggcgctggggagagacatgtgaccatcaccggcagccctgtgtccatcgccctggcccagtacctgatcacagcctgcctggagacagccaagagcaccagcggcggcacccccagcagcgccccagctgacctgcctgcccccttcagcccccccctgacagccctgcccacagcccctcctggcctgctgggcaccccctatgccatcagcctgagcaacttcatcggcctgaagcccatgcccttcctggccctgcccccagccagccctggccccccacctggcctggccgcctacacagccaagatggctgctgccaacggcagcaagaaggccgagcggcagaagttcagcccctactag

SEQ ID NO: 287093 - DNA, 732 bp, Artificial Sequence
  derived and/or modified sequence
atgatcgccttcaagctggacgaggacctgtgcgccgcccccgccaacggcggcaacgtaagccgtcctcctgtgacactacgcctcgttattcccgccagtcagtgtgggagcctcatcggaaaagcaggaaccaagattaaagaaattagggaagttactaaacttcagcaactttcatcgcacgctgtgccctttgcaactcctagtgtggtaccagggctggaccccggaacacagactagttctcaggaatttctggtccccaacgacctgataggatgcgtgattggacgccagggcagcaagatcagcgagattcgtcaaatgtctggtgctcacataaagatcggcaatcaagccgaaggtgccggggagcgacacgttactattacagggtccccagtcagcatcgcactggcacagtacctcatcacagcctgcctcgagaccgctaaatcaacctctggtggaacaccatcttccgcccccgccgatctccctgctcctttctcaccgccattgacagccctgccaacagcaccgcctggcctgctgggcacgccttacgctatctccttatccaattttataggacttaagccaatgccttttctggccctcccacctgcctcaccagggccccctcctggcctcgctgcctacacagctaaaatggcagccgcaaacggaagcaaaaaagccgagaggcagaagttcagcccctattag

SEQ ID NO: 287094 - DNA, 1083 bp, Artificial Sequence
  derived and/or modified sequence
atgagcggcagcgacggcggcctggaggaggagcccgagctgagcattacactgacactgaggatgctgatgcatggaaaggaggtggggagcatcatcggcaaaaaaggggaaactgtcaaaagaatccgcgagcagtcctccgctcgcatcacaatttcggagggatcatgtcctgaacggataaccactatcacaggaagcacagcagcagtcttccatgctgtctccatgattgccttcaaactggatgaagatttgtgcgcggcccctgccaatgggggaaatgtgtcccggccccccgtaaccctgcgacttgtcatccctgcttcgcagtgtggcagtctgattggtaaggccggtacgaaaatcaaagaaataagggaatccccacccaaaggcgcaactatcccctaccacccttccctgtccttaggaaccgtccttttgagtgccaaccagggattttccgtgcagggacaatatggggctgtcacccccgctgaagtgactaaactccagcagctctccagccatgccgtgcccttcgccacgccaagcgtggtgccagggctggaccctggaactcagacatcttcacaggagtttctggttcctaatgatttaatcggctgcgtgatcggacgtcagggcagcaagatctccgagatccgacagatgtctggcgctcacattaagatcggtaaccaggcggagggcgccggcgagcgacacgtcacaataacggggtctcctgtgagcatcgctctggctcagtatcttattaccgcctgtctcgagactgcaaagtccacctctggcgggacacctagttcagctccagctgatctccccgcccctttctcccctcccctgaccgctctaccaactgccccaccggggctgctcggcacaccatacgccataagcctgagcaattttataggactcaagccaatgcctttcctagctctgccacctgcatcccctggacctccgcccggcttggccgcatatacggctaagatggctgctgcaaatgggtcaaagaaagcagaaaggcaaaaattttcaccatactag

SEQ ID NO: 287095 - DNA, 1083 bp, Artificial Sequence
  derived and/or modified sequence
atgagcggcagcgacggcggcctggaggaggagcccgagctgagcatcaccctaaccctgagaatgttgatgcatggcaaggaagttggcagtattattggaaaaaagggcgagaccgtgaaaaggataagggaacagagctcagccaggatcacaatttccgaggggtcttgccccgaacggattactacaattacaggaagcactgccgctgtgttccatgccgtttccatgatcgcctttaagttagatgaggacctgtgcgcagcccccgccaacggcggcaacgtcagcagacccccagtgactctgagattggtgatcccagctagccagtgcgggtctctcattgggaaagccggtaccaagatcaaagagatcagggagtccccccccaaaggggctaccatcccgtatcatccaagcctgtctctaggtactgtgctcctcagcgccaaccaaggtttttctgtgcaagggcagtacggggccgtcacccctgccgaggtgacaaagttacaacagctcagcagccacgcagttcctttcgcaacgccaagcgtggtgcctggcctggatcccggaacccagactagcagccaggaatttttggtaccgaatgatctgattggttgtgtgatcggtcgccagggctcaaaaatttcagagattcgccaaatgtccggggcgcacatcaagattggcaaccaggccgaaggcgccggggaacggcacgtgaccattacgggatctcccgtgtcaatcgccctggcacagtatcttataacagcctgtctcgaaactgccaaaagcacttccggcggtacaccaagctctgcacccgccgacctgccagcaccattctctccccctttgactgcccttcctacagcaccccctgggctgcttggcaccccatatgctatcagcctcagcaattttatcgggttaaaaccaatgccgtttttggcacttccaccagctagccctggcccgccaccaggcctggcagcatatactgcgaaaatggcagccgctaatggatcaaagaaggccgaaaggcaaaaattcagcccttattag

SEQ ID NO: 287096 - DNA, 732 bp, Artificial Sequence
  derived and/or modified sequence
atgattgcgttcaaactggacgaggatctgtgcgctgccccagcaaacgggggaaacgtttccagacccccagtcacactgcggctggttatacccgcatctcaatgcggatccttaatcggcaaggctggaacgaaaataaaagaaataagagaagtaactaagctccagcagctctcctcccacgccgtgcctttcgctaccccatctgtcgtgcctggactcgaccctgggacccagacatcttcccaggagtttctggtgcctaacgacctgattggatgcgtcatcggtcgccaggggagcaaaatctcagaaattcggcagatgtcaggagcccacataaagattggcaatcaggccgagggcgctggggagaggcacgtcactataacagggtcccctgtttcaatcgccttagcccagtacctgataaccgcctgtctcgaaaccgccaagagcacgagtgggggaaccccctcaagcgccccagctgatctgcccgcaccttttagccctcctcttaccgctctgccaacagcgccaccgggactgctgggaactccgtacgcgatatcgctcagcaatttcatcggactgaagccaatgccatttctggcactgccacctgcgtcaccaggtccaccgcctggcttggccgcttacactgccaaaatggccgcagcgaatgggagcaagaaagctgagagacagaaattttccccctactag

SEQ ID NO: 287097 - DNA, 1083 bp, Artificial Sequence
  derived and/or modified sequence
atgtctggctccgacggaggcctggaggaagagcccgaattaagtattacattgacactgaggatgttaatgcacggaaaagaggtaggcagtataatcgggaagaagggggaaaccgtcaagagaataagggaacagtcgtctgcccgaattacaatctccgagggctcatgcccagaacgaatcaccacgataacgggcagcacagcagccgtctttcacgccgtctccatgattgcgttcaaactggacgaagacctctgcgcagcacccgctaatggtgggaatgtctctcgtcctcctgtgacgctgaggctcgttattcctgcatctcagtgcggttctctaatcggaaaagcgggtacaaagataaaggaaatcagggagagcccacctaaaggcgctactattccgtaccacccatccttgtctttgggcactgtcctgttgtctgctaaccagggattctctgtccaggggcaatacggtgcagtcactccagctgaagtgacgaagctgcagcagctttcatcgcatgcagtgcctttcgcaacaccctctgtggtgcccggattggacccaggaacgcagacatcgagccaagaattcctagtgcctaacgatcttattggctgtgtgatcggccgtcaagggtctaagataagcgagattcgccagatgtcaggcgcacatataaagattggcaatcaagctgagggtgccggtgagagacacgtgaccatcactggatccccagtgtcaatagcactggcacaatacctaatcaccgcttgtctagagaccgccaagagcacgtccggtggcacgccctcttcagcccctgctgatctgccggctccttttagccctcccctgacggcccttcctacagcgcctccgggattacttgggacaccatacgcgatttcactttctaattttatcggtctgaaaccaatgccctttctggcactgccgcctgcttcccctgggccaccacccggactggcagcttatactgctaaaatggcggctgctaacggttccaaaaaggcggagaggcagaagttcagtccttattag

SEQ ID NO: 287098 - DNA, 1083 bp, Artificial Sequence
  derived and/or modified sequence
atgtccggttcagacggcggactcgaagaggaaccggaattgtcgattactctcacccttagaatgctcatgcacggcaaagaagtgggctccatcataggcaagaagggggagacagtgaagcgtattagagaacagagttctgcccgtataactattagcgaaggttcgtgcccagagcggataactactattactggctccaccgcggcagtgtttcacgctgtcagcatgattgcttttaagttagacgaggatctatgcgccgcacccgctaatggcggtaatgtttctaggccgccagtgaccctccgattagttattcctgcctcacagtgcggtagcttaattggcaaggccggaaccaaaattaaggagatccgcgagagcccacccaaaggggctactatcccgtaccacccatcactgtccctgggcacggtgctgttaagcgcaaatcagggattttccgtacagggacaatacggagcagtgactcccgcagaagtgactaaactgcaacagctgagttctcacgcggttccatttgccacgcctagtgttgtaccgggactggacccaggcactcagactagctctcaggagttcctggttcccaacgacctcattggctgtgtgataggcagacaggggagtaagatttctgagattcgacagatgtctggcgcacacattaaaatcggaaaccaggctgagggagccggtgaaagacatgtcacaattaccgggagtccagttagtatcgctctcgcacagtacctgatcaccgcctgtctcgaaaccgccaaaagtacatctggagggacccccagcagcgcacccgctgatcttcctgcgccattctccccccctctgacagccctccccacagccccaccaggcctgcttgggacaccttacgccatatccctgagtaacttcattggcctcaagcccatgccattcttagcgctcccccctgcaagccccggacctcccccaggcttggccgcttacacagcaaaaatggccgctgctaatggctctaagaaggccgagcggcagaagttcagcccatattag

SEQ ID NO: 287099 - DNA, 141 bp, Artificial Sequence
  derived and/or modified sequence
atgagcggcagcgacggcggcctggaggaggagcccgagctgagcatcaccctgaccctgagaatgctgatgcacggcaaggaggtgggcagcatcatcggcaagaagggcgagaccgtgaagagaatcagagagcagtag

SEQ ID NO: 287100 - DNA, 375 bp, Artificial Sequence
  derived and/or modified sequence
atgagcggcagcgacggcggcctggaggaggagcccgagctgagcatcaccctgaccctgagaatgctgatgcacggcaaggaggtgggcagcatcatcggcaagaagggcgagaccgtgaagagaatcagagagcagagcagcgccagaatcaccatcagcgagggcagctgccccgagagaatcaccaccatcaccggcagcaccgccgccgtgttccacgccgtgagcatgatcgccttcaagctggacgaggacctgtgcgccgcccccgccaacggcggcaacgtgagcagaccccccgtgaccctgagactggtgatccccgccagccagtgcggcagcctgatcggcaaggccggcaccaagatctag

SEQ ID NO: 287101 - DNA, 507 bp, Artificial Sequence
  derived and/or modified sequence
atgagcggcagcgacggcggcctggaggaggagcccgagctgagcatcaccctgaccctgagaatgctgatgcacggcaaggaggtgggcagcatcatcggcaagaagggcgagaccgtgaagagaatcagagagcagagcagcgccagaatcaccatcagcgagggcagctgccccgagagaatcaccaccatcaccggcagcaccgccgccgtgttccacgccgtgagcatgatcgccttcaagctggacgaggacctgtgcgccgcccccgccaacggcggcaacgtgagcagaccccccgtgaccctgagactggtgatccccgccagccagtgcggcagcctgatcggcaaggccggcaccaagatcaaggagatcagagagaccaccggcgcccaggtgcaggtggccggcgacctgctgcccaacagcaccgagagagccgtgaccgtgagcggcgtgcccgacgccatcatcctgtgcgtgagacagatctgcgcctag

SEQ ID NO: 287102 - DNA, 228 bp, Artificial Sequence
  derived and/or modified sequence
atgagcggcagcgacggcggcctggaggaggagcccgagctgagcatcaccctgaccctgagaatgctgatgcacggcaaggaggtgggcagcatcatcggcaagaagggcgagaccgtgaagagaatcagagagcagagcagcgccagaatcaccatcagcgagggcagctgccccgagagaatcaccaccatcaccggcagcaccgccgccgtgttccacgcctag

SEQ ID NO: 287103 - DNA, 279 bp, Artificial Sequence
  derived and/or modified sequence
atgagcggcagcgacggcggcctggaggaggagcccgagctgagcatcaccctgaccctgagaatgctgatgcacggcaaggaggtgggcagcatcatcggcaagaagggcgagaccgtgaagagaatcagagagcagagcagcgccagaatcaccatcagcgagggcagctgccccgagagaatcaccaccatcaccggcagcaccgccgccgtgttccacgccgtgagcatgatcgccttcaagctggacgaggacctgtgcgccgcccccgcctag

SEQ ID NO: 287104 - DNA, 261 bp, Artificial Sequence
  derived and/or modified sequence
atgagcggcagcgacggcggcctggaggaggagcccgagctgagcatcaccctgaccctgagaatgctgatgcacggcaaggaggtgggcagcatcatcggcaagaagggcgagaccgtgaagagaatcagagagcagagcagcgccagaatcaccatcagcgagggcagctgccccgagagaatcaccaccatcaccggcagcaccgccgccgtgttccacgccgtgagcatgatcgccttcaagctggacgaggtgtag

SEQ ID NO: 287105 - DNA, 324 bp, Artificial Sequence
  derived and/or modified sequence
atgagcggcagcgacggcggcctggaggaggagcccgagctgagcatcaccctgaccctgagaatgctgatgcacggcaaggaggtgggcagcatcatcggcaagaagggcgagaccgtgaagagaatcagagagcagagcagcgccagaatcaccatcagcgagggcagctgccccgagagaatcaccaccatcaccggcagcaccgccgccgtgttccacgccgtgagcatgatcgccttcaagctggacgaggacctgtgcgccgcccccgccaacggcggcaacgtgagcagaccccccgtgaccctgagactggtgtag

SEQ ID NO: 287106 - DNA, 141 bp, Artificial Sequence
  derived and/or modified sequence
atgtccggatcagacggcgggctggaggaagaacccgaactcagtatcacattaactttgagaatgctgatgcacggcaaggaggtcgggtctattatagggaagaagggcgaaaccgtgaagaggatcagggagcaatag

SEQ ID NO: 287107 - DNA, 375 bp, Artificial Sequence
  derived and/or modified sequence
atgtccggctcagacggaggtcttgaagaggaaccagagttgtcgatcacgctgactctgaggatgttgatgcatggcaaagaggtcggaagcatcattggtaagaagggagagaccgtaaaaagaattcgagagcagtctagtgcccgtataaccatcagtgagggatcttgtcctgaacggatcactacaatcactggatcaaccgctgcggtgttccacgccgtctcgatgatagcatttaaactggacgaggacctgtgcgccgccccagcgaacggcggaaacgttagtcgtcccccagtgacattgaggctcgtgatacctgcttctcaatgcggttctctgattggcaaagctgggaccaaaatttag

SEQ ID NO: 287108 - DNA, 507 bp, Artificial Sequence
  derived and/or modified sequence
atgtccggcagcgacggagggctcgaagaggagcctgagctgagcattacattgactctgaggatgctcatgcacgggaaagaagtcggctcaatcatcggaaagaaaggagagaccgtgaaacgtatcagggaacagagctccgcaaggatcacaatttccgagggatcctgcccagaaaggattacaaccattacaggcagcaccgccgctgtttttcatgcagtgagtatgattgccttcaaactggacgaggatctgtgcgccgccccagcaaacggagggaacgtgtcacgtccacctgttaccctgcgactcgtgatacctgcgagccagtgcggttccctgattggaaaagccggcactaaaatcaaagaaatcagagaaactactggtgcccaggtacaagtggctggggatttgctgcccaatagtacagaaagggcagtcacggtgtccggcgtgccagatgctatcatcctgtgcgtgaggcaaatctgcgcctag

SEQ ID NO: 287109 - DNA, 228 bp, Artificial Sequence
  derived and/or modified sequence
atgagcggttcggacggaggtctcgaggaggaacctgaactgtccataacattgacattgcggatgcttatgcacggcaaagaagtgggcagcatcatcggcaagaaaggtgagaccgtcaaaaggatccgtgaacagagtagcgcccggataaccatctccgagggcagttgcccagaaaggattaccacgataaccggttccaccgctgccgtcttccacgcctag

SEQ ID NO: 287110 - DNA, 279 bp, Artificial Sequence
  derived and/or modified sequence
atgagcgggtccgacggcggactggaagaggagcctgagctgtccatcacgctgacgctcagaatgttaatgcacgggaaagaggttggctccattattggcaagaagggcgagaccgtgaagcgcatccgcgagcagagtagtgcacgaatcaccattagtgaaggtagctgtccagagcgaataaccacaatcactggaagcacagcagctgtgtttcatgcagtgagtatgatcgccttcaaactcgatgaagacttatgtgccgccccagcatag

SEQ ID NO: 287111 - DNA, 261 bp, Artificial Sequence
  derived and/or modified sequence
atgagtggtagcgatggaggactggaggaggagccagaactttccattaccctgaccctccggatgctgatgcacggcaaggaagtgggcagcattatagggaagaagggcgagacagtgaaacgcatccgggaacagagcagtgcaaggattacaatctctgaaggcagctgtcctgaacgtattactactatcactggcagtaccgccgccgttttccatgctgtatccatgatagccttcaagcttgatgaagtctag

SEQ ID NO: 287112 - DNA, 324 bp, Artificial Sequence
  derived and/or modified sequence
atgagcgggagcgatgggggcctggaggaggagcctgaactgagcattacactgacactgaggatgctgatgcacggtaaagaggtgggatccattattgggaagaagggggaaactgtgaagcgaattcgggagcagagcagcgcgcgaatcactattagcgagggctcatgtcctgagagaattactactatcacgggtagtacagcagccgttttccacgcagttagcatgattgcattcaagctggatgaggacctgtgtgccgcgccagcaaacggcggcaatgtgagcaggccaccagtgacactgagattagtgtag

SEQ ID NO: 287113 - DNA, 141 bp, Artificial Sequence
  derived and/or modified sequence
atgagcggcagtgatggcggcctggaggaggagcctgagctgagcatcaccctgaccctgaggatgctgatgcacggcaaggaggtgggcagcatcatcggcaagaagggggagaccgtgaagaggatccgggagcagtag

SEQ ID NO: 287114 - DNA, 375 bp, Artificial Sequence
  derived and/or modified sequence
atgagcggcagtgatggcggcctggaggaggagcctgagctgagcatcaccctgaccctgaggatgctgatgcacggcaaggaggtgggcagcatcatcggcaagaagggggagaccgtgaagaggatccgggagcagagcagcgcccgcatcaccatcagcgagggcagctgcccagagcgcatcaccaccatcaccggcagcacagctgctgtgttccacgctgtgtccatgattgccttcaagctggatgaggacctgtgtgccgccccagccaatggaggaaatgtgtcccggccccctgtgaccctgcggctggtgatcccagccagccagtgtggcagcctgattggcaaggccggcaccaagatctag

SEQ ID NO: 287115 - DNA, 507 bp, Artificial Sequence
  derived and/or modified sequence
atgagcggcagtgatggcggcctggaggaggagcctgagctgagcatcaccctgaccctgaggatgctgatgcacggcaaggaggtgggcagcatcatcggcaagaagggggagaccgtgaagaggatccgggagcagagcagcgcccgcatcaccatcagcgagggcagctgcccagagcgcatcaccaccatcaccggcagcacagctgctgtgttccacgctgtgtccatgattgccttcaagctggatgaggacctgtgtgccgccccagccaatggaggaaatgtgtcccggccccctgtgaccctgcggctggtgatcccagccagccagtgtggcagcctgattggcaaggccggcaccaagatcaaggagatccgggagaccactggagcccaggtgcaggtggccggggacctgctgcccaacagcacagaaagagctgtgacagtgtctggagtgcctgatgccatcatcctgtgtgtgcggcagatctgtgcctag

SEQ ID NO: 287116 - DNA, 228 bp, Artificial Sequence
  derived and/or modified sequence
atgagcggcagtgatggcggcctggaggaggagcctgagctgagcatcaccctgaccctgaggatgctgatgcacggcaaggaggtgggcagcatcatcggcaagaagggggagaccgtgaagaggatccgggagcagagcagcgcccgcatcaccatcagcgagggcagctgcccagagcgcatcaccaccatcaccggcagcacagctgctgtgttccacgcctag

SEQ ID NO: 287117 - DNA, 279 bp, Artificial Sequence
  derived and/or modified sequence
atgagcggcagtgatggcggcctggaggaggagcctgagctgagcatcaccctgaccctgaggatgctgatgcacggcaaggaggtgggcagcatcatcggcaagaagggggagaccgtgaagaggatccgggagcagagcagcgcccgcatcaccatcagcgagggcagctgcccagagcgcatcaccaccatcaccggcagcacagctgctgtgttccacgctgtgtccatgattgccttcaagctggatgaggacctgtgtgccgccccagcctag

SEQ ID NO: 287118 - DNA, 261 bp, Artificial Sequence
  derived and/or modified sequence
atgagcggcagtgatggcggcctggaggaggagcctgagctgagcatcaccctgaccctgaggatgctgatgcacggcaaggaggtgggcagcatcatcggcaagaagggggagaccgtgaagaggatccgggagcagagcagcgcccgcatcaccatcagcgagggcagctgcccagagcgcatcaccaccatcaccggcagcacagctgctgtgttccacgctgtgtccatgattgccttcaagctggatgaggtgtag

SEQ ID NO: 287119 - DNA, 324 bp, Artificial Sequence
  derived and/or modified sequence
atgagcggcagtgatggcggcctggaggaggagcctgagctgagcatcaccctgaccctgaggatgctgatgcacggcaaggaggtgggcagcatcatcggcaagaagggggagaccgtgaagaggatccgggagcagagcagcgcccgcatcaccatcagcgagggcagctgcccagagcgcatcaccaccatcaccggcagcacagctgctgtgttccacgctgtgtccatgattgccttcaagctggatgaggacctgtgtgccgccccagccaatggaggaaatgtgtcccggccccctgtgaccctgcggctggtgtag

SEQ ID NO: 287120 - DNA, 141 bp, Artificial Sequence
  derived and/or modified sequence
atgagcggcagcgacggcggcctggaggaggagcccgagctgagcatcaccctgacgctgaggatgttgatgcatggcaaagaggtgggaagcatcatcgggaagaagggtgagacggtgaaaagaattcgtgaacagtag

SEQ ID NO: 287121 - DNA, 375 bp, Artificial Sequence
  derived and/or modified sequence
atgagcggcagcgacggcggcctggaggaggagcccgagctgagcattacgctgacgctgcgcatgctcatgcatgggaaggaggtgggcagtataataggcaaaaaaggagaaactgttaagaggatccgtgagcaaagcagcgcaaggattaccatatccgagggctcttgtcccgaacgaatcaccaccatcactggatccactgccgctgtgtttcacgccgtctcaatgatcgccttcaaactcgatgaagacctttgcgcagctccagccaacgggggtaacgtgtccagaccccctgtcacactccggctggtgattcccgcgtctcaatgtgggtccctgattggaaaggcgggtacaaagatctag

SEQ ID NO: 287122 - DNA, 507 bp, Artificial Sequence
  derived and/or modified sequence
atgagcggcagcgacggcggcctggaggaggagcccgagctgagcatcaccctgaccctgcggatgttgatgcacgggaaggaagtaggaagcattattgggaagaagggcgagacggtgaaacgtattagggaacagagcagcgcacgcattaccatctcagagggaagctgtcccgaacgcatcacaactatcaccggcagcactgccgccgtcttccatgcagtcagtatgatcgctttcaagttggatgaggacctctgcgcagcacctgccaatgggggcaatgtgtcgagaccccccgtgaccctgaggctagtaataccagcctctcaatgtgggagtctcattgggaaggcgggcactaaaattaaagagatccgggaaactactggtgcccaggtccaggttgcgggggacctgcttcccaacagcactgagagagccgttactgtgagtggtgttcctgacgcgatcatcctttgcgtccggcagatttgcgcctag

SEQ ID NO: 287123 - DNA, 228 bp, Artificial Sequence
  derived and/or modified sequence
atgagcggcagcgacggcggcctggaggaggagcccgagctgagcatcacactcaccttgcggatgttgatgcacggaaaggaagtcggctctatcatcgggaaaaaaggtgaaaccgtgaaacggatacgtgagcagagttccgcccgcatcaccatttccgagggaagctgcccggaacgcatcaccacaataactggttctaccgccgccgtatttcacgcctag

SEQ ID NO: 287124 - DNA, 279 bp, Artificial Sequence
  derived and/or modified sequence
atgagcggcagcgacggcggcctggaggaggagcccgagctgagcattaccctgacgctgcgtatgctcatgcacgggaaagaagtgggctctattattggaaagaagggagagaccgtgaaacgaataagagaacagtcctccgctcggattactatctcagaggggtcttgtcccgagagaatcacaactattacaggcagtaccgcggccgtatttcatgctgtgagcatgatcgcttttaagctcgacgaggatttatgtgccgcccccgcctag

SEQ ID NO: 287125 - DNA, 261 bp, Artificial Sequence
  derived and/or modified sequence
atgagcggcagcgacggcggcctggaggaggagcccgagctgagcattaccctcacattgagaatgttgatgcacggcaaagaagtaggtagcatcattggcaagaagggggagacagtcaaaagaatccgggaacagtctagtgcccggattacaatctctgaaggtagctgccccgagcggataaccaccatcactgggtccacggccgccgtgttccacgccgtgagcatgatcgcattcaagctggatgaggtctag

SEQ ID NO: 287126 - DNA, 324 bp, Artificial Sequence
  derived and/or modified sequence
atgagcggcagcgacggcggcctggaggaggagcccgagctgagcatcactctgaccctacgcatgcttatgcatggcaaggaagtgggctcaattattgggaaaaaaggagagactgtgaagcggattcgcgagcaaagcagcgctagaattacgattagcgaggggtcatgccccgaaaggatcaccactattaccgggagcacagccgcagtgttccacgccgtcagtatgattgcattcaagcttgatgaagatctgtgcgctgcgcctgctaatggcggcaatgttagtaggccccctgtcaccctacgtctggtatag

SEQ ID NO: 287127 - DNA, 562 bp, Artificial Sequence
  derived and/or modified sequence
aaacccctcattgttcgcagctgatgtcactcgcagttgtgagcggccgcctctcccggggacaatgtgggactgagcggcccagccgccgtgccgccgccgccgccgccgcaggacagccccagcgagcctctggagtccctgtggcagaactcaaatggaaggaggagcagctgcacccaggggagcagggtgtcacctccgttggataggccatttccagcacatagaagagagattggaaaccaacgtgcagaactgccagtcccctgacacgctgtgccccacccactgcagcccagtgctgaatgaaccctgcccagaggtgtctgtagtgagcttctgccctagtgacttttgagccggccaggttgcagcgcggacacactcgcaggtcgctgtggccccagcctcgcctgacagaatgagcggctcggacgggggactggaggaggagccagagctcagcatcaccctcacgctgcggatgctgatgcacgggaaggaagtgggcagcatcatcgggaagaagggcgagactgtaaagcgaatccgggagcag

SEQ ID NO: 287128 - DNA, 837 bp, Artificial Sequence
  derived and/or modified sequence
agtaaaagactcaacggagcccgttccttgcgaccctatccccaaaaggaattccggggctgatgtcactcgcagttgtgagcggccgcctctcccggggacaatgtgggactgagcggcccagccgccgtgccgccgccgccgccgccgcaggacagccccagcgagcctctggagtccctgtggcagaactcaaatggaaggaggagcagctgcacccaggggagcagggtgtcacctccgttggataggccatttccagcacatagaagagagattggaaaccaacgtgcagaactgccagtcccctgacacgctgtgccccacccactgcagcccagtgctgaatgaaccctgcccagaggtgtctgtagtgagcttctgccctagtgacttttgagccggccaggttgcagcgcggacacactcgcaggtcgctgtggccccagcctcgcctgacagaatgagcggctcggacgggggactggaggaggagccagagctcagcatcaccctcacgctgcggatgctgatgcacgggaaggaagtgggcagcatcatcgggaagaagggcgagactgtaaagcgaatccgggagcagagcagtgcccggatcaccatctccgagggctcctgccctgaacgcatcaccaccatcaccgggtctacagcagctgtcttccatgcagtctccatgattgctttcaaactggatgaggacctttgtgctgctcctgcaaatggtggaaatgtctccaggcctccagtgaccctgcgccttgtcatccctgccagtcagtgtggctcactgattgggaaggctggcaccaagatcaa

SEQ ID NO: 287129 - DNA, 704 bp, Artificial Sequence
  derived and/or modified sequence
caccaggccagatggagaggaagggagattggattcccctccccacccacacatacccagctgatgtcactcgcagttgtgagcggccgcctctcccggggacaatgtgggactgagcggcccagccgccgtgccgccgccgccgccgccgcaggacagccccagcgaggtcgctgtggccccagcctcgcctgacagaatgagcggctcggacgggggactggaggaggagccagagctcagcatcaccctcacgctgcggatgctgatgcacgggaaggaagtgggcagcatcatcgggaagaagggcgagactgtaaagcgaatccgggagcagagcagtgcccggatcaccatctccgagggctcctgccctgaacgcatcaccaccatcaccgggtctacagcagctgtcttccatgcagtctccatgattgctttcaaactggatgaggacctttgtgctgctcctgcaaatggtggaaatgtctccaggcctccagtgaccctgcgccttgtcatccctgccagtcagtgtggctcactgattgggaaggctggcaccaagatcaaggagatccgagagactacgggtgcccaggtacaggtggcaggggacctgctccccaactccacagagcgagctgttacggtatctggggtgcctgatgccatcatcctgtgtgtgcgccagatctgcgctg

SEQ ID NO: 287130 - DNA, 563 bp, Artificial Sequence
  derived and/or modified sequence
aaacccctcattgttcgcagctgatgtcactcgcagttgtgagcggccgcctctcccggggacaatgtgggactgagcggcccagccgccgtgccgccgccgccgccgccgcaggacagccccagcgagcctttaccaggcagtggcaagacctgaccacacccgaggcctccctgccttcaaggcttcccatggctgctccagcttcctccccagctgctcttctgtgctccatccaccatctggctgctggacgaaagtgcctctcatatggaagccggccaggttgcagcgcggacacactcgcaggtcgctgtggccccagcctcgcctgacagaatgagcggctcggacgggggactggaggaggagccagagctcagcatcaccctcacgctgcggatgctgatgcacgggaaggaagtgggcagcatcatcgggaagaagggcgagactgtaaagcgaatccgggagcagagcagtgcccggatcaccatctccgagggctcctgccctgaacgcatcaccaccatcaccgggtctacagcagctgtcttccatgc

SEQ ID NO: 287131 - DNA, 539 bp, Artificial Sequence
  derived and/or modified sequence
accgccagcacgcgcctgcttcccgtctgcgcgagtccacgcagctccccaggccatttccagcacatagaagagagattggaaaccaacgtgcagaactgccagtcccctgacacgctgtgccccacccactgcagcccagtgctgaatgaaccctgcccagaggtgtctgtagtgagcttctgccctagtgacttttgagccggccaggttgcagcgcggacacactcgcaggtcgctgtggccccagcctcgcctgacagaatgagcggctcggacgggggactggaggaggagccagagctcagcatcaccctcacgctgcggatgctgatgcacgggaaggaagtgggcagcatcatcgggaagaagggcgagactgtaaagcgaatccgggagcagagcagtgcccggatcaccatctccgagggctcctgccctgaacgcatcaccaccatcaccgggtctacagcagctgtcttccatgcagtctccatgattgctttcaaactggatgaggacctttgtgctgctcctgc

SEQ ID NO: 287132 - DNA, 510 bp, Artificial Sequence
  derived and/or modified sequence
gaggaagggagattggattcccctccccacccacacatacccaggtgccaagagactcagctgtggggggaggtggagctgatgtcactcgcagttgtgagcggccgcctctcccggggacaatgtgggactgagcggcccagccgccgtgccgccgccgccgccgccgcaggacagccccagcgagagccggccaggttgcagcgcggacacactcgcaggtcgctgtggccccagcctcgcctgacagaatgagcggctcggacgggggactggaggaggagccagagctcagcatcaccctcacgctgcggatgctgatgcacgggaaggaagtgggcagcatcatcgggaagaagggcgagactgtaaagcgaatccgggagcagagcagtgcccggatcaccatctccgagggctcctgccctgaacgcatcaccaccatcaccgggtctacagcagctgtcttccatgcagtctccatgattgctttcaaactggatgaggtcc

SEQ ID NO: 287133 - DNA, 559 bp, Artificial Sequence
  derived and/or modified sequence
tttgtccaccaggccagatggagaggaagggagattggattcccctccccacccacacatacccagctgatgtcactcgcagttgtgagcggccgcctctcccggggacaatgtgggactgagcggcccagccgccgtgccgccgccgccgccgccgcaggacagccccagcgagagccggccaggttgcagcgcggacacactcgcaggtcgctgtggccccagcctcgcctgacagaatgagcggctcggacgggggactggaggaggagccagagctcagcatcaccctcacgctgcggatgctgatgcacgggaaggaagtgggcagcatcatcgggaagaagggcgagactgtaaagcgaatccgggagcagagcagtgcccggatcaccatctccgagggctcctgccctgaacgcatcaccaccatcaccgggtctacagcagctgtcttccatgcagtctccatgattgctttcaaactggatgaggacctttgtgctgctcctgcaaatggtggaaatgtctccaggcctccagtgaccctgcgccttgt

SEQ ID NO: 287134 - DNA, 141 bp, Artificial Sequence
  derived and/or modified sequence
atgtcaggctcagacgggggactggaggaagagcccgagctcagtattaccctcacgctacgcatgctgatgcacggaaaggaggtgggcagcattattggcaaaaagggtgaaacagtgaagagaattcgcgagcagtag

SEQ ID NO: 287135 - DNA, 375 bp, Artificial Sequence
  derived and/or modified sequence
atgtcagggagcgacggagggctcgaagaggaacccgagctcagcattaccctgactctgagaatgcttatgcatggcaaagaggtgggttctataatcggaaaaaagggcgagaccgtgaagcgaatcagagaacagtcttctgctagaataaccattagtgaagggagctgtcccgaaaggattaccacgatcactggaagcactgccgcagtgttccatgccgtgagtatgatcgccttcaagctcgatgaggatctgtgtgccgcaccagctaacggcggaaacgtgagtcgaccaccagtgacccttcgcctggtgataccggcaagccagtgcggcagcctgattggaaaggctggcactaagatctag

SEQ ID NO: 287136 - DNA, 507 bp, Artificial Sequence
  derived and/or modified sequence
atgtctggatcagatggagggctggaagaggaacccgagctgagcatcaccttgaccctccgcatgctgatgcatggaaaggaagttggaagtattatcggtaaaaagggtgagacagttaaacgcattagggaacagagctccgcacgaataactatcagtgagggcagctgtccagaacgcatcacaacaatcaccggctccactgccgcagtgttccacgctgtgtccatgatagcctttaaattagacgaagatctttgtgccgcaccagctaatgggggtaacgtgagccgaccgccagtgactttgcgcctggtgatcccggcttcccaatgtgggtctctaataggaaaggccggaacaaagatcaaagagatcagggagaccacaggggcacaggtgcaggttgcaggggacctcctcccaaacagtacagagagagccgtcaccgtgtcgggagtgcccgatgctattattctgtgcgtgcgacagatatgcgcctag

SEQ ID NO: 287137 - DNA, 228 bp, Artificial Sequence
  derived and/or modified sequence
atgagtggatctgacggtggcctggaggaggaacctgaactctctataacccttaccctgaggatgctgatgcatggaaaagaggtgggcagtatcattggaaaaaagggcgaaactgtgaagcggattcgtgaacaatcctccgcacgaattacaatcagcgaggggagctgccccgaacgcattactaccatcacaggcagcacggcagctgtcttccacgcctag

SEQ ID NO: 287138 - DNA, 279 bp, Artificial Sequence
  derived and/or modified sequence
atgtccggaagcgatggtgggcttgaagaggagcccgagctgagtatcacgttgacgctgaggatgttaatgcacggtaaggaggtcgggagtatcatcgggaaaaagggggaaacagtgaagaggattcgggaacaatcctccgccaggatcaccatcagcgagggctcatgtccagagcgaatcaccacaatcacagggagtacggccgctgtgttccacgcagtttccatgattgcctttaaactcgacgaggatctttgtgccgctcccgcatag

SEQ ID NO: 287139 - DNA, 261 bp, Artificial Sequence
  derived and/or modified sequence
atgtccggttcagatgggggactagaagaggagcccgaactaagcattaccctcacccttagaatgctgatgcacgggaaagaggttggttccattatcgggaagaagggcgagacagttaagagaatccgggagcagtctagtgccaggataacaattagtgaagggagctgtcccgaacgcattactaccattacggggtcgacagccgcagtcttccacgccgtgtctatgatcgcctttaagctggatgaagtttag

SEQ ID NO: 287140 - DNA, 324 bp, Artificial Sequence
  derived and/or modified sequence
atgtccggatcggatggaggccttgaagaggagcccgaacttagcataacacttacattgagaatgctgatgcatggaaaggaagtgggatctattatcggcaaaaagggagagaccgtcaaaagaatcagagaacagtcatctgccagaattaccatatccgaaggcagctgccccgagaggattaccacaatcacaggcagcactgcagccgtctttcatgcggtgtccatgatagccttcaaattggatgaggacctctgtgccgctcccgctaatgggggaaacgtgtccaggcctccagtgacgttgagactcgtctag

SEQ ID NO: 287141 - DNA, 4839 bp, Artificial Sequence
  derived and/or modified sequence
atgattgccgaacccgcgcacttttatctgtttggtctaatttgtttgtgtagcggctcccgactgagacaggaagactttccccctcggattgttgagcatccctcggatcttatagtctcaaagggcgagcccgctacacttaattgtaaagccgaaggacggcccacaccaaccattgagtggtacaagggcggggagagggtcgagaccgataaagatgaccctagatcccatcggatgcttcttccgagtggcagcctcttttttctgaggattgtgcatggtcgaaaatccagacccgacgagggggtgtatgtgtgtgtggcaaggaactatttgggtgaggcggttagccataacgctagcttggaagtggccattcttcgagacgactttagacagaaccctagtgatgtgatggtcgccgtgggagaaccagcagtgatggagtgccagccacctagaggtcaccctgaacctacaatctcatggaaaaaagatggaagcccacttgatgacaaggacgagcggatcaccatcagggggggaaagctgatgattacgtacactcgcaaatccgatgcaggcaaatacgtatgtgttggcacaaatatggttggcgagcgcgagagcgaggtcgcggagctgaccgtcctggagaggcctagttttgtcaaaagacccagcaatctcgcagtaacggtggatgacagcgctgaatttaaatgcgaagctcgtggtgacccagtccccaccgtgcgctggaggaaagatgatggcgaattgcccaagtctcgctacgagatcagggacgatcacaccctgaagattcgcaaggtgacggctggagacatggggtcctatacatgcgtcgccgagaacatggtagggaaggctgaggcgtcagccactctgacagtgcaagagcccccacactttgtcgtaaagccacgggaccaggttgtggcactgggtagaactgtgactttccaatgtgaggcaacgggcaacccacagcctgcgattttttggcgcagagaaggctcccagaacctgctgttcagctatcagcccccacagagttcttccagatttagcgtgtctcagactggcgacctcaccattaccaatgtccagaggagcgatgtagggtattacatctgtcagacactcaatgtggcaggctctatcattacaaaagcttatctggaggttaccgatgtgatcgcagaccgccccccacctgtgattagacagggacctgttaaccagaccgttgccgtggacgggacttttgtgctgtcctgtgtggccaccggatcccccgtaccaacaatcctgtggaggaaagatggggtcctggtgtcgacgcaggatagccgcattaagcagttggagaatggggtgttgcagattcgttatgcaaaacttggagatacaggtagatacacctgtattgccagcacaccaagtggcgaggcaacatggtctgcctacatcgaggtgcaggaatttggcgtgcccgtgcagccaccaaggcccactgatccaaatctgataccgtcagcaccctccaagcccgaggtgacagatgtttctcgtaacaccgtgacactctcctggcagcccaatttaaattccggagcgacacctacctcttacataatcgaagccttctcccacgctagcggttccagctggcagacagtggctgagaacgtcaagaccgagacttctgctatcaagggcttgaagcctaacgccatctatctgtttctggtcagagctgcaaacgcttacgggatcagtgacccttcccagatcagtgacccagtgaaaacccaggacgtgcttcccacgtcccagggagtggatcataagcaggtgcagcgagagctcggcaatgccgtgttacatctgcacaacccgaccgttctgtcatcctcatccatagaggtgcactggaccgtggaccagcaatcacagtatatccagggatataaaatcctgtatagaccctcaggtgccaaccacggggaaagtgattggctcgtatttgaagtacggacacctgcgaaaaacagcgtcgtgatccctgatctgaggaaaggggtaaactacgagattaaggctcgcccattcttcaacgaattccaaggagccgattcagagatcaaattcgccaagacactggaagaggctcctagcgcacccccccagggcgtgactgtttcaaaaaacgatggaaatggcacagcgatcttggttagctggcagcctcctcccgaggacacacagaacgggatggtgcaggagtataaggtctggtgtctgggcaacgaaaccagataccacattaataagactgtggatggtagcacattttcagtggtgattcctttcctggtgcctggtataaggtactccgttgaagtggccgcatcgactggcgcaggttcaggagttaagagcgaaccacaattcatccagctggatgcacacgggaatcccgtgtcccctgaggaccaggttagcctcgcacagcagatatcagacgttgtcaagcagcccgcctttattgcaggaataggagccgcatgctggattatcctcatggtattttcgatttggttgtacaggcaccgaaaaaaacgcaacggcctcaccagtacatatgccgggattaggaaggtgccttccttcacttttactcctaccgttacctatcagagaggcggtgaggccgtctctagcggggggcgacctggccttcttaacatcagcgagcctgctgcacagccttggctggccgacacttggcccaatacaggcaataaccacaacgactgcagcatctcatgttgtaccgcaggcaacggaaactcagatagcaacctgactacatacagcaggcccgctgactgcattgcaaattataataaccaactggataacaagcagaccaacctcatgctgcccgagtccactgtttatggcgacgtggatctctctaataagataaacgaaatgaaaacatttaatagtcccaacctgaaagacgggcgttttgtcaaccccagcggccaaccgaccccttatgcgaccactcaactcatccagtctaatctgagcaacaacatgaataacggatctggagatagtggagaaaagcactggaaaccactgggacagcagaaacaggaagtggctcctgtacagtacaatatcgttgagcaaaataagttaaataaggattacagagccaatgatacagtcccaccaacaatcccctacaatcagtcgtacgaccagaatactggcggatcgtataatagtagcgaccgcggctctagcaccagcggatcgcagggacacaagaagggcgcccggacaccgaaagtgcccaagcaaggcggaatgaactgggcggacctcctccctccaccaccagctcacccgccacctcactctaattccgaggaatacaatattagtgttgacgaatcgtacgaccaggagatgccatgccctgtgccccctgcgcgcatgtacctacagcaagatgagctcgaggaggaagaggatgaacgcggcccaacgcctccagttcggggagccgcaagctcgccagccgccgtatcctattcacatcagagcactgccacccttacgccgtccccacaagaggaactgcagcccatgctccaggactgcccggaagagaccggacatatgcagcatcagcccgacagaaggcgccagcccgttagcccccctccacccccacgacccatttcgcctccccatacctatggttacatcagcgggccccttgtgagcgatatggatactgatgccccagaagaggaggaggacgaggctgacatggaggtagccaaaatgcagacacggcgactgctgctgagaggcttagagcaaactcccgcttcatctgttggtgacctggaatccagtgtgacaggttccatgataaacggctgggggtccgccagcgaggaagataatatctcatcgggacggagctcagtaagtagttccgacggctcttttttcaccgatgctgacttcgcccaagccgtcgctgcggccgcggagtatgccggtttaaaggtggcacggaggcagatgcaggacgctgcaggcagacgccactttcacgcgagtcaatgtccgcgtcctacctctccagtgagcacggactccaacatgtctgctgcagtcatgcagaagacgcgaccagcaaaaaagctcaaacaccagccgggccatctccgtcgggagacatatacggacgaccttccgcctcctcccgttccgccccccgcaatcaagtcgcccaccgcacagagcaagacccagttggaggtccgacccgttgtggtgccaaagctccctagcatggatgcgcgcaccgatcgcagctccgatcggaagggttcttcatataaagggagggaagtgctggatgggaggcaggtggttgacatgcggactaaccctggagatcccagagaagctcaggaacagcagaacgacggtaagggccgggggaacaaagccgcgaagagggaccttcctcccgcaaaaacccatttaatccaagaggatatcctgccttattgtagaccaacctttccaaccagtaacaacccccgggaccctagctcctcgtcctccatgagctcccggggttccggatctcgccagagggaacaagccaacgttgggcgcagaaatattgccgagatgcaggtcctcggcggatatgaacgtggtgaggataataatgaagagctggaagagacggagtcgtag

SEQ ID NO: 287142 - DNA, 4839 bp, Artificial Sequence
  derived and/or modified sequence
atgattgctgagcccgcccacttctacctgtttggcctcatctgcctgtgcagcggcagccggctgcggcaggaggacttccccccaagaattgtggagcaccccagcgacctgattgtgtccaagggggagcccgccaccctgaactgcaaggccgagggccggcccacccccaccatcgagtggtacaagggcggggagcgggtggagacagacaaggatgaccccaggagccacaggatgctgctgcccagcggcagcctcttcttcctgagaattgtgcacggcaggaagagcaggccagatgagggcgtgtatgtgtgtgtggccaggaactacctgggggaggccgtgagccacaatgccagcctggaggtggccatcctgagagatgacttccggcagaaccccagtgatgtgatggtggccgtgggggagcctgctgtgatggagtgccagcccccccggggccaccctgagcccaccatctcctggaagaaggatggcagccccctggatgacaaggatgagcgcatcaccatccggggcggcaagctgatgatcacctacaccaggaagagtgatgctgggaagtatgtgtgtgtgggcaccaacatggtgggggagcgggagagcgaggtggccgagctgactgtgctggagcggcccagctttgtgaagaggcccagcaacctggccgtgacagtggatgattctgctgagttcaagtgtgaggcccggggggaccctgtgcccaccgtgcgctggaggaaggatgatggagagctgcccaagagccgctatgagatcagagatgaccacaccctgaagatcaggaaggtgacagctggggacatgggcagctacacctgtgtggccgagaacatggtgggcaaggccgaggccagcgccaccctgactgtgcaggagcccccccactttgtggtgaagccccgggaccaggtggtggccctgggccgcacagtgaccttccagtgtgaggccaccggcaacccccagcctgccatcttctggaggcgggagggcagccagaacctgctcttctcctaccagcccccccagagcagcagccgcttctctgtgtcccagacaggagacctgaccatcaccaacgtgcagaggagtgatgtgggctactacatctgccagaccctgaatgtggccggcagcatcatcaccaaggcctacctggaggtgacagatgtgattgctgaccggcccccacctgtgatccggcagggccctgtgaaccagacagtggccgtggatggcacctttgtgctgagctgtgtggccaccggcagccctgtgcccaccatcctgtggaggaaggatggagtgctggtgtccacccaggacagccgcatcaagcagctggagaatggagtgctgcagatccgctatgccaagctgggggacaccggccgctacacctgcatcgccagcacccccagcggggaggccacctggagcgcctacatcgaggtgcaggagtttggagtgcctgtgcagcccccccggcccacagaccccaacctgatccccagcgcccccagcaagccagaggtgacagatgtgtccaggaacacagtgaccctgtcctggcagcccaacctgaacagcggggccacccccaccagctacatcatcgaggccttcagccacgccagcggcagctcctggcagacagtggctgaaaatgtgaagacagagaccagcgccatcaagggcctgaagcccaatgccatctacctgttcctggtgcgggccgccaatgcctacggcatcagtgaccccagccagatcagtgaccctgtgaagacccaggatgtgctgcccaccagccagggcgtggaccacaagcaggtgcagcgggagctgggcaatgctgtgctgcacctgcacaaccccaccgtgctgagcagcagcagcattgaggtgcactggacagtggaccagcagagccagtacatccagggctacaagatcctgtaccggcccagcggggccaaccacggggagagtgactggctggtgtttgaggtgaggaccccagccaagaacagcgtggtgatcccagacctgaggaagggcgtgaactatgagatcaaggcccggcccttcttcaatgagttccagggcgctgacagcgagatcaagtttgccaagaccctggaggaggcccccagcgccccaccccagggcgtgacagtgtccaagaatgatggaaatggaacagccatcctggtgtcctggcagcccccacctgaggacacccagaatggcatggtgcaggagtacaaggtgtggtgcctgggcaatgagacccgctaccacatcaacaagacagtggatggcagcaccttctctgtggtgatccccttcctggtgcccggcatccgctacagcgtggaggtggccgccagcactggagctggcagcggcgtgaagtctgagccccagttcatccagctggatgcccacggcaaccctgtgtccccagaggaccaggtgtccctggcccagcagatcagtgatgtggtgaagcagcctgccttcatcgccggcatcggggccgcctgctggatcatcctgatggtgttcagcatctggctgtaccgccacaggaagaagagaaatggcctgaccagcacctacgccggcatcaggaaggtgcccagcttcaccttcacccccaccgtgacctaccagagaggaggagaggccgtgtcctctgggggccggcccggcctgctgaacatcagcgagcctgctgcccagccctggctggccgacacctggcccaacacaggcaacaaccacaatgactgcagcatcagctgctgcacagctggaaatggaaacagcgacagcaacctgaccacctacagcaggcctgctgactgcatcgccaactacaacaaccagctggacaacaagcagaccaacctgatgctgcctgagagcacagtgtatggagatgtggacctgagcaacaagatcaatgagatgaagaccttcaacagccccaacctgaaggatggccgctttgtgaaccccagcggccagcccaccccctatgccaccacccagctgatccagagcaacctgagcaacaacatgaacaacggcagcggggacagcggggagaagcactggaagcccctgggccagcagaagcaggaggtggcccctgtgcagtacaacatcgtggagcagaacaagctgaacaaggactaccgggccaatgacacagtgccccccaccatcccctacaaccagagctatgaccagaacacaggaggcagctacaacagcagtgaccggggcagcagcaccagcggcagccagggccacaagaagggggcccggacccccaaggtgcccaagcagggcggcatgaactgggccgacctgctgcccccacctccagcccaccccccaccccacagcaacagcgaggagtacaacatctctgtggatgagagctatgaccaggagatgccctgccctgtgcccccagccaggatgtacctgcagcaggatgagctggaggaggaggaggatgagcggggccccaccccacctgtgagaggagctgccagcagccctgctgctgtgtcctacagccaccagagcacagccaccctgacccccagcccccaggaggagctgcagcccatgctgcaggactgcccagaggagaccggccacatgcagcaccagcctgacagaagacggcagcctgtgtccccacctcctccaccccggcccatcagccccccccacacctacggctacatcagcggccccctggtgtctgacatggacacagatgcccctgaggaggaggaggatgaagctgacatggaggtggccaagatgcagacccggcggctgctgctgcggggcctggagcagaccccagccagctctgtgggggacctggagagctctgtgacaggctccatgatcaatggctggggcagcgccagcgaggaggacaacatcagcagcggccgcagctctgtgagcagcagtgatggcagcttcttcacagatgctgactttgcccaggccgtggccgctgctgctgaatatgccggcctgaaggtggcccggcggcagatgcaggatgctgctggccgccgccacttccacgccagccagtgcccccggcccaccagccctgtgtccacagacagcaacatgtctgctgctgtgatgcagaagaccaggcctgccaagaagctgaagcaccagcccggccacctgcggcgggagacctacacagatgacctgcccccacctcctgtgcccccaccagccatcaagagccccacagcccagagcaagacccagctggaggtgcggcctgtggtggtgcccaagctgcccagcatggatgccaggacagacaggagcagtgacaggaagggcagcagctacaagggccgggaggtgctggatggccggcaggtggtggacatgaggaccaaccctggggacccccgggaggcccaggagcagcagaatgatggcaagggccggggcaacaaggccgccaagagggacctgcccccagccaagacccacctgatccaggaggacatcctgccctactgccggcccaccttccccaccagcaacaacccccgggaccccagcagcagcagctccatgagcagccggggcagcggcagccggcagcgggagcaggccaacgtgggcagaagaaatattgctgagatgcaggtgctgggcggctatgaaagaggagaggacaacaatgaggagctggaggagacagagagctag

SEQ ID NO: 287143 - DNA, 4839 bp, Artificial Sequence
  derived and/or modified sequence
atgatcgccgagcccgcccacttctacctgttcggcctgatctgcctctgttcaggctcccgattgcgtcaggaagattttccaccgcgcattgtcgagcatccatctgatctgatagtctctaagggcgaacctgctacactgaattgtaaggctgaaggccgccccacacccaccattgagtggtacaaagggggggaacgcgtcgagactgataaggacgatccgaggagtcacaggatgctgctgcctagcggcagtctgttctttctgaggattgtgcacggcaggaaatcacggcccgacgagggagtgtacgtgtgtgtcgcgagaaactacctaggtgaggctgtctcccacaatgcgtcactcgaggtcgcgatactgcgcgatgacttccggcagaatccgagtgatgtgatggtcgcagtcggcgagcctgccgttatggaatgccagcctccgcggggacaccccgaacccacaatctcctggaagaaggatggctctcctctggatgacaaggatgagcgcataacaattcgtggtgggaagcttatgattacatatacaaggaaaagcgacgctggcaagtacgtatgtgtcggcactaatatggtcggggagagggagtcagaagtggctgagcttactgtgttagaacgcccgagttttgtgaagcgcccgtctaacctggcagttaccgttgatgattcagcagagtttaagtgtgaagcccgaggggaccccgttccgaccgtgaggtggagaaaagacgacggcgaactgccaaaatcccgctatgagatacgcgatgatcatacgctgaagatcaggaaagtaactgccggtgacatgggcagctatacgtgcgttgcagagaatatggttgggaaggcagaggctagtgctacactgactgtccaggaaccccctcacttcgtcgtaaagcccagagatcaggttgtcgccctggggagaaccgttacatttcagtgcgaagcaacaggtaatccccagcctgctatcttttggcggcgggaaggaagccagaatctgttgtttagctaccagcccccgcaatccagtagccggttctctgttagccagaccggcgatctcacgattaccaacgttcagcgaagcgacgttgggtactacatctgccagactttgaatgttgccggcagcataatcactaaggcctacctcgaggtcactgatgtgatcgccgatcggccccctcccgtgatccggcaaggacctgttaaccaaaccgtggcagttgacggaacttttgtgctgtcctgcgtggcaactggtagccctgtgcctacgatcctgtggcggaaggatggcgtgctggtgtcgactcaagatagtcggatcaagcagctcgaaaacggtgtgctgcagattcgatatgccaaactgggggacaccggaaggtacacttgtatagcctctaccccctctggagaagctacttggtcagcatacattgaggtccaagagtttggtgtgccagtacagccacctaggcctacagatccgaatttaattccaagcgctccttccaaacctgaggtgacagacgtatctcggaacacagttacattgagctggcagccgaacttgaattctggcgccactcccacttcctatattatcgaagcttttagccacgcttctgggagctcgtggcagaccgtggccgaaaacgtgaagacggagaccagtgcaattaaaggattgaaacctaacgcaatctatctgttcctcgtgagggctgctaatgcctacggtatctccgacccaagccagatctcagatccagttaagacacaagacgtgcttccaactagccagggggtggaccacaagcaagtccagagggagcttggaaacgccgttttgcacctgcacaaccccaccgttctgtcctccagttcgatcgaagtgcactggactgtggaccaacagtcacagtacatccaaggctataagattctgtataggccctccggggctaaccatggagaatctgactggctcgtgtttgaggttaggacacctgccaagaactccgtcgtaatacctgatctgcgcaagggtgtgaactacgaaataaaggcacgaccgttctttaacgagtttcagggagccgacagcgaaatcaagttcgcaaagacacttgaggaggcacccagcgccccccctcagggagtgaccgtgtccaaaaacgacggaaacggcactgccatcctcgtgtcatggcagccgccgcctgaggatactcagaacggaatggttcaagagtacaaggtctggtgtctgggtaacgagacccggtatcacatcaataagaccgtcgatggctctactttttccgtggttatcccattcctagtgcccggcattaggtattctgttgaagtagctgcatccactggcgcaggctccggtgtgaaatctgaaccacaattcatccagcttgacgcgcatgggaaccctgtgtcacccgaagaccaggtaagtctcgcgcagcagattagcgacgtggttaaacagcccgccttcatcgctggcattggggccgcctgctggatcattctgatggttttctccatctggctatatcgacaccggaagaagcggaatggccttacctctacatacgccggtattaggaaagtgccaagctttaccttcactcctactgtgacataccagaggggaggagaggctgtcagcagtggtggcaggcctggactcttgaatatctcggagcccgcagctcagccctggttggcagacacctggccgaatacagggaacaatcacaatgattgcagcatttcttgctgtacagccggaaatggtaatagcgactcaaacctgactacgtacagtcgacccgcagactgcatcgcgaattataataatcagctggacaataagcagaccaacctgatgcttcccgaaagcactgtgtatggtgacgtcgatctatctaataaaataaatgaaatgaaaacatttaactctcctaatctgaaggacgggcggtttgtcaacccatccggacagcctacaccttatgctactacacagctgatccagtccaacctgtcgaataacatgaataatggaagcggcgatagcggcgaaaaacattggaagcccctaggccagcaaaagcaggaagttgctccagtgcaatataatatcgtggaacagaataagcttaacaaagactacagagccaacgatactgtgccacctaccataccatataaccagtcctatgaccagaatacgggtggctcctacaactctagtgataggggtagctcaacctcagggtcccagggacacaaaaagggggccaggacccctaaggtgcccaagcaaggcggtatgaattgggctgacttactgcctcccccaccggctcatcctcccccacatagtaactcagaggagtacaacatcagtgtggacgagtcttacgatcaggaaatgccctgccctgtccctccggcccggatgtatttgcagcaggacgaactggaggaggaggaggacgaacggggcccaacgcctccagtcagaggcgccgccagctccccagccgctgttagttacagccaccagtcgactgctaccttaaccccctcccctcaagaggagctccaacctatgttacaagattgtcccgaggagactggtcacatgcaacaccagcctgacagaagaaggcagccagtgagtccaccgccacccccccgacctattagcccccctcatacatatgggtacatttccggtccactagtcagcgatatggacactgatgcacccgaggaggaggaagatgaggctgatatggaagtggcaaagatgcaaaccaggcggctgctcttacgcggtctggagcagacccccgccagctccgtgggggatttagaaagctctgtgacggggtcaatgattaatggctgggggtcagcctcagaagaggataatatttcttccgggcgatcctccgtttcaagctccgatgggtcatttttcacagatgccgatttcgcccaggcggttgcagctgcagccgagtacgctgggcttaaagttgcccgacggcagatgcaggacgctgcgggtagacgccacttccacgcatcacagtgtccccggccgaccagtcccgtgagcactgactccaacatgagcgccgccgtcatgcaaaagacccgtccggccaagaaactgaagcatcagcccggacacttgcgacgagagacgtacacagatgatctgccaccgccccctgtgccacctcctgccatcaagtcacccaccgcccagagcaaaacacagctcgaggttagacctgtcgtcgtacctaagctgccctctatggatgccagaacagataggtcaagcgatagaaagggctcctcctacaaaggacgggaggtgctcgatggccgacaggttgttgacatgaggacgaatcctggtgatccacgcgaagcccaagaacaacaaaacgacggtaagggtcgcgggaataaagcagccaagagagacctccctcctgcgaaaactcacctcatccaggaagatatcctcccttattgccggccgaccttcccgacaagtaataatccaagggacccttcatctagcagtagtatgagctccagaggatccggctctcggcaacgggagcaggccaacgttggaaggaggaacatcgccgagatgcaggtgttaggcgggtacgaacgcggagaggataataatgaggagttagaggagaccgagtcctag

SEQ ID NO: 287144 - DNA, 4838 bp, Artificial Sequence
  derived and/or modified sequence
atgatcgccgaaccagcccacttctatctctttgggctcatctgtctctgctcaggctcacgactgcgccaggaggactttccgcctcgcatcgtggaacaccctagtgatctgatcgtgagcaagggcgaacctgcaactctgaattgcaaagcggagggccgacccactcccacaatcgaatggtataagggaggggagcgagtggagaccgataaagacgacccacgcagtcatcgtatgctcctgcctagtgggagtctttttttcttaaggatcgtgcacggacgtaagtccagacctgacgagggagtctacgtctgtgtggcaagaaattacttaggcgaggcagtaagtcataacgcaagtctggaagtcgcaatactgcgtgacgactttaggcagaatcctagcgacgtgatggtcgccgtaggcgagccagcggtgatggaatgccaacctcctcggggtcacccagagccaacgatcagttggaagaaggacggaagtcctttagacgataaggatgaacgaattaccatcaggggaggcaaactcatgattacttatacccggaagtctgatgccggaaaatacgtgtgcgtcgggaccaacatggtgggtgaacgggagtctgaagtggcagaactcaccgttttggagcgcccttcctttgtcaagcgcccttctaatttagcggtcactgtggacgatagcgctgaattcaaatgcgaggccagaggcgacccagtgcccaccgtgcgctggcgaaaagatgacggcgaactgcccaaatccagatacgaaatccgggacgaccacacgcttaagattcgcaaagtgactgcaggagacatgggaagctacacatgcgtggctgaaaacatggttggcaaagctgaggcctccgctactctgactgttcaagagcccccacacttcgttgtgaagccgcgtgaccaggtggtcgccctcggacgcactgttaccttccagtgcgaagccaccgggaaccctcagcccgcaatcttttggcggagggaaggcagccagaatctgttattttcttatcagccacctcagagctcctctaggttcagtgtgtctcagactggagacctcacaatcaccaatgtgcagaggtccgatgtcggttactacatctgtcagactttgaatgtcgccggatcgattatcaccaaagcatacctggaagtgaccgatgtcattgccgataggcccccacccgtgatacgccagggcccagtcaatcagactgttgcagtggatggtacatttgtgctctcttgcgttgccacagggtcaccagttccgaccattctgtggcggaaagatggtgttctcgtctccacgcaggactcccggataaagcagctggagaatggagttttacaaattcgttatgccaagttgggtgacaccgggcgttacacctgcatagcctcgacgccctctggcgaggccacctggtctgcgtatatcgaagtccaggaatttggcgtacccgtccagcccccacgccctaccgatcccaacctgattccctctgcgccatctaagccagaagtaacagatgtgtctcggaacacggtgacactctcttggcaaccgaatctgaatagcggagccacaccaacctcatatatcattgaagcatttagccatgcttcagggagctcatggcagacagtggcggaaaacgtgaaaaccgagacctcggccattaagggactgaagcccaacgctatttatcttttcttggttcgcgctgcgaacgcatacggaatcagcgacccttctcagatctcagacccagtcaaaacacaggatgtgctgcccacaagccagggggtcgatcataagcaggtgcagcgcgaacttgggaacgccgttcttcacttgcacaaccctacagtgctgagctccagctcgatcgaagtccattggacagtggatcagcagagccaatacattcagggatataagatcctctatcggccttctggcgcaaaccacggagagagtgactggctggtgtttgaagttcggactcccgctaaaaactctgtagttatccctgacctgcgcaaaggagtgaactacgagatcaaggcccgtccctttttcaatgagtttcagggcgcagattctgagataaaatttgctaaaactctggaggaggcaccgagtgcaccaccgcagggcgtaacggtatcgaagaatgacggcaatggaactgccattttggtgagctggcaacccccacctgaggatactcagaatggaatggtgcaggaatacaaagtctggtgtctgggtaacgaaactcgctaccacatcaataaaaccgtcgatggctccacattttcagtggtgatccctttcttggtgcccggtattcgctactccgtggaagtcgccgcatccacaggggctggatctggcgtgaaaagtgagcctcagttcattcagcttgacgctcatggcaaccccgtctcaccagaagaccaggtgagtctcgcccagcagatctccgatgttgttaaacagccggctttcattgctgggataggggcagcatgctggatcatacttatggtgtttagtatatggttataccgccatcgtaaaaagcgcaacggcctgactagcacctacgccggtatcaggaaggtaccatcctttacttttactcccacagtgacatatcagaggggtggtgaggcggtgtcaagcggcggtcgccctggcctgctaaacatcagtgagccagcggctcagccctggctggcggacacctggccgaacacaggcaacaatcacaacgactgcagcatctcctgttgtacggccggaaacggcaattcggactctaatttgacaacctatagcagacccgctgactgtattgcaaactataataaccaactggataataaacagaccaacctcatgttacctgaatctacagtgtacggtgacgtcgacctcagcaataaaatcaacgaaatgaaaaccttcaatagccctaatttgaaggatggcaggtttgtcaatcctagcggtcagcccactccatatgctaccacgcaactcattcagtctaacctcagcaataacatgaataatggcagtggtgactcaggggagaagcactggaaaccgctagggcagcagaagcaggaagtcgcccctgtgcaatacaatatcgtggaacagaataaactgaacaaggattaccgtgccaacgataccgtgcccccaacgattccttataaccagtcatacgatcagaataccgggggaagctacaacagttccgacaggggtagttccacatcagggagccagggccataagaaaggcgcaaggacaccgaaagtacccaaacaagggggtatgaactgggcggatttgttgccgccaccgcctgcccatcccccaccgcattctaactccgaagagtacaatataagcgtcgacgaaagctatgatcaagagatgccttgccccgtgccacctgccagaatgtacttacagcaggatgagctggaggaagaggaagacgagagaggccctacgcctcccgtccggggtgcagcctcttctcctgcagccgttagttatagtcaccagagtacagcaaccctaaccccatctccccaagaagagctgcagcccatgctgcaagattgccctgaggagaccggccacatgcaacaccagccagaccggaggaggcaaccagtgtcccccccacctcctcccaggcccatttcgccccctcacacttatggttatattagtgggccactggtctctgacatggacacagacgcccctgaggaagaggaggacgaagcggacatggaagtggcaaagatgcagactcgccgtctcttactgagaggtctggagcaaacgcccgcttcctcagttggggaccttgaatctagtgtcacaggatcaatgatcaatggatggggatcagcatcggaggaggataatatcagctccgggaggtcctctgtgagcagcagtgatggctctttcttcactgatgcggatttcgcccaagctgttgcagccgctgccgaatacgccggattaaaagttgccagaaggcaaatgcaggacgccgcaggcagaaggcacttccatgccagtcaatgcccacggccaaccagccctgtgagtaccgactccaacatgtcggctgcggtcatgcagaaaactcgtcctgccaagaagctcaagcaccagccaggccatctacgccgagagacttacactgacgatttaccaccaccacccgtgccaccccctgcaatcaagagtcccacagcccagtctaagacacaactggaagttcgtcccgtggtcgtgcctaaactgccctctatggatgccagaactgacaggtctagcgatagaaagggatcatcttataaaggcagggaggtcctcgacgggagacaggtggttgacatgaggacaaaccctggggaccctcgggaagcacaggagcagcaaaatgatgggaaagggagagggaataaagcagccaagagggatctgccaccagcaaagactcaccttatccaggaggatatcctcccctactgccgtccaacatttcctacgtccaataacccacgggatcccagctcttcctcgtcaatgtcatctcgagggagcggaagtcgacagagggaacaagccaacgtggggaggcggaacatcgctgagatgcaggttctcggaggctacgaacggggtgaagataacaatgaggagcttgaagaaacagaatccta

SEQ ID NO: 287145 - DNA, 7510 bp, Artificial Sequence
  derived and/or modified sequence
aattgagctggagaggaggcagcgtgagagcagaaacttcagacgccgctgatccgggaggagctggggtgagccgcggcggccgtctctcccacccgcagcagcatcctctctgcccttctctgccaccccggggagagccgggagctgcctctttacagcttccacgagccaggggtgcaggcagctgcccccaggaagtttgggcttctgcgtagtttaggggtgcctgcgagcgccccagagggcgaggggccgagggcgatgttgggcgccgcgcggggctgggggcgcccagaagacgtgcgagtgtccgcggtcctgctgctgtctccagtaccctccgcatcccccaagtgatgggaacaagggcccgcccaggcagccgctgtcgccgcaccgccccctcgctcgctctctgcgcgcggagtcacccagtcacactcccggcaccccgagcccttcctccggagctgctgcttctactttggctgctatcgccgccgccgcgggtggcccgctgctgactgggctcgccgggagacggagaagcactttttggccctccctcagcagctctcacaccccaactttgccgccgccgccgcgcctgccctcgcagcggcgctcggccgcacattgtgggggcgcacgccgggaggctccgcaagaccgtggaggcaggaaacggcactactgcgcttctgcctcggctctttgttgttcgctttggatggttcttgaaagtgtctgagcctcctcggaaatcctggggccggagaagacaaaccttggaattcttcctctgcaaaagtctctgagatactgacaagcgtccggaaaggtcgacgagtaattgccctgaaaactcttggctaattgacccacgttgcttatattaagcctttgtgtgtggtgtgtggcttcatacatttggggaccctatttccactccctcctcttggcatgagactgtatacaggatccacccgaggacaatgattgcggagcccgctcacttttacctgtttggattaatatgtctctgttcaggctcccgtcttcgtcaggaagattttccacctcgcattgttgaacacccttcagacctgattgtctcaaaaggagaacctgcaactttgaactgcaaagctgaaggccgccccacacccactattgaatggtacaaagggggagagagagtggagacagacaaagatgaccctcgctcacaccgaatgttgctgccgagtggatctttatttttcttacgtatagtacatggacggaaaagtagacctgatgaaggagtctatgtctgtgtagcaaggaattaccttggagaggctgtgagccacaatgcatcgctggaagtagccatacttcgggatgacttcagacaaaacccttcggatgtcatggttgcagtaggagagcctgcagtaatggaatgccaacctccacgaggccatcctgagcccaccatttcatggaagaaagatggctctccactggatgataaagatgaaagaataactatacgaggaggaaagctcatgatcacttacacccgtaaaagtgacgctggcaaatatgtttgtgttggtaccaatatggttggggaacgtgagagtgaagtagccgagctgactgtcttagagagaccatcatttgtgaagagacccagtaacttggcagtaactgtggatgacagtgcagaatttaaatgtgaggcccgaggtgaccctgtacctacagtacgatggaggaaagatgatggagagctgcccaaatccagatatgaaatccgagatgatcataccttgaaaattaggaaggtgacagctggtgacatgggttcatacacttgtgttgcagaaaatatggtgggcaaagctgaagcatctgctactctgactgttcaagaacctccacattttgttgtgaaaccccgtgaccaggttgttgctttgggacggactgtaacttttcagtgtgaagcaaccggaaatcctcaaccagctattttctggaggagagaagggagtcagaatctacttttctcatatcaaccaccacagtcatccagccgattttcagtctcccagactggcgacctcacaattactaatgtccagcgatctgatgttggttattacatctgccagactttaaatgttgctggaagcatcatcacaaaggcatatttggaagttacagatgtgattgcagatcggcctcccccagttattcgacaaggtcctgtgaatcagactgtagccgtggatggcactttcgtcctcagctgtgtggccacaggcagtccagtgcccaccattctgtggagaaaggatggagtcctcgtttcaacccaagactctcgaatcaaacagttggagaatggagtactgcagatccgatatgctaagctgggtgatactggtcggtacacctgcattgcatcaacccccagtggtgaagcaacatggagtgcttacattgaagttcaagaatttggagttccagttcagcctccaagacctactgacccaaatttaatccctagtgccccatcaaaacctgaagtgacagatgtcagcagaaatacagtcacattatcgtggcaaccaaatttgaattcaggagcaactccaacatcttatattatagaagccttcagccatgcatctggtagcagctggcagaccgtagcagagaatgtgaaaacagaaacatctgccattaaaggactcaaacctaatgcaatttaccttttccttgtgagggcagctaatgcatatggaattagtgatccaagccaaatatcagatccagtgaaaacacaagatgtcctaccaacaagtcagggggtggaccacaagcaggtccagagagagctgggaaatgctgttctgcacctccacaaccccaccgtcctttcttcctcttccatcgaagtgcactggacagtagatcaacagtctcagtatatacaaggatataaaattctctatcggccatctggagccaaccacggagaatcagactggttagtttttgaagtgaggacgccagccaaaaacagtgtggtaatccctgatctcagaaagggagtcaactatgaaattaaggctcgccctttttttaatgaatttcaaggagcagatagtgaaatcaagtttgccaaaaccctggaagaagcacccagtgccccaccccaaggtgtaactgtatccaagaatgatggaaacggaactgcaattctagttagttggcagccacctccagaagacactcaaaatggaatggtccaagagtataaggtttggtgtctgggcaatgaaactcgataccacatcaacaaaacagtggatggttccaccttttccgtggtcattccctttcttgttcctggaatccgatacagtgtggaagtggcagccagcactggggctgggtctggggtaaagagtgagcctcagttcatccagctggatgcccatggaaaccctgtgtcacctgaggaccaagtcagcctcgctcagcagatttcagatgtggtgaagcagccggccttcatagcaggtattggagcagcctgttggatcatcctcatggtcttcagcatctggctttatcgacaccgcaagaagagaaacggacttactagtacctacgcgggtatcagaaaagtcccgtcttttaccttcacaccaacagtaacttaccagagaggaggcgaagctgtcagcagtggagggaggcctggacttctcaacatcagtgaacctgccgcgcagccatggctggcagacacgtggcctaatactggcaacaaccacaatgactgctccatcagctgctgcacggcaggcaatggaaacagcgacagcaacctcactacctacagtcgcccagctgattgtatagcaaattataacaaccaactggataacaaacaaacaaatctgatgctccctgagtcaactgtttatggtgatgtggaccttagtaacaaaatcaatgagatgaaaaccttcaatagcccaaatctgaaggatgggcgttttgtcaatccatcagggcagcctactccttacgccaccactcagctcatccagtcaaacctcagcaacaacatgaacaatggcagcggggactctggcgagaagcactggaaaccactgggacagcagaaacaagaagtggcaccagttcagtacaacatcgtggagcaaaacaagctgaacaaagattatcgagcaaatgacacagttcctccaactatcccatacaaccaatcatacgaccagaacacaggaggatcctacaacagctcagaccggggcagtagtacatctgggagtcaggggcacaagaaaggggcaagaacacccaaggtaccaaaacagggtggcatgaactgggcagacctgcttcctcctcccccagcacatcctcctccacacagcaatagcgaagagtacaacatttctgtagatgaaagctatgaccaagaaatgccatgtcccgtgccaccagcaaggatgtatttgcaacaagatgaattagaagaggaggaagatgaacgaggccccactccccctgttcggggagcagcttcttctccagctgccgtgtcctatagccatcagtccactgccactctgactccctccccacaggaagaactccagcccatgttacaggattgtccagaggagactggccacatgcagcaccagcccgacaggagacggcagcctgtgagtcctcctccaccaccacggccgatctcccctccacatacctatggctacatttcaggacccctggtctcagatatggatacggatgcgccagaagaggaagaagacgaagccgacatggaggtagccaagatgcaaaccagaaggcttttgttacgtgggcttgagcagacacctgcctccagtgttggggacctggagagctctgtcacggggtccatgatcaacggctggggctcagcctcagaggaggacaacatttccagcggacgctccagtgttagttcttcggacggctcctttttcactgatgctgactttgcccaggcagtcgcagcagcggcagagtatgctggtctgaaagtagcacgacggcaaatgcaggatgctgctggccgtcgacattttcatgcgtctcagtgccctaggcccacaagtcccgtgtctacagacagcaacatgagtgccgccgtaatgcagaaaaccagaccagccaagaaactgaaacaccagccaggacatctgcgcagagaaacctacacagatgatcttccaccacctcctgtgccgccacctgctataaagtcacctactgcccaatccaagacacagctggaagtacgacctgtagtggtgccaaaactcccttctatggatgcaagaacagacagatcatcagacagaaaaggaagcagttacaaggggagagaagtgttggatggaagacaggttgttgacatgcgaacaaatccaggtgatcccagagaagcacaggaacagcaaaatgacgggaaaggacgtggaaacaaggcagcaaaacgagaccttccaccagcaaagactcatctcatccaagaggatattctaccttattgtagacctacttttccaacatcaaataatcccagagatcccagttcctcaagctcaatgtcatcaagaggatcaggaagcagacaaagagaacaagcaaatgtaggtcgaagaaatattgcagaaatgcaggtacttggaggatatgaaagaggagaagataataatgaagaattagaggaaactgaaagctgaagacaaccaagaggcttatgagatctaatgtgaaaatcatcactcaagatgcctcctgtcagatgacacatgacgccagataaaatgttcagtgcaatcagagtgtacaaattgtcgtttttattcctcttattgggatatcattttaaaaactttattgggtttttattgttgttgtttgatccctaaccctacaaagagccttcctattcccctcgctgttggagcaaaccattataccttacttccagcaagcaaagtgctttgacttcttgcttcagtcatcagccagcaagagggaacaaaactgttcttttgcattttgccgctgagatatggcattgcactgcttatatgccaagctaatttatagcaagatattgatcaaatatagaaagttgatattcaacctcacaagggctctcaaagtataatctttctatagccaactgctaatgcaaattaaaacatatttcattttaacatgatttcaaaatcagtttttcatactaccctttgctggaagaaactaaaaatatagcaaatgcagaaccacaaacaattcgaatggggtagaaacattgtaaatatttactctttgcaaaccctggtggtattttattttggcttcatttcaatcattgaagtatattcttattggaaatgtacttttggataagtagggctaagccagttggatctctggttgtctagtcattgtcataagtaaacctagtaaaaccttgttctatttttcaatcatcaaaaagtaattataaatacgtattacaaacaagtggatgtttttaatgaccaattgagtaagaacatccctgtcttaactggcctaaatttcttctggtagtgtcagttcaactttcagaagtgccacttaaggaagtttgatttttgtttttgtaatgcactgtttttaatctctctctctttttttttttttttttggttttaaaagcacaatcactaaactttatttgtaaaccattgtaactattaaccttttttgtcttattgaaaaaaaaaatgttgagaagcgtttttaacctgttttgttaatgctctatgtttgtatttggaatatttgaataatgacagatggtgaagtaacatgcatactttattgtgggccatgaaccaaatggttcttacttttcctggacttaaagaaaaaaagaggtttaagtttgttgtggccaatgtcgaaacctacaagatttccttaaaatctctaatagaggcattacttgctttcaattgacaaatgatgccctctgactagtagatttctatgatccttttttgtcattttatgaatatcattgattttataattggtgctatttgaagaaaaaaatgtacatttattcatagatagataagtatcaggtctgaccccagtggaaaacaaagccaaacaaaactgaaccacaaaaaaaaaggctggtgttcaccaaaaccaaacttgttcatttagataatttgaaaaagttccatagaaaaggcgtgcagtactaagggaacaatccatgtgattaatgttttcattatgttcatgtaagaagccccttatttttagccataattttgcatactgaaaatccaataatcagaaaagtaattttgtcacattatttattaaaaatgttctcaaatac

SEQ ID NO: 287146 - DNA, 4839 bp, Artificial Sequence
  derived and/or modified sequence
atgatcgccgagcccgcccacttctacctgttcggcctgatctgcctgtgcagcggcagcagactgagacaggaggacttcccccccagaatcgtggagcaccccagcgacctgatcgtgagcaagggcgagcccgccaccctgaactgcaaggccgagggcagacccacccccaccatcgagtggtacaagggcggcgagagagtggagaccgacaaggacgaccccagaagccacagaatgctgctgcccagcggcagcctgttcttcctgagaatcgtgcacggcagaaagagcagacccgacgagggcgtgtacgtgtgcgtggccagaaactacctgggcgaggccgtgagccacaacgccagcctggaggtggccatcctgagagacgacttcagacagaaccccagcgacgtgatggtggccgtgggcgagcccgccgtgatggagtgccagccccccagaggccaccccgagcccaccatcagctggaagaaggacggcagccccctggacgacaaggacgagagaatcaccatcagaggcggcaagctgatgatcacctacaccagaaagagcgacgccggcaagtacgtgtgcgtgggcaccaacatggtgggcgagagagagagcgaggtggccgagctgaccgtgctggagagacccagcttcgtgaagagacccagcaacctggccgtgaccgtggacgacagcgccgagttcaagtgcgaggccagaggcgaccccgtgcccaccgtgagatggagaaaggacgacggcgagctgcccaagagcagatacgagatcagagacgaccacaccctgaagatcagaaaggtgaccgccggcgacatgggcagctacacctgcgtggccgagaacatggtgggcaaggccgaggccagcgccaccctgaccgtgcaggagcccccccacttcgtggtgaagcccagagaccaggtggtggccctgggcagaaccgtgaccttccagtgcgaggccaccggcaacccccagcccgccatcttctggagaagagagggcagccagaacctgctgttcagctaccagcccccccagagcagcagcagattcagcgtgagccagaccggcgacctgaccatcaccaacgtgcagagaagcgacgtgggctactacatctgccagaccctgaacgtggccggcagcatcatcaccaaggcctacctggaggtgaccgacgtgatcgccgacagacccccccccgtgatcagacagggccccgtgaaccagaccgtggccgtggacggcaccttcgtgctgagctgcgtggccaccggcagccccgtgcccaccatcctgtggagaaaggacggcgtgctggtgagcacccaggacagcagaatcaagcagctggagaacggcgtgctgcagatcagatacgccaagctgggcgacaccggcagatacacctgcatcgccagcacccccagcggcgaggccacctggagcgcctacatcgaggtgcaggagttcggcgtgcccgtgcagccccccagacccaccgaccccaacctgatccccagcgcccccagcaagcccgaggtgaccgacgtgagcagaaacaccgtgaccctgagctggcagcccaacctgaacagcggcgccacccccaccagctacatcatcgaggccttcagccacgccagcggcagcagctggcagaccgtggccgagaacgtgaagaccgagaccagcgccatcaagggcctgaagcccaacgccatctacctgttcctggtgagagccgccaacgcctacggcatcagcgaccccagccagatcagcgaccccgtgaagacccaggacgtgctgcccaccagccagggcgtggaccacaagcaggtgcagagagagctgggcaacgccgtgctgcacctgcacaaccccaccgtgctgagcagcagcagcatcgaggtgcactggaccgtggaccagcagagccagtacatccagggctacaagatcctgtacagacccagcggcgccaaccacggcgagagcgactggctggtgttcgaggtgagaacccccgccaagaacagcgtggtgatccccgacctgagaaagggcgtgaactacgagatcaaggccagacccttcttcaacgagttccagggcgccgacagcgagatcaagttcgccaagaccctggaggaggcccccagcgcccccccccagggcgtgaccgtgagcaagaacgacggcaacggcaccgccatcctggtgagctggcagcccccccccgaggacacccagaacggcatggtgcaggagtacaaggtgtggtgcctgggcaacgagaccagataccacatcaacaagaccgtggacggcagcaccttcagcgtggtgatccccttcctggtgcccggcatcagatacagcgtggaggtggccgccagcaccggcgccggcagcggcgtgaagagcgagccccagttcatccagctggacgcccacggcaaccccgtgagccccgaggaccaggtgagcctggcccagcagatcagcgacgtggtgaagcagcccgccttcatcgccggcatcggcgccgcctgctggatcatcctgatggtgttcagcatctggctgtacagacacagaaagaagagaaacggcctgaccagcacctacgccggcatcagaaaggtgcccagcttcaccttcacccccaccgtgacctaccagagaggcggcgaggccgtgagcagcggcggcagacccggcctgctgaacatcagcgagcccgccgcccagccctggctggccgacacctggcccaacaccggcaacaaccacaacgactgcagcatcagctgctgcaccgccggcaacggcaacagcgacagcaacctgaccacctacagcagacccgccgactgcatcgccaactacaacaaccagctggacaacaagcagaccaacctgatgctgcccgagagcaccgtgtacggcgacgtggacctgagcaacaagatcaacgagatgaagaccttcaacagccccaacctgaaggacggcagattcgtgaaccccagcggccagcccaccccctacgccaccacccagctgatccagagcaacctgagcaacaacatgaacaacggcagcggcgacagcggcgagaagcactggaagcccctgggccagcagaagcaggaggtggcccccgtgcagtacaacatcgtggagcagaacaagctgaacaaggactacagagccaacgacaccgtgccccccaccatcccctacaaccagagctacgaccagaacaccggcggcagctacaacagcagcgacagaggcagcagcaccagcggcagccagggccacaagaagggcgccagaacccccaaggtgcccaagcagggcggcatgaactgggccgacctgctgccccccccccccgcccacccccccccccacagcaacagcgaggagtacaacatcagcgtggacgagagctacgaccaggagatgccctgccccgtgccccccgccagaatgtacctgcagcaggacgagctggaggaggaggaggacgagagaggccccaccccccccgtgagaggcgccgccagcagccccgccgccgtgagctacagccaccagagcaccgccaccctgacccccagcccccaggaggagctgcagcccatgctgcaggactgccccgaggagaccggccacatgcagcaccagcccgacagaagaagacagcccgtgagccccccccccccccccagacccatcagccccccccacacctacggctacatcagcggccccctggtgagcgacatggacaccgacgcccccgaggaggaggaggacgaggccgacatggaggtggccaagatgcagaccagaagactgctgctgagaggcctggagcagacccccgccagcagcgtgggcgacctggagagcagcgtgaccggcagcatgatcaacggctggggcagcgccagcgaggaggacaacatcagcagcggcagaagcagcgtgagcagcagcgacggcagcttcttcaccgacgccgacttcgcccaggccgtggccgccgccgccgagtacgccggcctgaaggtggccagaagacagatgcaggacgccgccggcagaagacacttccacgccagccagtgccccagacccaccagccccgtgagcaccgacagcaacatgagcgccgccgtgatgcagaagaccagacccgccaagaagctgaagcaccagcccggccacctgagaagagagacctacaccgacgacctgccccccccccccgtgcccccccccgccatcaagagccccaccgcccagagcaagacccagctggaggtgagacccgtggtggtgcccaagctgcccagcatggacgccagaaccgacagaagcagcgacagaaagggcagcagctacaagggcagagaggtgctggacggcagacaggtggtggacatgagaaccaaccccggcgaccccagagaggcccaggagcagcagaacgacggcaagggcagaggcaacaaggccgccaagagagacctgccccccgccaagacccacctgatccaggaggacatcctgccctactgcagacccaccttccccaccagcaacaaccccagagaccccagcagcagcagcagcatgagcagcagaggcagcggcagcagacagagagagcaggccaacgtgggcagaagaaacatcgccgagatgcaggtgctgggcggctacgagagaggcgaggacaacaacgaggagctggaggagaccgagagctag

SEQ ID NO: 287147 - protein, 2016 aa, Artificial Sequence [sequence omitted]

SEQ ID NO: 287148 - DNA, 8504 bp, Artificial Sequence
  derived and/or modified sequence
agacggcggcggcgcccgtaggatgcagggatcgctcccccggggccgctgagcctgcgcccagtgccccgagccccgcgccgagccgagtccgcgccaagcagcagccgcccaccccggggcccggccgggggaccagcagcttccccacaggcaacgtgaggagagcctgtgcccagaagcaggatgagaagatggcaaacttcctattacctcggggcaccagcagcttccgcaggttcacacgggagtccctggcagccatcgagaagcgcatggcagagaagcaagcccgcggctcaaccaccttgcaggagagccgagaggggctgcccgaggaggaggctccccggccccagctggacctgcaggcctccaaaaagctgccagatctctatggcaatccaccccaagagctcatcggagagcccctggaggacctggaccccttctatagcacccaaaagactttcatcgtactgaataaaggcaagaccatcttccggttcagtgccaccaacgccttgtatgtcctcagtcccttccaccccatccggagagcggctgtgaagattctggttcactcgctcttcaacatgctcatcatgtgcaccatcctcaccaactgcgtgttcatggcccagcacgaccctccaccctggaccaagtatgtcgagtacaccttcaccgccatttacacctttgagtctctggtcaagattctggctcgaggcttctgcctgcacgcgttcactttccttcgggacccatggaactggctggactttagtgtgattatcatggcatacacaactgaatttgtggacctgggcaatgtctcagccttacgcaccttccgagtcctccgggccctgaaaactatatcagtcatttcagggctgaagaccatcgtgggggccctgatccagtctgtgaagaagctggctgatgtgatggtcctcacagtcttctgcctcagcgtctttgccctcatcggcctgcagctcttcatgggcaacctaaggcacaagtgcgtgcgcaacttcacagcgctcaacggcaccaacggctccgtggaggccgacggcttggtctgggaatccctggacctttacctcagtgatccagaaaattacctgctcaagaacggcacctctgatgtgttactgtgtgggaacagctctgacgctgggacatgtccggagggctaccggtgcctaaaggcaggcgagaaccccgaccacggctacaccagcttcgattcctttgcctgggcctttcttgcactcttccgcctgatgacgcaggactgctgggagcgcctctatcagcagaccctcaggtccgcagggaagatctacatgatcttcttcatgcttgtcatcttcctggggtccttctacctggtgaacctgatcctggccgtggtcgcaatggcctatgaggagcaaaaccaagccaccatcgctgagaccgaggagaaggaaaagcgcttccaggaggccatggaaatgctcaagaaagaacacgaggccctcaccatcaggggtgtggataccgtgtcccgtagctccttggagatgtcccctttggccccagtaaacagccatgagagaagaagcaagaggagaaaacggatgtcttcaggaactgaggagtgtggggaggacaggctccccaagtctgactcagaagatggtcccagagcaatgaatcatctcagcctcacccgtggcctcagcaggacttctatgaagccacgttccagccgcgggagcattttcacctttcgcaggcgagacctgggttctgaagcagattttgcagatgatgaaaacagcacagcgggggagagcgagagccaccacacatcactgctggtgccctggcccctgcgccggaccagtgcccagggacagcccagtcccggaacctcggctcctggccacgccctccatggcaaaaagaacagcactgtggactgcaatggggtggtctcattactgggggcaggcgacccagaggccacatccccaggaagccacctcctccgccctgtgatgctagagcacccgccagacacgaccacgccatcggaggagccaggcgggccccagatgctgacctcccaggctccgtgtgtagatggcttcgaggagccaggagcacggcagcgggccctcagcgcagtcagcgtcctcaccagcgcactggaagagttagaggagtctcgccacaagtgtccaccatgctggaaccgtctcgcccagcgctacctgatctgggagtgctgcccgctgtggatgtccatcaagcagggagtgaagttggtggtcatggacccgtttactgacctcaccatcactatgtgcatcgtactcaacacactcttcatggcgctggagcactacaacatgacaagtgaattcgaggagatgctgcaggtcggaaacctggtcttcacagggattttcacagcagagatgaccttcaagatcattgccctcgacccctactactacttccaacagggctggaacatcttcgacagcatcatcgtcatccttagcctcatggagctgggcctgtcccgcatgagcaacttgtcggtgctgcgctccttccgcctgctgcgggtcttcaagctggccaaatcatggcccaccctgaacacactcatcaagatcatcgggaactcagtgggggcactggggaacctgacactggtgctagccatcatcgtgttcatctttgctgtggtgggcatgcagctctttggcaagaactactcggagctgagggacagcgactcaggcctgctgcctcgctggcacatgatggacttctttcatgccttcctcatcatcttccgcatcctctgtggagagtggatcgagaccatgtgggactgcatggaggtgtcggggcagtcattatgcctgctggtcttcttgcttgttatggtcattggcaaccttgtggtcctgaatctcttcctggccttgctgctcagctccttcagtgcagacaacctcacagcccctgatgaggacagagagatgaacaacctccagctggccctggcccgcatccagaggggcctgcgctttgtcaagcggaccacctgggatttctgctgtggtctcctgcggcagcggcctcagaagcccgcagcccttgccgcccagggccagctgcccagctgcattgccaccccctactccccgccacccccagagacggagaaggtgcctcccacccgcaaggaaacacggtttgaggaaggcgagcaaccaggccagggcacccccggggatccagagcccgtgtgtgtgcccatcgctgtggccgagtcagacacagatgaccaagaagaagatgaggagaacagcctgggcacggaggaggagtccagcaagcagcaggaatcccagcctgtgtccggtggcccagaggcccctccggattccaggacctggagccaggtgtcagcgactgcctcctctgaggccgaggccagtgcatctcaggccgactggcggcagcagtggaaagcggaaccccaggccccagggtgcggtgagaccccagaggacagttgctccgagggcagcacagcagacatgaccaacaccgctgagctcctggagcagatccctgacctcggccaggatgtcaaggacccagaggactgcttcactgaaggctgtgtccggcgctgtccctgctgtgcggtggacaccacacaggccccagggaaggtctggtggcggttgcgcaagacctgctaccacatcgtggagcacagctggttcgagacattcatcatcttcatgatcctactcagcagtggagcgctggccttcgaggacatctacctagaggagcggaagaccatcaaggttctgcttgagtatgccgacaagatgttcacatatgtcttcgtgctggagatgctgctcaagtgggtggcctacggcttcaagaagtacttcaccaatgcctggtgctggctcgacttcctcatcgtagacgtctctctggtcagcctggtggccaacaccctgggctttgccgagatgggccccatcaagtcactgcggacgctgcgtgcactccgtcctctgagagctctgtcacgatttgagggcatgagggtggtggtcaatgccctggtgggcgccatcccgtccatcatgaacgtcctcctcgtctgcctcatcttctggctcatcttcagcatcatgggcgtgaacctctttgcggggaagtttgggaggtgcatcaaccagacagagggagacttgcctttgaactacaccatcgtgaacaacaagagccagtgtgagtccttgaacttgaccggagaattgtactggaccaaggtgaaagtcaactttgacaacgtgggggccgggtacctggcccttctgcaggtggcaacatttaaaggctggatggacattatgtatgcagctgtggactccagggggtatgaagagcagcctcagtgggaatacaacctctacatgtacatctattttgtcattttcatcatctttgggtctttcttcaccctgaacctctttattggtgtcatcattgacaacttcaaccaacagaagaaaaagttagggggccaggacatcttcatgacagaggagcagaagaagtactacaatgccatgaagaagctgggctccaagaagccccagaagcccatcccacggcccctgaacaagtaccagggcttcatattcgacattgtgaccaagcaggcctttgacgtcaccatcatgtttctgatctgcttgaatatggtgaccatgatggtggagacagatgaccaaagtcctgagaaaatcaacatcttggccaagatcaacctgctctttgtggccatcttcacaggcgagtgtattgtcaagctggctgccctgcgccactactacttcaccaacagctggaatatcttcgacttcgtggttgtcatcctctccatcgtgggcactgtgctctcggacatcatccagaagtacttcttctccccgacgctcttccgagtcatccgcctggcccgaataggccgcatcctcagactgatccgaggggccaaggggatccgcacgctgctctttgccctcatgatgtccctgcctgccctcttcaacatcgggctgctgctcttcctcgtcatgttcatctactccatctttggcatggccaacttcgcttatgtcaagtgggaggctggcatcgacgacatgttcaacttccagaccttcgccaacagcatgctgtgcctcttccagatcaccacgtcggccggctgggatggcctcctcagccccatcctcaacactgggccgccctactgcgaccccactctgcccaacagcaatggctctcggggggactgcgggagcccagccgtgggcatcctcttcttcaccacctacatcatcatctccttcctcatcgtggtcaacatgtacattgccatcatcctggagaacttcagcgtggccacggaggagagcaccgagcccctgagtgaggacgacttcgatatgttctatgagatctgggagaaatttgacccagaggccactcagtttattgagtattcggtcctgtctgactttgccgatgccctgtctgagccactccgtatcgccaagcccaaccagataagcctcatcaacatggacctgcccatggtgagtggggaccgcatccattgcatggacattctctttgccttcaccaaaagggtcctgggggagtctggggagatggacgccctgaagatccagatggaggagaagttcatggcagccaacccatccaagatctcctacgagcccatcaccaccacactccggcgcaagcacgaagaggtgtcggccatggttatccagagagccttccgcaggcacctgctgcaacgctctttgaagcatgcctccttcctcttccgtcagcaggcgggcagcggcctctccgaagaggatgcccctgagcgagagggcctcatcgcctacgtgatgagtgagaacttctcccgaccccttggcccaccctccagctcctccatctcctccacttccttcccaccctcctatgacagtgtcactagagccaccagcgataacctccaggtgcgggggtctgactacagccacagtgaagatctcgccgacttccccccttctccggacagggaccgtgagtccatcgtgtgagcctcggcctggctggccaggacacactgaaaagcagcctttttcaccatggcaaacctaaatgcagtcagtcacaaaccagcctggggccttcctggctttgggagtaagaaatgggcctcagccccgcggatcaaccaggcagagttctgtggcgccgcgtggacagccggagcagttggcctgtgcttggaggcctcagatagacctgtgacctggtctggtcaggcaatgccctgcggctctggaaagcaacttcatcccagctgctgaggcgaaatataaaactgagactgtatatgttgtgaatgggctttcataaatttattatatttgatatttttttacttgagcaaagaactaaggatttttccatggacatgggcagcaattcacgctgtctcttcttaaccctgaacaagagtgtctatggagcagccggaagtctgttctcaaagcagaagtggaatccagtgtggctcccacaggtcttcactgcccaggggtcgaatggggtccccctcccacttgacctgagatgctgggagggctgaacccccactcacacaagcacacacacacagtcctcacacacggaggccagacacaggccgtgggacccaggctcccagcctaagggagacaggcctttccctgccggccccccaaggatggggttcttgtccacggggctcactctggccccctattgtctccaaggtcccattttccccctgtgttttcacgcaggtcatattgtcagtcctacaaaaataaaaggcttccagaggagagtggcctgggtcccagggctggccctaggcactgatagttgccttttcttcccctcctgtaagagtattaacaaaaccaaaggacacaagggtgcaagccccattcacggcctggcatgcagcttgtccttgctcctggaacctggcaggccctgcccagccagccatcggaagagagggctgagccatgggggtttggggctaagaagttcaccagccctgagccatggcggcccctcagcctgcctgaagagaggaaactggcgatctcccagggctctctggaccatacgcggaggagttttctgtgtggtctccagctcctctccagacacagagacatgggagtggggagcggagcttggccctgcgccctgtgcagggaaagggatggtcaggcccagttctcgtgcccttagaggggaatgaaccatggcacctttgagagagggggcactgtggtcaggcccagcctctctggctcagcccgggatcctgatggcacccacacagaggacctctttggggcaagatccaggtggtcccataggtcttgtgaaaaggctttttcagggaaaaatattttactagtccaatcacccccaggacctcttcagctgctgacaatcctatttagcatatgcaaatcttttaacatagagaactgtcaccctgaggtaacagggtcaactggcgaagcctgagcaggcaggggcttggctgccccattccagctctcccatggagcccctccaccgggcgcatgcctcccaggccacctcagtctcacctgccggctctgggctggctgctcctaacctacctcgccgagctgtcggagggctggacatttgtggcagtgctgaagggggcattgccggcgagtaaagtattatgtttcttcttgtcaccccagttcccttggtggcaaccccagacccaacccatgcccctgacagatctagttctcttctcctgtgttccctttgagtccagtgtgggacacggtttaactgtcccagcgacatttctccaagtggaaatcctatttttgtagatctccatgctttgctctcaaggcttggagaggtatgtgcccctcctgggtgctcaccgcctgctacacaggcaggaatgcggttgggaggcaggtcgggctgccagcccagctggccggaaggagactgtggtttttgtgtgtgtggacagcccgggagctttgagacaggtgcctggggctggctgcagacggtgtggttgggggtgggaggtgagctagacccaacccttagcttttagcctggctgtcacctttttaatttccagaactgcacaatgaccagcaggagggaaggacagacatcaagtgccagatgttgtctgaactaatcgagcacttctcaccaaacttcatgtataaataaaatacatatttttaaaacaaaccaataaatggcttacatga

SEQ ID NO: 287149 - DNA, 6051 bp, Artificial Sequence
  derived and/or modified sequence
atggcaaactttcttctgcctagagggacatctagtttccgaaggtttacacgggaatcccttgccgcaatcgagaaaagaatggcagaaaaacaggctagaggctccacaacccttcaggagtctcgtgaggggttgcccgaggaggaggccccccgaccccagctggacttacaggcttccaagaaactccctgacctttatgggaacccgccgcaggagctgattggggaacctctggaggatctagatcctttttacagtacacaaaaaacttttattgtactgaacaagggtaaaacaatcttccggttcagcgccactaatgctctgtacgtcctgtcaccatttcatccaataagacgggctgccgtgaagatcctggtgcattcgctttttaacatgttgatcatgtgtactatactcacaaactgcgtgttcatggcccaacacgatccccccccgtggaccaaatacgtggaatacacattcaccgctatatacacattcgaatcccttgtaaagattttagcgcgcggcttttgcctacacgcgtttactttcttacgggacccttggaattggcttgatttttctgttattattatggcctacacaaccgagttcgtggatcttggaaacgtgagcgccctcaggacctttagggtgcttcgggccctgaaaactatttcagtgattagtggtctgaaaacaatcgttggagccctcattcagtctgtgaaaaaactggctgatgtgatggtattgaccgtgttttgtctgagcgtgtttgctctgattggacttcagctatttatgggcaatctgaggcacaaatgtgttcgcaacttcacagccctcaacgggactaacgggagcgtcgaagcagacggcctggtgtgggaatcactggatttatatctctctgatcctgaaaattatttgctcaaaaacggaacgagtgatgtcctgctgtgtgggaacagttcagacgcaggtacctgtcccgagggataccgctgtttaaaggccggggagaaccccgaccacggctataccagcttcgattcgtttgcatgggcgtttttggcgctgtttcgtctgatgacacaggattgctgggagcgcctttaccagcagaccttgcgctccgccggaaaaatctacatgatttttttcatgttagtgatattccttggctctttctacctcgtgaacctcatcttggcagtcgtagccatggcttacgaggaacaaaatcaggctaccatcgcagaaacagaggaaaaggagaagagatttcaggaagccatggaaatgctgaagaaagaacacgaagctcttactatcaggggagtggacacggtgagtcgcagctccctcgaaatgtcgccactcgctcccgtcaacagtcatgagagaaggagtaagagacggaaaagaatgagctcagggacagaggagtgcggcgaggaccgccttccgaagtctgacagcgaggatgggcctagggcaatgaaccatctctctctgacaagaggcttgagccgtacctctatgaagcccagaagcagtcggggatctatttttacatttcggaggagagatttggggagcgaagccgacttcgcggacgacgaaaacagcactgctggcgagtcggagagccatcacacttcactgcttgttccctggccattaagaagaacctcagcacaaggacagccatccccagggacatcagctccaggccatgccctccacggcaaaaaaaatagcaccgtggattgtaacggtgtagtaagtttgcttggagccggagatccagaggccacttcaccaggatcccacctgcttcggcccgtaatgcttgagcatccccccgatacgactacgccttcagaggaaccaggagggccacagatgctgacctcccaggcaccttgtgtggacgggttcgaggaacccggtgccaggcagagggccctatccgccgtgtccgtgctgacatcagctttggaagagttggaggagtctcgccacaagtgcccaccctgctggaaccggctagcacaacggtaccttatttgggagtgttgcccattgtggatgtcaattaaacagggtgtgaagctggtggtgatggaccctttcacagacctgactatcaccatgtgtatcgtcctcaataccctgtttatggcactagagcactacaatatgactagcgagtttgaggagatgcttcaggtgggcaacctcgtgttcaccggaatttttaccgccgagatgacatttaaaatcatcgccctggatccatactactactttcaacaggggtggaatattttcgatagcattatcgtcattctgagcctgatggaactgggactttcccgcatgagtaatctgagcgtactccgctcatttcgactgttgagagtctttaagctggctaagtcttggcctaccctgaataccctgataaagattattggcaacagcgtcggcgccctggggaatctcacgctcgtactggcgatcattgttttcatattcgccgttgtcgggatgcagctgtttggtaagaactattcagagttacgggactctgattctggactgctcccacgctggcacatgatggattttttccacgcttttcttataatattcagaatcttatgtggtgagtggattgagaccatgtgggactgcatggaggtctctggacaatctctgtgtctactcgtattcttgctggtgatggtaatcgggaatctcgtcgtgttgaatttgtttctggctttattactctcctccttcagcgctgacaacttgaccgctcctgatgaggatagagagatgaacaatctgcagctagccctggcgcgcatccagagaggcctgagattcgtgaagcgcactacttgggatttttgttgcggcctgcttcgacagaggcctcagaagccggctgcactcgcagcccaaggacaactgccgagttgcatagccaccccctacagccctccacctcccgaaacagagaaggtgccccccacacgcaaggagaccaggtttgaagagggggagcaacccggccagggcacaccgggagatcccgaaccagtgtgcgtccctattgcagtcgctgaaagtgataccgatgaccaagaggaagacgaggagaacagcctcggaactgaagaggagagcagtaagcagcaagagtcccagcctgtctccggcggccccgaagccccccccgactcccgaacctggagccaggtctcagccacagcaagctccgaagcggaagccagcgcatcacaggccgattggagacagcagtggaaagccgaaccacaggctcccggttgcggcgagacgccggaggacagctgttccgaagggtctaccgctgatatgacaaatacagctgagctgctcgaacagatacccgacttagggcaggacgtaaaggacccagaggactgcttcacagaagggtgtgtgcgtagatgcccctgttgtgcagtggacaccacacaggccccggggaaggtgtggtggaggttgcggaagacctgctatcatatagtggaacatagttggttcgaaacctttattatcttcatgattctgcttagttccggggccctggctttcgaggatatctatctagaggagcgcaagacgatcaaggtgctgttggagtacgcagacaaaatgtttacctacgtgttcgtgctggagatgttgcttaagtgggtcgcctacggatttaaaaaatattttaccaatgcctggtgttggctggactttctaatagtggatgttagcctcgtgagccttgttgctaatacactggggtttgctgagatggggccaattaagtccctccggacactcagagctcttcgccctttgcgcgctctttctagatttgaggggatgagagttgttgtcaacgctctggttggtgctatcccgtcaattatgaacgtgttactggtgtgcctcatcttttggttgatattcagcataatgggcgtcaacctgttcgctgggaagttcggccgctgtattaatcagaccgagggggatctgcctctgaattacaccattgtcaacaataaaagtcagtgtgaatctcttaatcttactggcgaattgtactggacaaaggtcaaggtgaactttgacaacgtcggtgcaggatacctggccctgcttcaggtggccacgtttaagggctggatggacatcatgtacgccgccgtggattctcgggggtatgaggaacagccacagtgggagtataacctttatatgtatatctatttcgtaatcttcatcattttcggtagcttctttacactgaatttatttattggcgtgatcattgacaacttcaaccagcagaagaaaaagctgggcggacaagatatatttatgacggaggaacagaaaaaatactataacgctatgaaaaaattaggatcaaagaaaccacaaaagcccatccctcgaccactgaataaatatcaggggtttatcttcgatatcgtgactaaacaggcttttgatgtgacaatcatgtttctcatttgtctcaacatggttactatgatggtcgagactgatgatcagagccctgagaaaattaacatcttggctaagattaatctactcttcgtggccatattcactggagagtgtattgtgaaactcgcagctctgagacactattactttactaatagctggaacatcttcgacttcgttgtcgttatcctctcaatcgttgggacagtcctctcagacatcatccaaaagtattttttcagcccaacactgttccgcgtgattaggcttgcccgtatcgggcgcattctgagactgatccgaggcgccaaaggcataaggaccctgctgttcgcattgatgatgtccctgcctgccctctttaacattggactactcctgtttctcgtgatgtttatttattccatctttggtatggcaaactttgcttacgtgaagtgggaagcaggcatcgacgacatgttcaactttcagactttcgcaaatagtatgctgtgtctgttccaaatcacaacctccgctggctgggacggcctgctgagtccgatcctgaataccgggcccccctactgcgatccaacacttccaaattctaatggcagccggggcgattgtggaagccccgctgtcggcattttgttctttacaacctacatcattatctctttcctgattgtggtgaacatgtacattgctatcattcttgaaaatttcagcgttgccacggaggagtcaactgagcccctcagcgaagatgattttgacatgttctatgagatctgggaaaagtttgaccccgaagccacccagtttattgaatacagcgtgctgagcgacttcgcagatgcactgagcgaaccgctaagaatcgctaaaccaaaccaaatctccttaattaatatggacctgccgatggtgagtggtgaccgtatccattgcatggacatactgtttgcattcactaaacgggtgctcggagaatccggagaaatggacgccctgaaaatccagatggaggagaagttcatggctgctaacccctccaagatttcttatgaacctattacaactacactcaggagaaagcacgaggaggtgtcagccatggtgattcagcgggcctttcgccgtcacctcctccagagaagcctcaagcacgcaagttttctgttccggcagcaggcaggttctgggctgagcgaggaagacgcaccagaacgtgaggggctgatagcctacgtgatgtccgaaaacttctctagaccgctggggcctccatcttcatcatcaatttcctcaacttcgtttccgccctcctatgactcagtaacacgcgctacctccgataacctacaggttcgaggttctgactacagtcacagtgaagatctggccgattttcccccaagcccagaccgggatcgagaaagtattgtgtag

SEQ ID NO: 287150 - DNA, 6051 bp, Artificial Sequence
  derived and/or modified sequence
atggccaacttcctgctgccccggggcaccagcagcttccgccgcttcacccgggagagcctggccgccatcgagaagaggatggccgagaagcaggcccggggcagcaccaccctgcaggagagccgggagggcctgcctgaggaggaggccccccggccccagctggacctgcaggccagcaagaagctgcctgacctgtatggcaaccccccccaggagctgattggagagcccctggaggacctggaccccttctacagcacccagaagaccttcatcgtgctgaacaagggcaagaccatcttccgcttcagcgccaccaatgccctgtatgtgctgagccccttccaccccatcagaagagctgctgtgaagatcctggtgcacagcctcttcaacatgctgatcatgtgcaccatcctgaccaactgtgtgttcatggcccagcacgaccccccaccctggaccaagtatgtggagtacaccttcaccgccatctacacctttgagagcctggtgaagatcctggcccggggcttctgcctgcacgccttcaccttcctgcgggacccctggaactggctggacttcagcgtcatcatcatggcctacaccacagaatttgtggacctgggcaatgtgtctgccctgcggaccttccgggtgctgcgggccctgaagaccatcagcgtcatcagcggcctgaagaccatcgtgggcgccctgatccagagcgtgaagaagctggctgatgtgatggtgctgactgtgttctgcctgtctgtgtttgccctgattggcctgcagctgttcatgggcaacctgcggcacaagtgtgtgaggaacttcaccgccctgaatggcaccaatggatctgtggaggctgatggcctggtgtgggagagcctggacctgtacctgagtgaccctgagaactacctgctgaagaatggcaccagtgatgtgctgctgtgtggcaacagcagtgatgctggcacctgcccagagggctaccgctgcctgaaggccggggagaacccagaccacggctacaccagctttgacagctttgcctgggccttcctggccctcttccggctgatgacccaggactgctgggagcggctgtaccagcagaccctgcggtctgctgggaagatctacatgatcttcttcatgctggtgatcttcctgggcagcttctacctggtgaacctgatcctggccgtggtggccatggcctatgaggagcagaaccaggccaccatcgccgagacagaggagaaggagaagcgcttccaggaggccatggagatgctgaagaaggagcacgaggccctgaccatccggggcgtggacacagtgagccgcagcagcctggagatgagccccctggcccctgtgaacagccatgagcggcgcagcaagaggaggaagaggatgagcagcggcacagaggagtgtggagaagatcggctgcccaagagtgacagtgaagatggcccccgggccatgaaccacctgagcctgacccggggcctgagcaggacctccatgaagcccaggagcagccggggcagcatcttcaccttcagaagaagagacctgggcagcgaggccgactttgctgatgatgagaacagcacagctggggagagcgagagccaccacaccagcctgctggtgccctggcccctgcggaggaccagcgcccagggccagcccagccctggcaccagcgcccctggccacgccctgcacggcaagaagaacagcacagtggactgcaatggagtggtgtccctgctgggcgctggggaccctgaggccaccagccctggcagccacctgctgcggcctgtgatgctggagcaccccccagacaccaccacccccagcgaggagcccggcggcccccagatgctgaccagccaggccccctgtgtggatggctttgaggagcccggggcccggcagagggccctgtctgctgtgtctgtgctgaccagcgccctggaggagctggaggagagccgccacaagtgccccccctgctggaaccggctggcccagcgctacctgatctgggagtgctgccccctgtggatgagcatcaagcagggcgtgaagctggtggtgatggaccccttcacagacctgaccatcaccatgtgcatcgtgctgaacaccctcttcatggccctggagcactacaacatgaccagcgagtttgaggagatgctgcaggtgggcaacctggtgttcaccggcatcttcaccgctgagatgaccttcaagatcatcgccctggacccctactactacttccagcagggctggaacatctttgacagcatcatcgtcatcctgagcctgatggagctgggcctgagcaggatgagcaacctgtctgtgctgcgctccttccggctgctgcgggtcttcaagctggccaagtcctggcccaccctgaacaccctcatcaagatcatcggcaacagcgtgggcgccctgggcaacctgaccctggtgctggccatcatcgtgttcatctttgctgtggtgggcatgcagctgtttgggaagaactacagcgagctgcgggacagcgacagcggcctgctgccccgctggcacatgatggacttcttccacgccttcctgatcatcttccgcatcctgtgtggggagtggattgagaccatgtgggactgcatggaggtgtctggccagagcctgtgcctgctggtgttcctgctggtgatggtgattggcaacctggtggtgctgaacctcttcctggccctgctgctgagcagcttctctgctgacaacctgacagccccagatgaggaccgggagatgaacaacctgcagctggccctggcccgcatccagaggggcctgcgctttgtgaagaggaccacctgggacttctgctgcggcctgctgcggcagaggccccagaagccagctgccctggccgcccagggccagctgcccagctgcatcgccaccccctacagccccccacctcctgagacagagaaggtgccccccaccaggaaggagaccaggtttgaggagggggagcagcccggccagggcacccctggggaccctgagcctgtgtgtgtgcccatcgctgtggccgagagtgacacagatgaccaggaggaggatgaggagaacagcctgggcacagaggaggagagcagcaagcagcaggagagccagcctgtgtctgggggccctgaggcccccccagacagcaggacctggagccaggtgtctgccacagccagcagcgaggccgaggccagcgccagccaggccgactggaggcagcagtggaaggccgagccccaggcccctggctgtggggagaccccagaggacagctgcagcgagggcagcacagctgacatgaccaacacagctgagctgctggagcagatcccagacctgggccaggatgtgaaggaccctgaggactgcttcacagagggctgtgtgcggcgctgcccctgctgtgctgtggacaccacccaggcccctgggaaggtgtggtggaggctgaggaagacctgctaccacatcgtggagcacagctggtttgagaccttcatcatcttcatgatcctgctgagcagcggggccctggcctttgaggacatctacctggaggagaggaagaccatcaaggtgctgctggagtatgctgacaagatgttcacctacgtgtttgtgctggagatgctgctgaagtgggtggcctacggcttcaagaagtacttcaccaatgcctggtgctggctggacttcctgattgtggatgtgtccctggtgtccctggtggccaacaccctgggctttgctgagatgggccccatcaagagcctgcggaccctgcgggccctgcggcccctgcgggccctgagcagatttgagggcatgagggtggtggtgaatgccctggtgggcgccatccccagcatcatgaatgtgctgctggtgtgcctgatcttctggctgatcttcagcatcatgggcgtgaacctgtttgctgggaagtttggccgctgcatcaaccagacagaaggagacctgcccctgaactacaccatcgtgaacaacaagagccagtgtgagagcctgaacctgaccggggagctgtactggaccaaggtgaaggtgaactttgacaacgtgggcgccggctacctggccctgctgcaggtggccaccttcaagggctggatggacatcatgtatgctgctgtggacagccggggctatgaggagcagccccagtgggagtacaacctgtacatgtacatctacttcgtcatcttcatcatcttcggcagcttcttcaccctgaacctcttcatcggggtcatcatcgacaacttcaaccagcagaagaagaagctgggcggccaggacatcttcatgacagaggagcagaagaagtactacaatgccatgaagaagctgggcagcaagaagccccagaagcccatcccccggcccctgaacaagtaccagggcttcatctttgacatcgtgaccaagcaggcctttgatgtgaccatcatgttcctgatctgcctgaacatggtgaccatgatggtggagacagatgaccagagccctgagaagatcaacatcctggccaagatcaacctgctgtttgtggccatcttcaccggggagtgcatcgtgaagctggccgccctgcggcactactacttcaccaacagctggaacatctttgattttgtggtggtgatcctgagcatcgtgggcaccgtgctgagtgacatcatccagaagtacttcttcagccccaccctcttccgggtcatccggctggcccgcatcggccgcatcctgcggctcatccggggggccaagggcatccgcaccctgctgtttgccctgatgatgagcctgcctgccctcttcaacatcggcctgctgctcttcctggtgatgttcatctacagcatcttcggcatggccaactttgcctacgtgaagtgggaggccggcattgatgacatgttcaacttccagacctttgccaacagcatgctgtgcctcttccagatcaccaccagcgctggctgggatggcctgctgagccccatcctgaacacaggccccccctactgtgaccccaccctgcccaacagcaatggcagcagaggagactgtggcagccctgctgtgggcatcctcttcttcaccacctacatcatcatctccttcctgattgtggtgaacatgtacatcgccatcatcctggagaacttctctgtggccacagaggagagcacagagcccctgtctgaagatgactttgacatgttttatgagatctgggagaagtttgatcctgaggccacccagttcatcgagtacagcgtgctgagtgactttgctgatgccctgtctgagcccctgagaattgccaagcccaaccagatcagcctcatcaacatggacctgcccatggtgtctggggaccgcatccactgcatggacatcctgtttgccttcaccaagagggtgctgggggagagcggggagatggatgccctgaagatccagatggaggagaagttcatggccgccaaccccagcaagatctcctatgagcccatcaccaccaccctgcggaggaagcatgaggaggtgtctgccatggtgatccagagggccttcagaagacacctgctgcagaggagcctgaagcacgccagcttcctgttccggcagcaggccggcagcggcctgtctgaagaagatgcccctgagcgggagggcctcatcgcctacgtgatgtctgagaacttcagccggcccctgggcccccccagcagcagcagcatcagcagcaccagcttcccccccagctatgattctgtgacccgggccaccagtgacaacctgcaggtgcggggcagtgactacagccacagcgaggacctggccgacttcccccccagcccagaccgggaccgggagagcatcgtgtag

SEQ ID NO: 287151 - DNA, 6051 bp, Artificial Sequence
  derived and/or modified sequence
atggccaacttcctgctgccccggggcaccagcagcttccggcggtttacaagagagagcctcgcggcaatcgagaaaaggatggccgagaaacaggcacgcggcagcaccacactccaggaatccagggaagggctgccagaagaggaagcaccaagaccccagctggatcttcaggcttccaagaaactccctgatttatacgggaatcctccgcaggaactgatcggagagccgttggaggatctcgaccccttttactccacacagaagacatttatagtcctcaacaagggcaagacaatcttcagattctcggccacaaatgcgttatatgtactcagtccgttccatcctatcaggcgtgctgctgttaagatactggtccactcacttttcaatatgttgattatgtgtaccatcttaactaattgcgtctttatggcgcagcatgacccaccgccgtggacgaagtatgtcgagtacactttcaccgctatttataccttcgaaagcctggtcaagatactggcgaggggattctgtctgcacgctttcacctttctacgagatccctggaattggctggacttttccgtgatcattatggcatatactaccgaattcgtggatctcggcaacgtgtctgccctgcgcaccttccgcgtacttcgtgctcttaagacaatctccgtgataagcggcttgaaaactatcgtgggagctctcatccagtctgtgaaaaaactcgcggacgtgatggtgctgactgttttttgcctgtcagtctttgcactgattgggctgcagctctttatgggtaacctgcgtcacaaatgcgtgcggaattttaccgcactgaacggcacaaatggaagcgtggaggctgacgggctcgtctgggagagtctggacctgtacctctccgatcctgaaaattatttactgaagaacggaacctccgatgtgctgctttgcggcaacagtagcgatgcgggaacatgtccggagggctatcggtgcctgaaagctggcgagaaccccgaccacggctacacgtcatttgactcttttgcctgggcgtttctggctctctttcgcctgatgacccaggactgttgggagaggctataccaacagacccttcgctctgccggcaagatctacatgatctttttcatgctagtgatcttcctggggtctttctacttagtgaacttaattcttgctgtggtggcgatggcctacgaggagcagaatcaggcgactatcgcggagacagaggaaaaagagaaaagatttcaggaggctatggaaatgctaaaaaaagagcacgaggccctgacaatcagaggcgtcgataccgtcagccgctcgagtttggaaatgagccctctcgctccagtgaacagtcacgagaggaggtccaaacggcgcaagcgaatgagcagtggaaccgaggaatgtggagaagatcggctccccaaaagtgactctgaagatggcccacgggcgatgaatcacttgtccctcactcggggacttagccgaacatccatgaagcctagatctagccgggggagcatcttcacgtttagaaggcgcgacctgggctcagaagctgactttgccgacgacgagaactctacagcgggcgagtccgagagccatcacacatcccttttggtcccatggcctcttcgaaggacgagcgcacaggggcagcctagtcctggaaccagtgcccctgggcatgccctgcacggaaaaaaaaacagtacggttgattgcaacggagttgtaagcctgttaggggctggcgatccagaggccacttccccggggtcgcacctgctcagacctgttatgcttgagcatccccccgatactaccacccccagcgaggaaccgggtggaccccaaatgctcacctcccaagccccgtgcgtggacggctttgaagagcccggagccaggcagcgagccctgagtgctgtctccgtcctgaccagcgccctcgaggaattggaagagagtcggcacaagtgtcccccctgctggaatcggcttgctcaaaggtacctgatttgggaatgttgccccctgtggatgagcatcaaacagggggtgaaactggtggtgatggacccattcaccgatctaacaatcacaatgtgtatcgtccttaatacattgtttatggccttagaacattacaacatgactagtgagtttgaggagatgctacaggttggtaacctcgtctttactggaatattcactgcggaaatgacattcaaaatcatagcgttggacccatactattattttcagcaaggatggaacatcttcgacagcattatcgtcattctttccttgatggagctgggactgagtcgcatgtccaacctgagcgtgctgaggtccttccgcctgcttcgcgtgttcaagttggccaagtcatggcctacattaaatacattaattaagatcattggaaactccgtgggagcactcggaaatctcactctggtgcttgctattatcgtattcatcttcgcagtcgttggcatgcagttatttggcaagaactattcggaattgcgggatagcgatagtggcctgctgcctcgctggcacatgatggacttcttccacgcctttctcatcatctttagaatcctctgtggcgaatggatcgaaacaatgtgggactgcatggaggtgtctggtcaatcactgtgcttgctcgtgtttctactcgttatggtaataggtaatctcgttgtcctcaatctctttctggcattactgctctcttcttttagcgccgataacctaaccgctcccgatgaagacagggaaatgaacaacttgcaactggctttggctcgcatacagaggggactccgtttcgtgaagagaacaacatgggacttctgttgtggtcttctgcgtcagcgccctcaaaaaccagccgcactagcagcccaagggcagctcccctcatgcattgctacaccatattcccctccccccccagagacagaaaaggttccaccaaccaggaaggagacaaggtttgaggagggggagcagccaggccagggaacgcccggcgacccagagcccgtctgtgttcctatcgcagtcgccgaaagcgacaccgatgaccaagaggaggacgaggagaacagcctggggaccgaggaggagtctagcaagcagcaggagtctcaaccagtgagtggtggacccgaggcaccacctgactctagaacatggtcacaagtttctgccaccgcttcaagcgaagcagaagcctcagccagccaagcggattggcgccagcaatggaaagctgagccacaggcccccgggtgcggcgaaacgcctgaggattcttgttcggagggaagtacagccgatatgacaaacacagccgaactgctggagcaaatccctgatttggggcaagacgtgaaagacccagaggattgcttcacagaggggtgtgtgaggagatgcccgtgttgcgcagtggacacaactcaggcccctggaaaagtctggtggaggctgagaaaaacatgctaccacatcgttgaacacagctggtttgagaccttcatcattttcatgattttattaagtagtggcgctctggcttttgaggacatctacctcgaggagaggaaaaccatcaaggtgctgctcgagtatgccgataaaatgtttacttatgttttcgttcttgaaatgctattaaaatgggttgcttacggcttcaagaagtacttcacgaatgcctggtgctggctcgatttcctaatcgttgatgttagtttagtgtctctggtggccaacaccttggggttcgcagaaatgggacctatcaagagcctcagaactctccgggctttacgccccctgagggcactgtcacgatttgaaggaatgcgagtggttgtaaacgctcttgtgggcgccatccctagcattatgaacgtgttgctggtgtgtctgatcttctggctcatatttagtattatgggcgtgaatctctttgccggaaaatttggccggtgtattaatcagacagagggtgacctgcccttgaactacacaatagtaaataacaaaagccagtgcgaatctctgaacctgaccggtgagctgtattggacaaaggtgaaggtcaattttgataatgttggcgctgggtacttagccctcctgcaggttgccacattcaagggatggatggatatcatgtacgcagcagtcgatagcagagggtacgaggagcagcctcaatgggaatataacttgtacatgtacatctactttgtcatctttattatcttcggctctttctttacactcaatctattcattggggtgattatcgataatttcaaccagcagaaaaagaaactcggtggtcaggatatcttcatgacggaggaacagaaaaagtactacaacgccatgaaaaagttgggttcaaagaaacctcaaaagccaatcccccgtccccttaataagtaccaagggttcatttttgacattgtgacgaagcaggcctttgatgtgaccattatgttcctgatttgtctgaatatggtcactatgatggtggagaccgatgaccagagccccgagaaaattaatatccttgcgaagatcaacctattgtttgtggctatcttcacaggtgagtgtatcgtgaaactcgcagcgttgcgacattattacttcacaaattcatggaatatctttgacttcgtggtggtgatactgtctattgtgggtacagtcctcagcgacatcatccagaagtacttttttagtcctactcttttccgagtgatccgactggcacggattggacgcattctgagactgatccgtggcgctaagggcatccgcacactgctctttgcattgatgatgtccctccccgcactatttaatatcggcctcctgttgtttttagtcatgtttatctacagcatcttcgggatggcaaatttcgcctacgtgaaatgggaagccggcattgatgacatgttcaactttcaaacttttgccaactccatgctgtgcttgttccagattacaacatccgctggctgggatggattattaagccccatcctgaacaccggaccgccttattgtgacccaacccttcccaacagcaatggttctagaggagattgcggatctccagctgtgggcattctgtttttcacaacttacattatcatcagttttctgatcgtagtgaacatgtatattgccatcatcctggaaaacttcagtgtggctacagaggagtcaactgaaccccttagtgaagacgattttgatatgttttacgagatctgggagaagtttgaccccgaagcaacccaatttatagagtacagcgtactgagcgattttgcagatgcactctccgagccactcagaatcgctaagccaaatcagattagtttgatcaatatggatctgcccatggtctccggtgataggatccattgtatggatattttgtttgcattcacaaagagggtcctcggagaatctggcgaaatggatgctcttaagatccagatggaagagaagttcatggccgctaatccatctaaaatttcctatgagccaatcacaaccaccctgcggaggaaacatgaggaggtctcagccatggtgattcaaagggcgtttagaaggcacctgcttcagcggtcactgaagcacgcttcctttctgttccgacagcaagcggggagtgggctgtcagaggaggatgctcccgagcgagagggcctcattgcatacgttatgtcagagaatttcagtcgaccactggggcctccctcttcgagctcaatctcaagcacttccttccctccctcttatgactccgtaacgcgagctacatctgacaacctccaggtacgcgggtcagactattcgcactcagaagatctggccgactttcccccctcccctgacagggatagagaatctattgtgtag

SEQ ID NO: 287152 - DNA, 6050 bp, Artificial Sequence
  derived and/or modified sequence
atggccaacttccttcttcctagggggacctcgtccttcagaaggttcactagagagagtctggctgccatcgagaaacgcatggccgagaaacaagccagaggctctaccacgctgcaggagtccagagagggcctgcccgaggaggaggccccacgtccccagctggacctccaagccagtaagaagttgccagacctctacggcaacccaccacaggagctgattggtgaacctctggaggacctggatcctttctacagcacacagaaaaccttcattgttttaaataagggaaaaaccatatttcggttctccgccactaacgcactgtacgtgctatccccattccaccccattcgtcgcgcagccgtaaaaatcctggtacatagcttgtttaacatgctgataatgtgcaccatcctgacaaattgcgtttttatggctcagcatgacccaccgccttggactaaatacgtagaatatactttcacagcaatttacaccttcgaaagtcttgtcaagatcctggctaggggattttgtctgcatgcatttaccttccttcgggacccttggaactggcttgacttctctgtaataattatggcctacacaaccgagttcgttgatctgggaaatgtgagcgcactcaggacatttagggtgttgcgagcactgaagaccatcagcgtgatctccggattaaagactattgttggcgctctgatccagtccgtgaagaaattagcagatgtgatggttctcacagtattttgcctgtctgtttttgcactcataggcctgcaactgttcatggggaacctgcgccataagtgcgtgcggaacttcacagccttgaacggcaccaacggttccgtggaagccgacggactggtgtgggaatcccttgacctgtacttatctgatccggaaaactatcttcttaaaaatgggacatctgacgtcctgctctgtggaaattcctcagacgctggcacctgccctgagggataccgatgtctcaaggccggagagaatccggaccatggctatacctcctttgactcattcgcctgggcctttcttgcactttttcgtctcatgactcaggactgttgggagaggctgtaccaacagactctgagatctgccggaaagatttacatgatctttttcatgcttgttattttcctgggctctttctacctggtcaatttgatacttgcagttgtcgctatggcatacgaagagcagaatcaggcgactatcgcagaaaccgaagagaaagagaagagatttcaggaagctatggagatgctcaaaaaagagcatgaagccctgaccatccggggtgtggacactgtcagcagatcatcactggagatgagccctctggcacccgtgaactcacatgagcgcagatctaaacgcaggaagagaatgtcctcagggactgaggaatgtggcgaggaccgcttgcctaagtctgatagcgaggacggaccgagggctatgaatcatctcagcctgacccgtggtctgagtaggactagtatgaaaccaaggagttcgagaggaagtatcttcacatttaggaggcgtgacttaggttcagaggccgactttgcagacgacgagaattcgaccgcaggggagtcagagtctcaccatacttccctacttgtaccatggcccctccggcgtacttccgcccaggggcagccgtcgcccggtaccagcgcccctggtcacgccctccacggcaagaagaatagtactgtggactgcaacggcgtcgtatcgttgcttggtgctggcgatcctgaagcaacctcacctgggagtcacttactgcgacctgtaatgctcgaacacccccctgacaccactacaccgtctgaggaacccggtggtcctcaaatgctgacttcccaggccccttgtgtagacggcttcgaggaacccggtgcaaggcagcgcgcacttagtgccgtgagtgtgcttacaagtgcccttgaggagctggaagagtctaggcacaaatgcccgccttgctggaaccgccttgcccagaggtacctgatctgggaatgttgcccactctggatgagcattaaacagggcgtgaagcttgtggtaatggatcctttcacagacctcacgataaccatgtgcatcgtgctaaacacactctttatggccctagaacattataacatgacgagtgagtttgaagaaatgctccaggttggaaacctggtcttcacagggattttcacagcagaaatgacatttaagatcattgctctggatccttactattacttccagcaagggtggaatatttttgactcaattattgtgattctgtccttgatggagcttggcctttcccgaatgtccaaccttagcgtcctcaggtctttccgcctcctgcgggtatttaagttagctaaatcatggccaacacttaatacccttataaagattattgggaatagcgtgggtgcactcggaaatctgaccctcgtgctcgctatcatcgtgttcatctttgcagtagtgggcatgcaactgttcggcaaaaactattctgaattacgcgacagcgacagtggactactaccccgttggcacatgatggatttttttcatgcgttcctcatcatttttcgtattctttgtggcgagtggattgagaccatgtgggactgtatggaggtgagcgggcagtccctctgcttgctcgtatttcttctcgtgatggttattgggaatctcgttgtgcttaacctttttctggcactcttactgtccagcttctccgcagacaacctgactgctcctgatgaagatcgggagatgaacaacctccagcttgctttagccagaattcagaggggcctccgcttcgtgaagcggactacatgggacttttgctgtgggcttcttaggcagagaccgcaaaaacccgctgctctcgcagcacagggacaactcccttcttgcatagctaccccttactcccctccgccaccagaaactgagaaggtgccaccgactagaaaggaaacgcggttcgaagagggcgagcagcccggacagggaacaccgggtgatccagagccagtttgcgtgcctatcgccgtggccgagtcagacactgacgaccaggaagaggatgaggagaacagcttagggacagaggaggaatcttctaaacagcaagagagccagcccgtgtcagggggaccagaagcgccaccagacagcagaacatggtcccaggtcagtgccaccgcatcttccgaggctgaggcgagcgcctcccaggcggactggcgccagcagtggaaagctgaaccacaagccccaggctgtggcgagactcccgaagactcttgtagcgagggatcaactgcagacatgactaataccgccgaactgttggagcagatccctgacttgggccaggatgtcaaggacccagaggactgtttcaccgaaggctgcgtcagaaggtgcccatgttgtgcagttgataccacacaggctccaggtaaggtttggtggaggctgcggaaaacatgttatcacattgtcgaacattcgtggttcgagacatttataatctttatgatcctgttgtcttcaggcgcactggcattcgaagacatataccttgaggaacggaagactataaaggtcctcctcgagtacgctgacaagatgttcacatatgtgttcgtccttgaaatgctgttgaaatgggttgcatacgggtttaagaaatacttcaccaatgcctggtgctggctagacttcctgatagtggacgtatcacttgtctccttagtagccaacactttaggcttcgccgaaatgggtcctatcaagtcgttacgaacgcttagagccctccggccactaagggcactcagcaggtttgaaggcatgcgagtggtggtaaacgcgctggtaggggctatcccctctattatgaatgtactgctggtttgtctgattttctggttgattttctccataatgggagttaatttgtttgcaggtaaattcgggaggtgcatcaaccaaactgaaggagatctgccccttaactataccatcgtgaataacaagtcccagtgcgagtccctcaatctgacaggcgagctatactggacaaaagtgaaagttaactttgacaacgtgggcgctggatacctggcactcctgcaggttgcaaccttcaaaggctggatggacatcatgtatgcagcggtggatagcagaggctatgaagagcagccgcagtgggagtacaacctctatatgtatatctactttgtgatcttcattattttcggcagtttcttcactctgaacctgtttatcggggtgataattgacaacttcaatcagcagaaaaagaaactgggcggtcaggatatttttatgactgaagagcaaaagaaatactacaacgcgatgaagaaactgggctctaagaagccacagaagcctatacctcggccattaaacaaataccagggttttatctttgatattgtgacgaagcaagccttcgatgtcactatcatgttcctaatatgtttgaacatggtcacaatgatggtggagaccgatgaccaatcacctgaaaagataaatattctcgccaagatcaacttgctttttgtcgccatctttacaggggaatgtatcgtgaaactggccgctctgaggcactattacttcaccaattcatggaatattttcgactttgtggtcgtcatcctcagcattgtgggcacagtgctgagcgatatcatccagaaatatttcttttcgcctaccctctttcgggttataaggctagctcgaatcggacgcatcctccgcctcattagaggcgctaagggtatccgtaccttactttttgcacttatgatgagcctacctgcactcttcaacatcgggctgctcctgtttctggtaatgtttatctactccattttcggcatggcgaactttgcctatgttaaatgggaagccggaattgatgacatgtttaactttcagacgtttgctaattccatgctgtgcctttttcagatcactacgtcagcaggttgggacggcttactttcaccaattctgaatacaggacctccttactgtgatcccacactgcctaatagcaatggctcgcgcggtgactgcggatcccccgcagtcggaatcctgttcttcaccacttacatcatcattagctttctgatcgtcgtgaacatgtacatcgccatcatcctggagaatttttcagtagccacggaggaatcaacagaaccactatccgaggatgattttgatatgttttacgaaatctgggaaaagttcgatccagaagccacccagtttatagagtatagcgtgctgtccgacttcgcagacgccctgtcagaaccgttgcgtatagccaagcctaaccagatttctctcatcaacatggatctaccaatggtctccggtgaccggatccattgcatggacatcctttttgcattcacgaagagggtattaggggagtcgggcgagatggatgctttgaaaatacagatggaggagaagttcatggccgcaaatcctagtaagatttcctatgaacctatcacgacaactctgcgccgtaagcatgaagaggtgagtgcaatggtcatccaacgggcatttaggcgccatctgctgcagcgaagtcttaagcacgcctccttcctttttcggcaacaggccggaagtggactttccgaagaggacgccccagaaagggaagggctgattgcctacgtcatgtctgaaaatttcagtcgtccgttaggtcccccatcatcatcttctatcagttccacttctttccctcccagttacgattctgtgacaagggcaacctcagataatctgcaggtgcggggttctgattattcacattccgaggatctggcggactttcccccatctcccgatcgagatcgagagtctatagttta

SEQ ID NO: 287153 - DNA, 8456 bp, Artificial Sequence
  derived and/or modified sequence
gccgctgagcctgcgcccagtgccccgagccccgcgccgagccgagtccgcgccaagcagcagccgcccaccccggggcccggccgggggaccagcagcttccccacaggcaacgtgaggagagcctgtgcccagaagcaggatgagaagatggcaaacttcctattacctcggggcaccagcagcttccgcaggttcacacgggagtccctggcagccatcgagaagcgcatggcagagaagcaagcccgcggctcaaccaccttgcaggagagccgagaggggctgcccgaggaggaggctccccggccccagctggacctgcaggcctccaaaaagctgccagatctctatggcaatccaccccaagagctcatcggagagcccctggaggacctggaccccttctatagcacccaaaagactttcatcgtactgaataaaggcaagaccatcttccggttcagtgccaccaacgccttgtatgtcctcagtcccttccaccccatccggagagcggctgtgaagattctggttcactcgctcttcaacatgctcatcatgtgcaccatcctcaccaactgcgtgttcatggcccagcacgaccctccaccctggaccaagtatgtcgagtacaccttcaccgccatttacacctttgagtctctggtcaagattctggctcgaggcttctgcctgcacgcgttcactttccttcgggacccatggaactggctggactttagtgtgattatcatggcatacacaactgaatttgtggacctgggcaatgtctcagccttacgcaccttccgagtcctccgggccctgaaaactatatcagtcatttcagggctgaagaccatcgtgggggccctgatccagtctgtgaagaagctggctgatgtgatggtcctcacagtcttctgcctcagcgtctttgccctcatcggcctgcagctcttcatgggcaacctaaggcacaagtgcgtgcgcaacttcacagcgctcaacggcaccaacggctccgtggaggccgacggcttggtctgggaatccctggacctttacctcagtgatccagaaaattacctgctcaagaacggcacctctgatgtgttactgtgtgggaacagctctgacgctgggacatgtccggagggctaccggtgcctaaaggcaggcgagaaccccgaccacggctacaccagcttcgattcctttgcctgggcctttcttgcactcttccgcctgatgacgcaggactgctgggagcgcctctatcagcagaccctcaggtccgcagggaagatctacatgatcttcttcatgcttgtcatcttcctggggtccttctacctggtgaacctgatcctggccgtggtcgcaatggcctatgaggagcaaaaccaagccaccatcgctgagaccgaggagaaggaaaagcgcttccaggaggccatggaaatgctcaagaaagaacacgaggccctcaccatcaggggtgtggataccgtgtcccgtagctccttggagatgtcccctttggccccagtaaacagccatgagagaagaagcaagaggagaaaacggatgtcttcaggaactgaggagtgtggggaggacaggctccccaagtctgactcagaagatggtcccagagcaatgaatcatctcagcctcacccgtggcctcagcaggacttctatgaagccacgttccagccgcgggagcattttcacctttcgcaggcgagacctgggttctgaagcagattttgcagatgatgaaaacagcacagcgggggagagcgagagccaccacacatcactgctggtgccctggcccctgcgccggaccagtgcccagggacagcccagtcccggaacctcggctcctggccacgccctccatggcaaaaagaacagcactgtggactgcaatggggtggtctcattactgggggcaggcgacccagaggccacatccccaggaagccacctcctccgccctgtgatgctagagcacccgccagacacgaccacgccatcggaggagccaggcgggccccagatgctgacctcccaggctccgtgtgtagatggcttcgaggagccaggagcacggcagcgggccctcagcgcagtcagcgtcctcaccagcgcactggaagagttagaggagtctcgccacaagtgtccaccatgctggaaccgtctcgcccagcgctacctgatctgggagtgctgcccgctgtggatgtccatcaagcagggagtgaagttggtggtcatggacccgtttactgacctcaccatcactatgtgcatcgtactcaacacactcttcatggcgctggagcactacaacatgacaagtgaattcgaggagatgctgcaggtcggaaacctggtcttcacagggattttcacagcagagatgaccttcaagatcattgccctcgacccctactactacttccaacagggctggaacatcttcgacagcatcatcgtcatccttagcctcatggagctgggcctgtcccgcatgagcaacttgtcggtgctgcgctccttccgcctgctgcgggtcttcaagctggccaaatcatggcccaccctgaacacactcatcaagatcatcgggaactcagtgggggcactggggaacctgacactggtgctagccatcatcgtgttcatctttgctgtggtgggcatgcagctctttggcaagaactactcggagctgagggacagcgactcaggcctgctgcctcgctggcacatgatggacttctttcatgccttcctcatcatcttccgcatcctctgtggagagtggatcgagaccatgtgggactgcatggaggtgtcggggcagtcattatgcctgctggtcttcttgcttgttatggtcattggcaaccttgtggtcctgaatctcttcctggccttgctgctcagctccttcagtgcagacaacctcacagcccctgatgaggacagagagatgaacaacctccagctggccctggcccgcatccagaggggcctgcgctttgtcaagcggaccacctgggatttctgctgtggtctcctgcggcagcggcctcagaagcccgcagcccttgccgcccagggccagctgcccagctgcattgccaccccctactccccgccacccccagagacggagaaggtgcctcccacccgcaaggaaacacggtttgaggaaggcgagcaaccaggccagggcacccccggggatccagagcccgtgtgtgtgcccatcgctgtggccgagtcagacacagatgaccaagaagaagatgaggagaacagcctgggcacggaggaggagtccagcaagcagcaggaatcccagcctgtgtccggtggcccagaggcccctccggattccaggacctggagccaggtgtcagcgactgcctcctctgaggccgaggccagtgcatctcaggccgactggcggcagcagtggaaagcggaaccccaggccccagggtgcggtgagaccccagaggacagttgctccgagggcagcacagcagacatgaccaacaccgctgagctcctggagcagatccctgacctcggccaggatgtcaaggacccagaggactgcttcactgaaggctgtgtccggcgctgtccctgctgtgcggtggacaccacacaggccccagggaaggtctggtggcggttgcgcaagacctgctaccacatcgtggagcacagctggttcgagacattcatcatcttcatgatcctactcagcagtggagcgctggccttcgaggacatctacctagaggagcggaagaccatcaaggttctgcttgagtatgccgacaagatgttcacatatgtcttcgtgctggagatgctgctcaagtgggtggcctacggcttcaagaagtacttcaccaatgcctggtgctggctcgacttcctcatcgtagacgtctctctggtcagcctggtggccaacaccctgggctttgccgagatgggccccatcaagtcactgcggacgctgcgtgcactccgtcctctgagagctctgtcacgatttgagggcatgagggtggtggtcaatgccctggtgggcgccatcccgtccatcatgaacgtcctcctcgtctgcctcatcttctggctcatcttcagcatcatgggcgtgaacctctttgcggggaagtttgggaggtgcatcaaccagacagagggagacttgcctttgaactacaccatcgtgaacaacaagagccagtgtgagtccttgaacttgaccggagaattgtactggaccaaggtgaaagtcaactttgacaacgtgggggccgggtacctggcccttctgcaggtggcaacatttaaaggctggatggacattatgtatgcagctgtggactccagggggtatgaagagcagcctcagtgggaatacaacctctacatgtacatctattttgtcattttcatcatctttgggtctttcttcaccctgaacctctttattggtgtcatcattgacaacttcaaccaacagaagaaaaagttagggggccaggacatcttcatgacagaggagcagaagaagtactacaatgccatgaagaagctgggctccaagaagccccagaagcccatcccacggcccctgaacaagtaccagggcttcatattcgacattgtgaccaagcaggcctttgacgtcaccatcatgtttctgatctgcttgaatatggtgaccatgatggtggagacagatgaccaaagtcctgagaaaatcaacatcttggccaagatcaacctgctctttgtggccatcttcacaggcgagtgtattgtcaagctggctgccctgcgccactactacttcaccaacagctggaatatcttcgacttcgtggttgtcatcctctccatcgtgggcactgtgctctcggacatcatccagaagtacttcttctccccgacgctcttccgagtcatccgcctggcccgaataggccgcatcctcagactgatccgaggggccaaggggatccgcacgctgctctttgccctcatgatgtccctgcctgccctcttcaacatcgggctgctgctcttcctcgtcatgttcatctactccatctttggcatggccaacttcgcttatgtcaagtgggaggctggcatcgacgacatgttcaacttccagaccttcgccaacagcatgctgtgcctcttccagatcaccacgtcggccggctgggatggcctcctcagccccatcctcaacactgggccgccctactgcgaccccactctgcccaacagcaatggctctcggggggactgcgggagcccagccgtgggcatcctcttcttcaccacctacatcatcatctccttcctcatcgtggtcaacatgtacattgccatcatcctggagaacttcagcgtggccacggaggagagcaccgagcccctgagtgaggacgacttcgatatgttctatgagatctgggagaaatttgacccagaggccactcagtttattgagtattcggtcctgtctgactttgccgatgccctgtctgagccactccgtatcgccaagcccaaccagataagcctcatcaacatggacctgcccatggtgagtggggaccgcatccattgcatggacattctctttgccttcaccaaaagggtcctgggggagtctggggagatggacgccctgaagatccagatggaggagaagttcatggcagccaacccatccaagatctcctacgagcccatcaccaccacactccggcgcaagcacgaagaggtgtcggccatggttatccagagagccttccgcaggcacctgctgcaacgctctttgaagcatgcctccttcctcttccgtcagcaggcgggcagcggcctctccgaagaggatgcccctgagcgagagggcctcatcgcctacgtgatgagtgagaacttctcccgaccccttggcccaccctccagctcctccatctcctccacttccttcccaccctcctatgacagtgtcactagagccaccagcgataacctccaggtgcgggggtctgactacagccacagtgaagatctcgccgacttccccccttctccggacagggaccgtgagtccatcgtgtgagcctcggcctggctggccaggacacactgaaaagcagcctttttcaccatggcaaacctaaatgcagtcagtcacaaaccagcctggggccttcctggctttgggagtaagaaatgggcctcagccccgcggatcaaccaggcagagttctgtggcgccgcgtggacagccggagcagttggcctgtgcttggaggcctcagatagacctgtgacctggtctggtcaggcaatgccctgcggctctggaaagcaacttcatcccagctgctgaggcgaaatataaaactgagactgtatatgttgtgaatgggctttcataaatttattatatttgatatttttttacttgagcaaagaactaaggatttttccatggacatgggcagcaattcacgctgtctcttcttaaccctgaacaagagtgtctatggagcagccggaagtctgttctcaaagcagaagtggaatccagtgtggctcccacaggtcttcactgcccaggggtcgaatggggtccccctcccacttgacctgagatgctgggagggctgaacccccactcacacaagcacacacacacagtcctcacacacggaggccagacacaggccgtgggacccaggctcccagcctaagggagacaggcctttccctgccggccccccaaggatggggttcttgtccacggggctcactctggccccctattgtctccaaggtcccattttccccctgtgttttcacgcaggtcatattgtcagtcctacaaaaataaaaggcttccagaggagagtggcctgggtcccagggctggccctaggcactgatagttgccttttcttcccctcctgtaagagtattaacaaaaccaaaggacacaagggtgcaagccccattcacggcctggcatgcagcttgtccttgctcctggaacctggcaggccctgcccagccagccatcggaagagagggctgagccatgggggtttggggctaagaagttcaccagccctgagccatggcggcccctcagcctgcctgaagagaggaaactggcgatctcccagggctctctggaccatacgcggaggagttttctgtgtggtctccagctcctctccagacacagagacatgggagtggggagcggagcttggccctgcgccctgtgcagggaaagggatggtcaggcccagttctcgtgcccttagaggggaatgaaccatggcacctttgagagagggggcactgtggtcaggcccagcctctctggctcagcccgggatcctgatggcacccacacagaggacctctttggggcaagatccaggtggtcccataggtcttgtgaaaaggctttttcagggaaaaatattttactagtccaatcacccccaggacctcttcagctgctgacaatcctatttagcatatgcaaatcttttaacatagagaactgtcaccctgaggtaacagggtcaactggcgaagcctgagcaggcaggggcttggctgccccattccagctctcccatggagcccctccaccgggcgcatgcctcccaggccacctcagtctcacctgccggctctgggctggctgctcctaacctacctcgccgagctgtcggagggctggacatttgtggcagtgctgaagggggcattgccggcgagtaaagtattatgtttcttcttgtcaccccagttcccttggtggcaaccccagacccaacccatgcccctgacagatctagttctcttctcctgtgttccctttgagtccagtgtgggacacggtttaactgtcccagcgacatttctccaagtggaaatcctatttttgtagatctccatgctttgctctcaaggcttggagaggtatgtgcccctcctgggtgctcaccgcctgctacacaggcaggaatgcggttgggaggcaggtcgggctgccagcccagctggccggaaggagactgtggtttttgtgtgtgtggacagcccgggagctttgagacaggtgcctggggctggctgcagacggtgtggttgggggtgggaggtgagctagacccaacccttagcttttagcctggctgtcacctttttaatttccagaactgcacaatgaccagcaggagggaaggacagacatcaagtgccagatgttgtctgaactaatcgagcacttctcaccaaacttcatgtataaataaaatacatatttttaaaacaaaccaataaatggcttac

SEQ ID NO: 287154 - DNA, 6051 bp, Artificial Sequence
  derived and/or modified sequence
atggccaacttcctgctgcccagaggcaccagcagcttcagaagattcaccagagagagcctggccgccatcgagaagagaatggccgagaagcaggccagaggcagcaccaccctgcaggagagcagagagggcctgcccgaggaggaggcccccagaccccagctggacctgcaggccagcaagaagctgcccgacctgtacggcaaccccccccaggagctgatcggcgagcccctggaggacctggaccccttctacagcacccagaagaccttcatcgtgctgaacaagggcaagaccatcttcagattcagcgccaccaacgccctgtacgtgctgagccccttccaccccatcagaagagccgccgtgaagatcctggtgcacagcctgttcaacatgctgatcatgtgcaccatcctgaccaactgcgtgttcatggcccagcacgacccccccccctggaccaagtacgtggagtacaccttcaccgccatctacaccttcgagagcctggtgaagatcctggccagaggcttctgcctgcacgccttcaccttcctgagagacccctggaactggctggacttcagcgtgatcatcatggcctacaccaccgagttcgtggacctgggcaacgtgagcgccctgagaaccttcagagtgctgagagccctgaagaccatcagcgtgatcagcggcctgaagaccatcgtgggcgccctgatccagagcgtgaagaagctggccgacgtgatggtgctgaccgtgttctgcctgagcgtgttcgccctgatcggcctgcagctgttcatgggcaacctgagacacaagtgcgtgagaaacttcaccgccctgaacggcaccaacggcagcgtggaggccgacggcctggtgtgggagagcctggacctgtacctgagcgaccccgagaactacctgctgaagaacggcaccagcgacgtgctgctgtgcggcaacagcagcgacgccggcacctgccccgagggctacagatgcctgaaggccggcgagaaccccgaccacggctacaccagcttcgacagcttcgcctgggccttcctggccctgttcagactgatgacccaggactgctgggagagactgtaccagcagaccctgagaagcgccggcaagatctacatgatcttcttcatgctggtgatcttcctgggcagcttctacctggtgaacctgatcctggccgtggtggccatggcctacgaggagcagaaccaggccaccatcgccgagaccgaggagaaggagaagagattccaggaggccatggagatgctgaagaaggagcacgaggccctgaccatcagaggcgtggacaccgtgagcagaagcagcctggagatgagccccctggcccccgtgaacagccacgagagaagaagcaagagaagaaagagaatgagcagcggcaccgaggagtgcggcgaggacagactgcccaagagcgacagcgaggacggccccagagccatgaaccacctgagcctgaccagaggcctgagcagaaccagcatgaagcccagaagcagcagaggcagcatcttcaccttcagaagaagagacctgggcagcgaggccgacttcgccgacgacgagaacagcaccgccggcgagagcgagagccaccacaccagcctgctggtgccctggcccctgagaagaaccagcgcccagggccagcccagccccggcaccagcgcccccggccacgccctgcacggcaagaagaacagcaccgtggactgcaacggcgtggtgagcctgctgggcgccggcgaccccgaggccaccagccccggcagccacctgctgagacccgtgatgctggagcacccccccgacaccaccacccccagcgaggagcccggcggcccccagatgctgaccagccaggccccctgcgtggacggcttcgaggagcccggcgccagacagagagccctgagcgccgtgagcgtgctgaccagcgccctggaggagctggaggagagcagacacaagtgccccccctgctggaacagactggcccagagatacctgatctgggagtgctgccccctgtggatgagcatcaagcagggcgtgaagctggtggtgatggaccccttcaccgacctgaccatcaccatgtgcatcgtgctgaacaccctgttcatggccctggagcactacaacatgaccagcgagttcgaggagatgctgcaggtgggcaacctggtgttcaccggcatcttcaccgccgagatgaccttcaagatcatcgccctggacccctactactacttccagcagggctggaacatcttcgacagcatcatcgtgatcctgagcctgatggagctgggcctgagcagaatgagcaacctgagcgtgctgagaagcttcagactgctgagagtgttcaagctggccaagagctggcccaccctgaacaccctgatcaagatcatcggcaacagcgtgggcgccctgggcaacctgaccctggtgctggccatcatcgtgttcatcttcgccgtggtgggcatgcagctgttcggcaagaactacagcgagctgagagacagcgacagcggcctgctgcccagatggcacatgatggacttcttccacgccttcctgatcatcttcagaatcctgtgcggcgagtggatcgagaccatgtgggactgcatggaggtgagcggccagagcctgtgcctgctggtgttcctgctggtgatggtgatcggcaacctggtggtgctgaacctgttcctggccctgctgctgagcagcttcagcgccgacaacctgaccgcccccgacgaggacagagagatgaacaacctgcagctggccctggccagaatccagagaggcctgagattcgtgaagagaaccacctgggacttctgctgcggcctgctgagacagagaccccagaagcccgccgccctggccgcccagggccagctgcccagctgcatcgccaccccctacagcccccccccccccgagaccgagaaggtgccccccaccagaaaggagaccagattcgaggagggcgagcagcccggccagggcacccccggcgaccccgagcccgtgtgcgtgcccatcgccgtggccgagagcgacaccgacgaccaggaggaggacgaggagaacagcctgggcaccgaggaggagagcagcaagcagcaggagagccagcccgtgagcggcggccccgaggccccccccgacagcagaacctggagccaggtgagcgccaccgccagcagcgaggccgaggccagcgccagccaggccgactggagacagcagtggaaggccgagccccaggcccccggctgcggcgagacccccgaggacagctgcagcgagggcagcaccgccgacatgaccaacaccgccgagctgctggagcagatccccgacctgggccaggacgtgaaggaccccgaggactgcttcaccgagggctgcgtgagaagatgcccctgctgcgccgtggacaccacccaggcccccggcaaggtgtggtggagactgagaaagacctgctaccacatcgtggagcacagctggttcgagaccttcatcatcttcatgatcctgctgagcagcggcgccctggccttcgaggacatctacctggaggagagaaagaccatcaaggtgctgctggagtacgccgacaagatgttcacctacgtgttcgtgctggagatgctgctgaagtgggtggcctacggcttcaagaagtacttcaccaacgcctggtgctggctggacttcctgatcgtggacgtgagcctggtgagcctggtggccaacaccctgggcttcgccgagatgggccccatcaagagcctgagaaccctgagagccctgagacccctgagagccctgagcagattcgagggcatgagagtggtggtgaacgccctggtgggcgccatccccagcatcatgaacgtgctgctggtgtgcctgatcttctggctgatcttcagcatcatgggcgtgaacctgttcgccggcaagttcggcagatgcatcaaccagaccgagggcgacctgcccctgaactacaccatcgtgaacaacaagagccagtgcgagagcctgaacctgaccggcgagctgtactggaccaaggtgaaggtgaacttcgacaacgtgggcgccggctacctggccctgctgcaggtggccaccttcaagggctggatggacatcatgtacgccgccgtggacagcagaggctacgaggagcagccccagtgggagtacaacctgtacatgtacatctacttcgtgatcttcatcatcttcggcagcttcttcaccctgaacctgttcatcggcgtgatcatcgacaacttcaaccagcagaagaagaagctgggcggccaggacatcttcatgaccgaggagcagaagaagtactacaacgccatgaagaagctgggcagcaagaagccccagaagcccatccccagacccctgaacaagtaccagggcttcatcttcgacatcgtgaccaagcaggccttcgacgtgaccatcatgttcctgatctgcctgaacatggtgaccatgatggtggagaccgacgaccagagccccgagaagatcaacatcctggccaagatcaacctgctgttcgtggccatcttcaccggcgagtgcatcgtgaagctggccgccctgagacactactacttcaccaacagctggaacatcttcgacttcgtggtggtgatcctgagcatcgtgggcaccgtgctgagcgacatcatccagaagtacttcttcagccccaccctgttcagagtgatcagactggccagaatcggcagaatcctgagactgatcagaggcgccaagggcatcagaaccctgctgttcgccctgatgatgagcctgcccgccctgttcaacatcggcctgctgctgttcctggtgatgttcatctacagcatcttcggcatggccaacttcgcctacgtgaagtgggaggccggcatcgacgacatgttcaacttccagaccttcgccaacagcatgctgtgcctgttccagatcaccaccagcgccggctgggacggcctgctgagccccatcctgaacaccggccccccctactgcgaccccaccctgcccaacagcaacggcagcagaggcgactgcggcagccccgccgtgggcatcctgttcttcaccacctacatcatcatcagcttcctgatcgtggtgaacatgtacatcgccatcatcctggagaacttcagcgtggccaccgaggagagcaccgagcccctgagcgaggacgacttcgacatgttctacgagatctgggagaagttcgaccccgaggccacccagttcatcgagtacagcgtgctgagcgacttcgccgacgccctgagcgagcccctgagaatcgccaagcccaaccagatcagcctgatcaacatggacctgcccatggtgagcggcgacagaatccactgcatggacatcctgttcgccttcaccaagagagtgctgggcgagagcggcgagatggacgccctgaagatccagatggaggagaagttcatggccgccaaccccagcaagatcagctacgagcccatcaccaccaccctgagaagaaagcacgaggaggtgagcgccatggtgatccagagagccttcagaagacacctgctgcagagaagcctgaagcacgccagcttcctgttcagacagcaggccggcagcggcctgagcgaggaggacgcccccgagagagagggcctgatcgcctacgtgatgagcgagaacttcagcagacccctgggcccccccagcagcagcagcatcagcagcaccagcttcccccccagctacgacagcgtgaccagagccaccagcgacaacctgcaggtgagaggcagcgactacagccacagcgaggacctggccgacttcccccccagccccgacagagacagagagagcatcgtgtag

SEQ ID NO: 287155 - DNA, 279 bp, Artificial Sequence
  derived and/or modified sequence
atgctggtggccggcctgctgctgtgggccagcctgctgaccggcgcctggcccagcttccccacccaggaccacctgcccgccacccccagagtgagactgagcttcaaggagctgaaggccaccggcaccgcccacttcttcaacttcctgctgaacaccaccgactacagaatcctgctgaaggacgaggaccacgacagaatgtacgtgggcagcaaggactacgtgctgagcctggacctgcacgacatcaacagagagcccctgatcgtgtag

SEQ ID NO: 287156 - DNA, 279 bp, Artificial Sequence
  derived and/or modified sequence
atgctagtggccggtctcctgctgtgggcatccctcctgactggggcatggccttcgttccccactcaggatcacctccccgctacacctagggtccgtctctctttcaaggagctcaaggccacggggacagctcacttcttcaactttctcctgaacaccacagactacagaatcttgctcaaagatgaggatcatgaccggatgtacgtgggttccaaggactacgttctatccctggatctgcatgatattaaccgcgagcccctgatcgtttag

SEQ ID NO: 287157 - DNA, 279 bp, Artificial Sequence
  derived and/or modified sequence
atgctggtggccggcctgctgctgtgggccagcctgctgaccggggcctggcccagcttccccacccaggaccacctgcctgccaccccccgggtgcggctgtccttcaaggagctgaaggccaccggcacagcccacttcttcaacttcctgctgaacaccacagactaccgcatcctgctgaaggatgaggaccatgacaggatgtatgtgggcagcaaggactatgtgctgagcctggacctgcatgacatcaaccgggagcccctgattgtgtag

SEQ ID NO: 287158 - DNA, 279 bp, Artificial Sequence
  derived and/or modified sequence
atgctggtggccggcctgctgctgtgggccagcctgctgaccggcgcgtggcctagctttcctacacaggatcacctcccggcaacacctcgggtgcgattgtctttcaaggaactcaaggctacgggcaccgctcattttttcaattttctgcttaacactaccgactaccgaatactgctgaaagacgaagatcacgaccggatgtatgtgggcagcaaagactacgtattgagccttgatcttcatgatataaaccgcgagccactgattgtgtag

SEQ ID NO: 287159 - DNA, 279 bp, Artificial Sequence
  derived and/or modified sequence
atgctggtcgccggactcctgctgtgggccagcttgttaaccggtgcttggccttcatttcctacccaggaccatcttccagccactccacgggtgcgactgtcgttcaaagagttgaaggctaccggaaccgctcatttcttcaatttccttctcaacacgaccgactacaggattctgctgaaggacgaggaccacgaccgcatgtatgtggggtcaaaggattacgttttatcccttgatctccacgacattaacagagaaccgctgatcgtatag

SEQ ID NO: 287160 - DNA, 757 bp, Artificial Sequence
  derived and/or modified sequence
gcggccgcggcgccgatcccggctgaggcgcagcggcgagaggtcgcgggcagggccatggccccggggggccgctagcgcggaccggcccaacgggagccgctccgtgccgccgccgccgcccgggcgcccaggccccgccgctgcggaagaggtgagtgcagcgggaaccgggagggagcgggcaggcggccgggccaccccgcgacccctctgggacccgcggcactgcaactccgcagaagtgtccggggagcgggtctcgtcgagccggggggctgcccgcggacataggggcaacaaggctggggtgggattcttacctgtcctggaggcccggaccccttacctacggggcggcgtatggatgtgtggatgatgtggcctgcggggtcacccatgtgcaaagcaactttttcctgcaaggttctgggtttctagagagtggagcctgcttcctgggccctaggcccctcccacaatgcttgtcgccggtcttcttctctgggcttccctactgaccggggcctggccatccttccccacccaggaccacctcccggccacgccccgggtccggctctcattcaaagagctgaaggccacaggcaccgcccacttcttcaacttcctgctcaacacaaccgactaccgaatcttgctcaaggacgaggaccacgaccgcatgtacgtgggcagcaaggactacgtgctgtccctggacctgcacgacatcaaccgcgagcccctcattgta

SEQ ID NO: 287161 - DNA, 243 bp, Artificial Sequence
  derived and/or modified sequence
atgtgcctcatcagtctatgtgtgagcttcacaagtgtgaacaagcgcgaacagaataaacccaagatcctcatcttgttgaagaaacgtctttcaggatgtttcatcaaggaggccagggggactcgcctgaaagggaaccagctcgcagttacgaaggcccgagacgatgggggactggctgaagatggagactccggtggagggaaagtgataaggttttggatctactttgaggggtag

SEQ ID NO: 287162 - DNA, 1676 bp, Artificial Sequence
  derived and/or modified sequence
aggactgtcagggtagtgggcgttgcgtgaggcgggtaaatgttcgcggaagcggcaaagacgacacggccttgtgggatggcggagtttaaggagaagcctgaggccccgactgagcagctggatgtcgcgtgcggccaggaaaacttgccggtgggcgcgtggcccccgggggccgcgccggcgcccttccagtacactcctgatcatgtagttggacctggagcagacattgatcccactcaaataacctttcccggatgcatttgtgtcaaaactccctgcctccctggcacttgctcctgtctccgccatggagagaactatgatgataactcatgccttagagatataggatctggaggaaagtatgcagagcctgtttttgaatgcaatgtcctgtgccgatgcagtgaccactgcagaaacagagtggtccagaaaggtctacagttccacttccaagtgttcaagacgcataaaaaaggctggggacttcgtaccttggaatttataccgaaaggaagaaaagtcgaacatcagttgtggaaatgagaaggaacccagcatgtgtggctcagccccttctgtgttcccctcctgcaagcgattgacccttgagactatgaaaatgatgttagacaaaaagcaaattcgagcaattttcttattcgagttcaaaatgggtcgtaaagcagcagaaacaactcgcaacatcaacaatgcatttggcccaggaactgctaacgaacgtacagtgcagtggtggttcaagaagttttgcaaaggagatgagagccttgaagatgaggagcgtagtggccggccatcagaagttgacaacgaccagttgagagcaatcatcgaagctgatccccttacaactacacgagaagttgctgaagaactcaatgtcaaccattctacggtcgttcgacatttgaagcaaattggaaaggtgaaaaagctcgataagtgggtgcctcatgagctgactgaaaatcaaaaaaatcgtcgttttgaagtgtcatcttctcttattctacgcaaccacaacgaaccatttctcgatcggattgtgacgtgtgatgaaaagtggattttatatgacaaccggcgacgatcagctcagtggttggatcaagaagaagctccaaagcacttcccaaagccaatcttgcacccaaaaaaggtcatggtcactatttggtggtctgctgctggtctgatccactacagctttctgaatcccggtgaaaccattacatctgagaagtatgctcaggaaatcgatgagatgaaccaaaaactgcaacgcctgcagctggcattggtcaacagaaagggcccaattcttctccacgacaatgcccgaccgcatgttgcacaacccacacttcaaaagttgaatgaattgggctatgaagttttgcctcatccaccgtattcacctgacctcttgccaaccaactaccacgtctttaagcatctcaacaactttttgcagggaaaacgcttccacaaccagcaggatgcagaaaatgctttccaagagttcgtcgaatcccaaagcacggatttttacgctacaggaataaaccaacttatttctcgttggcaaaaatgtgttgattgtaatggttcctattttgattaataaaaatgcgttgagccta

SEQ ID NO: 287163 - DNA, 458 bp, Artificial Sequence
  derived and/or modified sequence
aagtccaacagtgcgcgactccccaggtcaggagaagccccgatgtgtgcagaatctgcagatggggctgctctcggccctgcctctggctgtggaaacaggcctccaagtacccaagaaagcaaggagatggccaccaaggagaagctgcagtgtctgaaagatttccacaaggacatcctgaagccctcaccagggaagagcccaggcacgcggcctgaggacgaggctgagggaaaacctccgcagagggagaagtggtctagcaagatcgactttgtgctctctgtggctggcggcttcgtgggcttgggcaacgtctggcgcttcccgtacctctgctacaagaatggtggaggtgcgtttctcataccgtattttattttcctgtttgggagcggcctgcctgtgtttttcttggagatcatcataggccagtacacctctgaagggggcat

SEQ ID NO: 287164 - DNA, 408 bp, Artificial Sequence
  derived and/or modified sequence
atggtgcccgccccccccttcctgggcgtgctggagaaccccgtgccccagtgggacctgagcatcctgggcagcatcagaatcagagtgagccacaccgaggtgcagggcagcggcagcagcagaagccccgaggccctgagaaaggagagcctggaggtggagtggaccctggtgctgctggccatcccccccagaatccagcccagccagcaggacggcggcccccccaagtgctgcgacctgctgagagccgccctgctgggcagacactgccccctgtgcgtgcccgccggcgaggtgttcagccagaagagagacaacgagcaggacagaagcgagttcatcggccagaccctgaagctgctggtgaagagaaacgtgagcctggagctgagctgcagatag

SEQ ID NO: 287165 - DNA, 2368 bp, Artificial Sequence
  derived and/or modified sequence
tttaaaggaggtgatggggcttgcgctggcttgtcttcccacccaagtgaagagttgatgttcactggttatgcttagacaatgtgcagtttgtgttaatttaaaattttgggtgggataggggcataggcttgtgaagggcagtccggatccggaggaactcctctttgtccctggtaggagagacacccccagtctatcctcgatgccgtcagccttggccatcttcacttgccgcccgaactcgcacccgtttcaggagcgtcatgtctacctggacgagcccatcaaaatcggccgctcagtggcccgctgtcgaccagcgcagaataatgccacttttgattgcaaagtgctatcaaggaaccacgctctcgtctggtttgatcacaagacgggcaagttttatcttcaagacactaaaagtagtaatggtacttttataaatagccagagattgagtcgaggctctgaagaaagtccaccatgtgaaattctttccggtgacattatccagtttggagtagacgtgacagagaatacacggaaagttacccatgggtgtattgtttccacaataaaactttttctaccagatggtatggaagcccggctccgctcagatgtcatccatgcaccattaccaagtcctgttgacaaagttgctgctaacactccaagtatgtactctcaggaactattccagctttctcagtatctacaggaggccttacatcgggaacaaatgttggaacagaagttagccacgcttcagcggctactagccatcacccaagaggcttcagataccagttggcaggctttaatagatgaagatagactcttatcacggttagaagttatgggaaaccaattacaggcatgctccaaaaatcaaacagaagatagtttacgaaaggaacttatagcattacaagaggataaacataactatgagacaacagccaaagagtccctgaggcgggttcttcaggagaaaattgaagtggttagaaaactttcagaagttgagcgaagtctgagtaatactgaagatgaatgtacccatctgaaagaaatgaatgaaaggactcaggaagaattaagagaattagccaacaaatataatggagcagttaatgagattaaagatttatctgataaattaaaggtagcagagggaaaacaagaggaaatccaacagaagggacaggctgagaaaaaagaattacaacataaaatagatgaaatggaagaaaaagaacaggagctccaggcaaaaatagaagctttgcaagctgataatgatttcaccaatgaaaggctaacagctttacaagagcacttgctttcaaagagtggcggggactgcacttttattcatcaattcatagaatgccagaagaagctgatcgtcgaagggcatctaaccaaagcggtagaagaaacaaagctttcaaaagaaaatcagacaagagcaaaagaatctgatttttcagatactctgagtccaagcaaggaaaaaagcagtgacgacactacagacgcccaaatggatgagcaagacctaaatgagcctcttgccaaagtgtcccttttaaaagctcttttggaagaagaaagaaaagcctatcgaaatcaagttgaggaatccactaaacaaatacaggttcttcaagcccaattgcagaggttacacatcgatactgagaatctccgggaggagaaggacagtgaaatcacaagtactagagatgaattgcttagtgcccgagatgaaattttgctccttcatcaagcagcagcaaaggttgcctctgagcgggacactgacattgcttctttacaagaagagcttaagaaggtgagagctgagcttgagcggtggcggaaagcagcgtctgaatatgagaaagaaatcacaagtctgcaaaacagttttcagcttagatgtcaacagtgtgaggaccagcagagagaagaagcaacaaggttgcaaggtgaactagagaagttgagaaaggaatggaatgcattggaaaccgaatgccattctctaaaaagggaaaatgttttgctatcatcagaactgcaacggcaagaaaaagaattgcacaattctcagaagcagagtttagagcttaccagtgatctcagcatccttcaaatgtctaggaaagaacttgagaatcaagtgggatccttgaaagaacagcatcttcgggattcagctgatttaaaaactcttctcagtaaggcagaaaaccaagcaaaggatgtgcagaaagaggtaaagcgaaaagacattatgagcccaattatggttggacttaaagccaaaagcaaatcggatatccatgctagttag

SEQ ID NO: 287166 - protein, 59 aa, Artificial Sequence
  derived and/or modified sequence
MGTPASGRKRTPVKDRFSAEDEALSNIAREAEARLAAKRAARAEARDIRMRELERQQKE

SEQ ID NO: 287167 - DNA, 2202 bp, Artificial Sequence
  derived and/or modified sequence
ggccagttcctagtcggtggctcccatgctggtctctgatgtttaggaagtggtgtcagcagagactgagctgcaccctttctttggacagatggcaggagaggagaacttcaaggaagagctcagatcccaggatgcttccaggaacttgaaccagcatgaggtagcaggacatccacattcctggtctctggagatgctgttacgcagattgagggctgtccacaccaagcaggatgacaagtttgccaacctcctggatgcggtgggggagtttggcacattccagcagaggctagtagccctcacctttatccccagcatcatgtcggccttcttcatgtttgctgaccacttcgtgttcacagcccagaagccctattgcaataccagctggatcctggcagtgggcccccacctgtccaaagctgagcagctgaatctgaccataccccaagcacccaatggcagtttcctgacatgcttcatgtaccttcctgtgccttggaatctggattctatcatccagtttggcctcaatgacacagacacatgccaagatgggtggatctatcctgacgctaagaagcgatcgctgatcaatgagtttgacttggtatgtggcatggagacgaagaaggacactgcacagatcatgttcatggcagggctcccgataggctctctcatcttcaggctcataactgacaagatgggccgctaccctgccatcctgctgtcactgctggggctgatcatcttcggctttgggacagccttcatgaacagctttcacctgtatttgttctttcgctttggcatctcgcagtcagtggtgggctacgccatcagcagcatttctttggccactgagtggttagtgggtgagcaccgggcccatgccattatcctgggacactgctttttcgctgttggggccgtgttgctgacagggatcgcctacagtcttccccactggcagctgctgtttctggtgggtgggatacttgtgatccccttcatctcctatatctggattctcccggagtccccgcggtggctgatgatgaaagggaaggtgaaggaggccaagcaggtgctgtgctacgccgcaagtgtgaacaagaagaccattccttcaaatctgctggacgagctgcagctgcccagaaagaaggtgactcgggcctctgtcctggacttctgtaagaataggcagctctgcaaggtgaccttggtgatgagctgtgtgtggtttaccgtcagttacacctattttacgttgagcctgagaatgagagagctgggcgtgagcgtccacttcagacacgtggtccccagcatcatggaggtgcctgcccggctgtgctgcatctttctcctccagcagattgggaggaagtggagcctggctgtgactctcctccaagccatcatctggtgcttgcttctccttttcctccctgaaggggaggatggcctcagactcaagtggccacgttgtccggccacagagctgaaatccatgacgatcttggtgctcatgctcagagagttcagcctggccgccactgtcactgtgttcttcctctacaccgctgagctcctccccactgtgctcagggcgacaggtctggggctggtgtctctggcctcggtggctggagccatcttgtccctgacaatcatcagccagaccccctccctcctgcccatctttctctgctgcgtcttagccatcgtggccttttccctctcctccctgctgccggaaacgcgagatcagcccctctccgagagcctgaaccactcctcacagataaggaataaggtcaaggacatgaagactaaggaaacatcatctgatgatgtctgaggaagcggccaagaatgtcattctcaatgcccagatcctgagattggacccataccctgtctccaaccctgccttgaagcaattcaataaagaggaagcaaacagccaggctccctgagggccaggcccccagaccatcttgggttggaattgagtggccaagtatggggtcatggattccaggccacaaattccaggcctagttcagtctgggggcagggtcagtccttctcccaggccagcccttgacattaaaaaaaatgccccctccttctgcaggagctctgctgtgattcattccaataaaggtacaatgttggtcttga

SEQ ID NO: 287168 - DNA, 1827 bp, Artificial Sequence
  derived and/or modified sequence
gttctgcttccaagggtctggctgggcctggattgtggtcagatggcaggagaggagaacttcaaggaagagctcagatcccaggatgcttccaggaacttgaaccagcatgaggtagcaggacatccacattcctggtctctggagatgctgttacgcagattgagggctgtccacaccaagcaggatgacaagtttgccaacctcctggatgcggtgggggagtttggcacattccagcagaggctagtagccctcacctttatccccagcatcatgtcggccttcttcatgtttgctgaccacttcgtgttcacagcccagaagccctattgcaataccagctggatcctggcagtgggcccccacctgtccaaagctgagcagctgaatctgaccataccccaagcacccaatggcagtttcctgacatgcttcatgtaccttcctgtgccttggaatctggattctatcatccagtttggcctcaatgacacagacacatgccaagatgggtggatctatcctgacgctaagaagcgatcgctgatcaatgagtttgacttggtatgtggcatggagacgaagaaggacactgcacagatcatgttcatggcagggctcccgataggctctctcatcttcaggctcataactgacaagatgggccgctaccctgccatcctgctgtcactgctggggctgatcatcttcggctttgggacagccttcatgaacagctttcacctgtatttgttctttcgctttggcatctcgcagtcagtggtgggctacgccatcagcagcatttctttggccactgagtggttagtgggtgagcaccgggcccatgccattatcctgggacactgctttttcgctgttggggccgtgttgctgacagggatcgcctacagtcttccccactggcagctgctgtttctggtgggtgggatacttgtgatccccttcatctcctatatctggattctcccggagtccccgcggtggctgatgatgaaagggaaggtgaaggaggccaagcaggtgctgtgctacgccgcaagtgtgaacaagaagaccattccttcaaatctgctggacgagctgcagctgcccagaaagaaggtgactcgggcctctgtcctggacttctgtaagaataggcagctctgcaaggtgaccttggtgatgagctgtgtgtggtttaccgtcagttacacctattttacgttgagcctgagaatgagagagctgggcgtgagcgtccacttcagacacgtggtccccagcatcatggaggtgcctgcccggctgtgctgcatctttctcctccagcagattgggaggaagtggagcctggctgtgactctcctccaagccatcatctggtgcttgcttctccttttcctccctgaaggggaggatggcctcagactcaagtggccacgttgtccggccacagagctgaaatccatgacgatcttggtgctcatgctcagagagttcagcctggccgccactgtcactgtgttcttcctctacaccgctgagctcctccccactgtgctcagggcgacaggtctggggctggtgtctctggcctcggtggctggagccatcttgtccctgacaatcatcagccagaccccctccctcctgcccatctttctctgctgcgtcttagccatcgtggccttttccctctcctccctgctgccggaaacgcgagatcagcccctctccgagagcctgaaccactcctcacagataaggaataaggtcaaggacatgaagactaaggaaacatcatctgatgatgtctga

SEQ ID NO: 287169 - protein, 1058 aa, Artificial Sequence
  derived and/or modified sequence
MTTVVVHVDSKAELTTLLEQWEKEHGSGQDMVPILTRMSQLIEKETEEYRKGDPDPFDDRHPGRADPECMLGHLLRILFKNDDFMNALVNAYVMTSREPPLNTAACRLLLDIMPGLETAVVFQEKEGIVENLFKWAREADQPLRTYSTGLLGGAMENQDIAANYRDENSQLVAIVLRRLRELQLQEVALRQENKRPSPRKLSSEPLLPLDEEAVDMDYGDMAVDDAEIQKSALQIIINCVCGPDNRISSIGKFISGTPRRKLPQNPKSSEHTLAKMWNVVQSNNGIKVLLSLLSIKMPITDADQIRALACKALVGLSRSSTVRQIISKLPLFSSCQIQQLMKEPVLQDKRSDHVKFCKYAAELIERVSGKPLLIGTDVSLARLQKADVVAQSRISFPEKELLLLIRNHLISKGLGETATVLTKEADLPMTAASHSSAFTPVTAAASPVSLPRTPRIANGIATRLGSHAAVGASAPSAPTAHPQPRPPQGPLALPGPSYAGNSPLIGRISFIRERPSPCNGRKIRVLRQKSDHGAYSQSPAIKKQLDRHLPSPPTLDSIITEYLREQHARCKNPVATCPPFSLFTPHQCPEPKQRRQAPINFTSRLNRRASFPKYGGVDGGCFDRHLIFSRFRPISVFREANEDESGFTCCAFSARERFLMLGTCTGQLKLYNVFSGQEEASYNCHNSAITHLEPSRDGSLLLTSATWSQPLSALWGMKSVFDMKHSFTEDHYVEFSKHSQDRVIGTKGDIAHIYDIQTGNKLLTLFNPDLANNYKRNCATFNPTDDLVLNDGVLWDVRSAQAIHKFDKFNMNISGVFHPNGLEVIINTEIWDLRTFHLLHTVPALDQCRVVFNHTGTVMYGAMLQADDEDDLMEERMKSPFGSSFRTFNATDYKPIATIDVKRNIFDLCTDTKDCYLAVIENQGSMDALNMDTVCRLYEVGRQRLAEDEDEEEDQEEEEQEEEDDDEDDDDTDDLDELDTDQLLEAELEEDDNNENAGEDGDNDFSPSDEELANLLEEGEDGEDEDSDADEEVELILGDTDSSDNSDLEDDIILSLNE

SEQ ID NO: 287170 - protein, 143 aa, Artificial Sequence
  derived and/or modified sequence
MELGPEPPHRRRLLFACSPPPASQPVVKALFGASAAGGLSPVTNLTVTMDQLQGLGSDYEQPLEVKNNSNLQRMGSSESTDSGFCLDSPGPLDSKENLENPMRRIHSLPQKLLGCSPALKRSHSDSLDHDIFQLIDPDENKEN

SEQ ID NO: 287171 - DNA, 432 bp, Artificial Sequence
  derived and/or modified sequence
atggagctgggaccagagccaccacaccggagacgcctgctgtttgcatgctcgcccccccctgcaagccagcccgtggtgaaggcactgttcggcgctagcgctgccggcgggctctcgcctgtcaccaatttgacagtgactatggaccaactacaagggttgggaagtgactacgaacagccacttgaggtcaagaacaacagtaatctgcagcgcatgggtagctctgaatctactgactctggtttttgtttagatagtcctggccctctggattctaaagagaatctcgagaaccctatgaggcggattcacagcctccctcagaagttgctgggttgctctccggcgctcaaacggagtcactccgattccttggaccatgatatattccagctgattgacccggatgagaataaggagaactag

SEQ ID NO: 287172 - DNA, 432 bp, Artificial Sequence
  derived and/or modified sequence
atggagctgggccctgagcccccccacagaagaaggctgctgtttgcctgcagccccccaccagccagccagcctgtggtgaaggccctgtttggagccagcgctgctgggggcctgagccctgtgaccaacctgactgtgaccatggaccagctgcagggcctgggcagtgactatgagcagcccctggaggtgaagaacaacagcaacctgcagaggatgggcagcagcgagagcacagacagcggcttctgcctggacagccctggccccctggacagcaaggagaacctggagaaccccatgaggcgcatccacagcctgccccagaagctgctgggctgcagccctgccctgaagaggagccacagcgacagcctggaccatgacatcttccagctgattgatcctgatgagaacaaggagaactag

SEQ ID NO: 287173 - DNA, 432 bp, Artificial Sequence
  derived and/or modified sequence
atggagctgggccccgagcccccccaccggcggcggctgctgttcgcgtgtagcccacccccagcttcacagcccgtcgtaaaagccctgttcggggcctcagccgcagggggtttgtctccagtgaccaatcttacagtgacaatggaccagcttcaagggcttgggagcgattacgagcagcctctggaagtcaaaaataattccaacttgcagcgaatgggcagctccgaaagcaccgattcgggattttgtctggactcacctggccctctggatagcaaggagaatctggaaaatcccatgaggaggatacacagcctcccgcagaagctcctcggatgttctcctgccctgaaacgcagtcattcagattcgttagaccatgatatttttcagctgatcgaccccgacgagaataaagagaactag

SEQ ID NO: 287174 - DNA, 432 bp, Artificial Sequence
  derived and/or modified sequence
atggaactcgggccagaaccccctcacaggcggcgtctgctgtttgcgtgttctcctccacccgcaagccagcctgtcgtgaaggctctgtttggtgccagcgctgccggagggctatcccctgttacgaacctcacagtcaccatggatcagctgcaggggcttgggtccgactatgaacagcctttagaagtgaagaacaactcaaatttacaaagaatggggagcagcgaatccaccgactccggattctgtttggactcacctggcccactagattcaaaggaaaacctggagaaccccatgagacgaatccattctcttcctcaaaaactgctaggatgttccccggctctgaagagaagccacagtgactcactggatcacgacattttccagctgattgatccagatgagaataaagaaaattag

SEQ ID NO: 287175 - DNA, 730 bp, Artificial Sequence
  derived and/or modified sequence
ccgcgaaaggccggcctggctgcgacagcctgggttgccggcgcccgcccgcccgctggcctcgcggtgtgagagggaagcacccgtgcctgtggctggtggctggcgcctggagggtccgcacacccgcccggccgcgccgcttgcccgcggcagccgcgtccctgaaccgcggagtcgtgtttgtgtttgacccgcgggcgccggtggcgcgcggccgaggccggtgtcggcggggcggggcggtcgcggcggaggcagaggaagagggagcgggagctctgcgaggccgggcgccgccatggaactgggcccggagcccccgcaccgccgccgcctgctcttcgcctgcagcccccctcccgcgtcgcagcccgtcgtgaaggcgctatttggcgcttcagccgccgggggactgtcgcctgtcaccaacctgaccgtcactatggaccagctgcagggtctgggcagtgattatgagcaaccactggaggtgaagaacaacagtaatctgcagagaatgggctcctccgagtcaacagattcaggtttctgtctagattctcctgggccattggacagtaaagaaaaccttgaaaatcctatgagaagaatacattccctacctcagaagctgttgggatgtagtccagctctgaagaggagccattctgattctcttgaccatgacatctttcagctcatcgacccagatgagaacaaggaaaat

SEQ ID NO: 287176 - DNA, 432 bp, Artificial Sequence
  derived and/or modified sequence
atggagctgggccccgagcccccccacagaagaagactgctgttcgcctgcagccccccccccgccagccagcccgtggtgaaggccctgttcggcgccagcgccgccggcggcctgagccccgtgaccaacctgaccgtgaccatggaccagctgcagggcctgggcagcgactacgagcagcccctggaggtgaagaacaacagcaacctgcagagaatgggcagcagcgagagcaccgacagcggcttctgcctggacagccccggccccctggacagcaaggagaacctggagaaccccatgagaagaatccacagcctgccccagaagctgctgggctgcagccccgccctgaagagaagccacagcgacagcctggaccacgacatcttccagctgatcgaccccgacgagaacaaggagaactag

SEQ ID NO: 287177 - protein, 149 aa, Artificial Sequence
  derived and/or modified sequence
MAPAGNNKFSSKAMAETFYLSNIVPQDFDNNSGYWNRIEMYCRELTERFEDVWVVSGPLTLPQTRGDGKKIVSYQVIGEDNVAVPSHLYKDHAGCCVESPLGTRTSEEATARIQERDDGGSDQRSGLVELGIYFEGRANRISGRIGCRV

SEQ ID NO: 287178 - DNA, 450 bp, Artificial Sequence
  derived and/or modified sequence
atggcacctgcgggcaataacaaattctccagcaaggccatggccgagacattttacctatcaaacatagtgccacaggattttgacaacaacagcggctattggaatagaatcgaaatgtattgccgggagctcaccgagagatttgaagatgtgtgggttgttagtggacctctgacgctgccacagacccggggcgacggaaaaaagattgtgagttaccaggtgatcggggaggataatgttgcagtcccctctcatctgtacaaagaccacgctgggtgctgcgttgaaagccctttgggaacacgaacaagcgaagaagctactgccagaattcaggaaagggatgacggcggctctgaccaaaggtccggactagtggagctaggaatctatttcgagggaagagcaaatcggattagcggcagaataggctgtcgagtgtag

SEQ ID NO: 287179 - DNA, 450 bp, Artificial Sequence
  derived and/or modified sequence
atggccccagctggcaacaacaagttcagcagcaaggccatggccgagaccttctacctgagcaacatcgtgccccaggactttgacaacaacagcggctactggaaccgcatcgagatgtactgccgggagctgacagaaagatttgaagatgtgtgggtggtgtctggccccctgaccctgccccagaccagaggagatggcaagaagatcgtgtcctaccaggtgattggagaagataatgtggccgtgcccagccacctgtacaaggaccatgctggctgctgcgtggagagccccctgggcaccaggaccagcgaggaggccacagcccgcatccaggagagagatgatggcggcagtgaccagaggagcggcctggtggagctgggcatctactttgagggccgggccaaccgcatcagcggcagaattggctgccgggtgtag

SEQ ID NO: 287180 - DNA, 450 bp, Artificial Sequence
  derived and/or modified sequence
atggcccccgccggcaacaacaagttcagcagcaaggccatggccgagaccttttacctgtccaacattgtcccgcaggactttgacaataattctggctactggaacagaatcgagatgtattgtcgtgagctcacagaacgcttcgaggatgtctgggtcgtttccggtccccttactctgccacagactcggggggacggtaagaagatcgtcagctatcaggtaatcggcgaggataatgtcgcagtgccctcccatctgtacaaagatcatgccggatgctgcgtggaaagccccctcgggaccaggacaagcgaggaggccactgcccgcatccaggagcgtgatgacgggggctctgaccagaggtctggattagtcgagctgggcatttatttcgagggccgagccaacagaatctcgggccggatcggttgtcgcgtgtag

SEQ ID NO: 287181 - DNA, 450 bp, Artificial Sequence
  derived and/or modified sequence
atggcgccagccggaaataacaaattttcttctaaggccatggcagaaaccttctacctgagcaacatcgtgccacaagacttcgacaataactccggatactggaaccgcatcgagatgtactgtagagaactgaccgagcgcttcgaagacgtgtgggtcgtgtctggccctctgactctgccccagacaagaggcgatggcaagaaaatcgtcagctaccaggtgattggcgaagataatgtggccgttccttcacacctatataaagaccacgcgggttgttgtgtggaatctcccctggggactagaacttctgaggaagccacggctagaatacaggagcgtgatgatggcggatcagatcagaggtcaggactcgtggaactggggatctacttcgaaggccgtgccaatcgcataagtggacgcattggctgccgagtctag

SEQ ID NO: 287182 - DNA, 450 bp, Artificial Sequence
  derived and/or modified sequence
atggcccccgccggcaacaacaagttcagcagcaaggccatggccgagaccttctacctgagcaacatcgtgccccaggacttcgacaacaacagcggctactggaacagaatcgagatgtactgcagagagctgaccgagagattcgaggacgtgtgggtggtgagcggccccctgaccctgccccagaccagaggcgacggcaagaagatcgtgagctaccaggtgatcggcgaggacaacgtggccgtgcccagccacctgtacaaggaccacgccggctgctgcgtggagagccccctgggcaccagaaccagcgaggaggccaccgccagaatccaggagagagacgacggcggcagcgaccagagaagcggcctggtggagctgggcatctacttcgagggcagagccaacagaatcagcggcagaatcggctgcagagtgtag

SEQ ID NO: 287183 - DNA, 1227 bp, Artificial Sequence
  derived and/or modified sequence
atggaagttaacgctggcggcgtcatcgcatacattagcagctccagcagcgcctcaagtcctgcctcttgccactcagaagggtctgaaaatagttttcaaagcagctccagcagtgtgccctcctcaccaaattcctcaaactccgacacgaatggaaacccaaaaaatggagatttggctaatattgaaggtattttgaagaatgataggatcgactgcagcatgaagaccagtaaatcgtcggcacctggaatgaccaagtcacattccggtgtcactaaattcagcggcatggtccttctttgcaaagtgtgtggggacgtggcgtccgggtttcattatggggtgcatgcctgtgaaggctgtaaggggttctttaggcgctccatacagcaaaatattcaatataagaaatgcttaaaaaacgagaactgttccatcatgagaatgaatcgaaatagatgccagcagtgcaggttcaaaaaatgcttgagcgtcgggatgtctcgcgacgcagtgcgattcggaagaattcccaagagagaaaagcagcgaatgctcatcgagatgcaaagcgcgatgaagaccatgatgaactcacagttcagtggacatttgcagaatgacacgctcgttgaacaccatgaacagacggccttacctgcccaggaacaattgcggcccaaaccccagctggagcaagagaacatcaagagcagttcccctccgtcctcggactttgccaaggaggaagtcattgggatggtgactcgggcacataaagatactttcatgtacaaccaagagcagcaggaaaattcggctgaatctatgcaacctcagcgcggcgagagaattccaaaaaatatggagcagtataacctgaatcacgaccactgcggcaacggcctgtcttctcattttccctgctctgagtcacagcagcatctcaatggtcaatttaaaggacgaaacatcatgcactaccccaatggacacgcaatctgtattgccaacgggcactgtatgaacttctccaatgcatatacgcaacgggtttgtgatagagtccccatcgacgggtttagccaaaatgagaataaaaattcttacctgtgtaataccgggggacgcatgcacttgtactctgtgcatattcagcccaagttccatcagaagcaacaataccacactatctcaagccttaaccacgaagttctttag

SEQ ID NO: 287184 - DNA, 1227 bp, Artificial Sequence
  derived and/or modified sequence
atggaggtgaatgctgggggcgtgattgcctacatcagcagcagcagcagcgccagcagccctgccagctgccacagcgagggcagcgagaacagcttccagagcagcagcagctctgtgcccagcagccccaacagcagcaacagcgacaccaacggcaaccccaagaatggagacctggccaacatcgagggcatcctgaagaatgacagaattgactgcagcatgaagaccagcaagagcagcgcccctggcatgaccaagagccacagcggcgtgaccaagttcagcggcatggtgctgctgtgcaaggtgtgtggagatgtggccagcggcttccactatggagtgcacgcctgtgagggctgcaagggcttcttccgccgcagcatccagcagaacatccagtacaagaagtgcctgaagaatgaaaactgcagcatcatgaggatgaacagaaaccgctgccagcagtgccgcttcaagaagtgcctgtctgtgggcatgagcagagatgctgtgcgcttcggccgcatccccaagcgggagaagcagaggatgctgattgagatgcagagcgccatgaagaccatgatgaacagccagttcagcggccacctgcagaatgacaccctggtggagcaccacgagcagacagccctgcctgcccaggagcagctgcggcccaagccccagctggagcaggagaacatcaagagcagcagcccccccagcagtgactttgccaaggaggaggtgattggcatggtgacccgggcccacaaggacaccttcatgtacaaccaggagcagcaggagaacagcgctgagagcatgcagccccagagaggagagcgcatccccaagaacatggagcagtacaacctgaaccacgaccactgtggaaatggcctgagcagccacttcccctgcagcgagagccagcagcacctgaatggccagttcaagggcaggaacatcatgcactaccccaacggccacgccatctgcatcgccaacggccactgcatgaacttcagcaatgcctacacccagagggtgtgtgacagagtgcccattgatggcttcagccagaatgaaaacaagaacagctacctgtgcaacacaggaggccgcatgcacctgtacagcgtgcacatccagcccaagttccaccagaagcagcagtaccacaccatcagcagcctgaaccacgaggtgctgtag

SEQ ID NO: 287185 - DNA, 1227 bp, Artificial Sequence
  derived and/or modified sequence
atggaggtgaacgccggcggcgtgatcgcctacatcagcagcagctcgagcgcttccagtccagccagttgccattccgaaggtagtgaaaattccttccagtctagcagctcgagtgttccctctagcccaaacagttctaactccgataccaatggaaaccctaagaacggagatttggcgaacattgagggtattctgaaaaatgaccgaatcgactgtagcatgaaaaccagtaagagcagcgcccctggtatgactaaaagccattctggggtgaccaagtttagcggaatggtcctgctttgcaaagtgtgtggcgatgtcgcaagcggcttccactacggtgtccacgcctgtgaagggtgtaaaggcttcttccgcagatcgatacagcagaatatacagtataaaaaatgcctgaagaatgaaaattgctctattatgcggatgaacaggaatcgctgtcagcaatgtagattcaagaagtgcctgtccgtcggtatgtcgcgggacgccgtcaggttcggcaggattccaaagcgggagaaacagaggatgctgatagaaatgcagtctgctatgaagaccatgatgaactcccagttctcaggacatctccagaatgatacactcgtcgaacaccacgagcagaccgcactacccgctcaagagcagctccgcccaaaacctcagctcgaacaagagaatataaagtcatcctcaccacccagtagtgacttcgccaaagaggaagtcatcgggatggttacgagggctcacaaagatacattcatgtacaaccaggaacaacaggaaaacagtgctgaatccatgcagccacaaagaggcgaacggatcccaaaaaatatggaacagtataacctcaaccatgaccattgcgggaatggcctgtcctcacactttccgtgctcagagagtcaacagcacctgaatgggcagttcaaggggcggaatatcatgcattacccgaatggccacgcaatatgcattgcaaacgggcattgtatgaacttctcaaatgcttacacacagcgggtctgtgatcgcgtgccgattgacggcttctcccagaacgagaacaaaaattcctacctctgcaacactgggggtcgtatgcatctctactccgttcacatccagcccaaattccatcagaagcagcagtaccacacgatttccagcctcaatcatgaggttctctag

SEQ ID NO: 287186 - DNA, 1227 bp, Artificial Sequence
  derived and/or modified sequence
atggaggttaatgccggaggagtgattgcatatattagctctagtagtagcgcttcttccccagccagctgtcattctgaggggtccgaaaattcctttcagtcaagtagctcatctgtcccatcctcaccaaatagttcaaatagtgacaccaacggaaatcctaagaatggcgatttggccaatattgaaggaatcctgaaaaatgacagaatagactgctccatgaaaactagcaagtcctcagcccctgggatgaccaagagtcattccggcgttaccaaattttctggaatggtcctcctgtgtaaagtgtgcggagatgtcgctagtggcttccattacggcgtacacgcctgtgaaggctgcaagggtttcttcagaagatccattcaacaaaacattcagtacaaaaaatgtctgaaaaatgagaactgctctattatgcgcatgaatagaaatagatgccaacaatgtcggtttaagaaatgcttgtccgttggaatgtcaagagatgctgtccgcttcggtcgaatcccgaaacgtgaaaagcagcggatgctaattgaaatgcagtcggcgatgaagacaatgatgaattctcagttttctggtcaccttcagaatgacaccttggtcgagcatcacgagcaaaccgccctccccgctcaagaacagttacgccctaagcctcagttggaacaggagaacattaaatcatcatcccctcccagtagcgatttcgcaaaggaagaggtgatcggtatggtgacacgggctcataaggacacatttatgtataatcaggagcagcaggagaactccgctgagtctatgcagccccagagaggggagaggatacccaagaacatggaacagtataaccttaaccatgaccattgtggcaatggcttgtcatctcacttcccctgtagtgaatcccagcagcatttaaatggacagtttaagggaagaaatatcatgcactatcccaacggacatgccatttgcattgccaacggacactgcatgaacttcagcaacgcctacacacagcgtgtgtgtgatagggttcctatcgatggattcagccagaacgagaataagaactcctacctctgcaatacgggtggcagaatgcatctttacagcgtgcatatccaacccaaatttcaccagaagcaacagtaccataccattagctcgctgaatcacgaagtactttag

SEQ ID NO: 287187 - DNA, 1227 bp, Artificial Sequence
  derived and/or modified sequence
atggaggtgaacgccggcggcgtgatcgcctacatcagcagcagcagcagcgccagcagccccgccagctgccacagcgagggcagcgagaacagcttccagagcagcagcagcagcgtgcccagcagccccaacagcagcaacagcgacaccaacggcaaccccaagaacggcgacctggccaacatcgagggcatcctgaagaacgacagaatcgactgcagcatgaagaccagcaagagcagcgcccccggcatgaccaagagccacagcggcgtgaccaagttcagcggcatggtgctgctgtgcaaggtgtgcggcgacgtggccagcggcttccactacggcgtgcacgcctgcgagggctgcaagggcttcttcagaagaagcatccagcagaacatccagtacaagaagtgcctgaagaacgagaactgcagcatcatgagaatgaacagaaacagatgccagcagtgcagattcaagaagtgcctgagcgtgggcatgagcagagacgccgtgagattcggcagaatccccaagagagagaagcagagaatgctgatcgagatgcagagcgccatgaagaccatgatgaacagccagttcagcggccacctgcagaacgacaccctggtggagcaccacgagcagaccgccctgcccgcccaggagcagctgagacccaagccccagctggagcaggagaacatcaagagcagcagcccccccagcagcgacttcgccaaggaggaggtgatcggcatggtgaccagagcccacaaggacaccttcatgtacaaccaggagcagcaggagaacagcgccgagagcatgcagccccagagaggcgagagaatccccaagaacatggagcagtacaacctgaaccacgaccactgcggcaacggcctgagcagccacttcccctgcagcgagagccagcagcacctgaacggccagttcaagggcagaaacatcatgcactaccccaacggccacgccatctgcatcgccaacggccactgcatgaacttcagcaacgcctacacccagagagtgtgcgacagagtgcccatcgacggcttcagccagaacgagaacaagaacagctacctgtgcaacaccggcggcagaatgcacctgtacagcgtgcacatccagcccaagttccaccagaagcagcagtaccacaccatcagcagcctgaaccacgaggtgctgtag

SEQ ID NO: 287188 - DNA, 1269 bp, Artificial Sequence
  derived and/or modified sequence
atgcccagaaagggcacccagcccagcaccgccagaagaagagaggagggcccccccccccccagccccgacggcgccagcagcgacgccgagcccgagccccccagcggcagaaccgagagccccgccaccgccgccgagaccgccagcgaggagctggacaacagaagcctggaggagatcctgaacagcatcccccccccccccccccccgccatgaccaacgaggccggcgcccccagactgatgatcacccacatcgtgaaccagaacttcaagagctacgccggcgagaagatcctgggccccttccacaagagattcagctgcatcatcggccccaacggcagcggcaagagcaacgtgatcgacagcatgctgttcgtgttcggctacagagcccagaagatcagaagcaagaagctgagcgtgctgatccacaacagcgacgagcacaaggacatccagagctgcaccgtggaggtgcacttccagaagatcatcgacaaggagggcgacgactacgaggtgatccccaacagcaacttctacgtgagcagaaccgcctgcagagacaacaccagcgtgtaccacatcagcggcaagaagaagaccttcaaggacgtgggcaacctgctgagaagccacggcatcgacctggaccacaacagattcctgatcctgcagggcgaggtggagcagatcgccatgatgaagcccaagggccagaccgagcacgacgagggcatgctggagtacctggaggacatcatcggctgcggcagactgaacgagcccatcaaggtgctgtgcagaagagtggagatcctgaacgagcacagaggcgagaagctgaacagagtgaagatggtggagaaggagaaggacgccctggagggcgagaagaacatcgccatcgagttcctgaccctggagaacgagatcttcagaaagaagaaccacgtgtgccagtactacatctacgagctgcagaagagaatcgccgagatggagacccagaaggagaagatccacgaggacaccaaggagatcaacgagaagagcaacatcctgagcaacgagatgaaggccaagaacaaggacgtgaaggacaccgagaagaagctgaacaagatcaccaagttcatcgaggagaacaaggagaagttcacccagctggacctggaggacgtgcaggtgagagagaagctgaagcacgccaccagcaaggccaagaccggcgagaccaccagcaagagaaagaagtag

SEQ ID NO: 287189 - DNA, 513 bp, Artificial Sequence
  derived and/or modified sequence
atgcccagaaagggcacccagcccagcaccgccagaagaagagaggagggcccccccccccccagccccgacggcgccagcagcgacgccgagcccgagccccccagcggcagaaccgagagccccgccaccgccgccgagaccgccagcgaggagctggacaacagaagcctggaggagatcctgaacagcatcccccccccccccccccccgccatgaccaacgaggccggcgcccccagactgatgatcacccacatcgtgaaccagaacttcaagagctacgccggcgagaagatcctgggccccttccacaagagattcagctgcatcatcggccccaacggcagcggcaagagcaacgtgatcgacagcatgctgttcgtgttcggctacagagcccagaagatcagaagcaagaagctgagcgtgctgatccacaacagcgacgagcacaaggacatccagagctgcaccgtggaggtgcacttccagaagatcatcgacaagtag

SEQ ID NO: 287190 - DNA, 522 bp, Artificial Sequence
  derived and/or modified sequence
atgcccagaaagggcacccagcccagcaccgccagaagaagagaggagggcccccccccccccagccccgacggcgccagcagcgacgccgagcccgagccccccagcggcagaaccgagagccccgccaccgccgccgagaccgccagcgaggagctggacaacagaagcctggaggagatcctgaacagcatcccccccccccccccccccgccatgaccaacgaggccggcgcccccagactgatgatcacccacatcgtgaaccagaacttcaagagctacgccggcgagaagatcctgggccccttccacaagagattcagctgcatcatcggccccaacggcagcggcaagagcaacgtgatcgacagcatgctgttcgtgttcggctacagagcccagaagatcagaagcaagaagctgagcgtgctgatccacaacagcgacgagcacaaggacatccagagctgcaccgtggaggtgcacttccagaagatcatcgacaaggagggcgactag

SEQ ID NO: 287191 - DNA, 1272 bp, Artificial Sequence
  derived and/or modified sequence
atgcccagaaagggcacccagcccagcaccgccagaagaagagaggagggcccccccccccccagccccgacggcgccagcagcgacgccgagcccgagccccccagcggcagaaccgagagccccgccaccgccgccgagaccgccagcgaggagctggacaacagaagcctggaggagatcctgaacagcatcccccccccccccccccccgccatgaccaacgaggccggcgcccccagactgatgatcacccacatcgtgaaccagaacttcaagagctacgccggcgagaagatcctgggccccttccacaagagattcagctgcatcatcggccccaacggcagcggcaagagcaacgtgatcgacagcatgctgttcgtgttcggctacagagcccagaagatcagaagcaagaagctgagcgtgctgatccacaacagcgacgagcacaaggacatccagagctgcaccgtggaggtgcacttccagaagatcatcgacaaggagggcgacgactacgaggtgatccccaacagcaacttctacgtgagcagaaccgcctgcagagacaacaccagcgtgtaccacatcagcggcaagaagaagaccttcaaggacgtgggcaacctgctgagaagccacggcatcgacctggaccacaacagattcctgatcctgcagggcgaggtggagcagatcgccatgatgaagcccaagggccagaccgagcacgacgagggcatgctggagtacctggaggacatcatcggctgcggcagactgaacgagcccatcaaggtgctgtgcagaagagtggagatcctgaacgagcacagaggcgagaagctgaacagagtgaagatggtggagaaggagaaggacgccctggagggcgagaagaacatcgccatcgagttcctgaccctggagaacgagatcttcagaaagaagaaccacgtgtgccagtactacatctacgagctgcagaagagaatcgccgagatggagacccagaaggagaagatccacgaggacaccaaggagatcaacgagaagagcaacatcctgagcaacgagatgaaggccaagaacaaggacgtgaaggacaccgagaagaagctgaacaagatcaccaagttcatcgaggagaacaaggagaagttcacccagctggacctggaggacgtgcaggtgagagagaagctgaagcacgccaccagcaaggccaagaagctggagaagcagctgcagaaggacaaggagtag

SEQ ID NO: 287192 - DNA, 543 bp, Artificial Sequence
  derived and/or modified sequence
atgcccagaaagggcacccagcccagcaccgccagaagaagagaggagggcccccccccccccagccccgacggcgccagcagcgacgccgagcccgagccccccagcggcagaaccgagagccccgccaccgccgccgagaccgccagcgaggagctggacaacagaagcctggaggagatcctgaacagcatcccccccccccccccccccgccatgaccaacgaggccggcgcccccagactgatgatcacccacatcgtgaaccagaacttcaagagctacgccggcgagaagatcctgggccccttccacaagagattcagctgcatcatcggccccaacggcagcggcaagagcaacgtgatcgacagcatgctgttcgtgttcggctacagagcccagaagatcagaagcaagaagctgagcgtgctgatccacaacagcgacgagcacaaggacatccagagctgcaccgtggaggtgcacttccagaagatcatcgacaaggagggcgacgactacgaggtgatccccaactag

SEQ ID NO: 287193 - DNA, 1269 bp, Artificial Sequence
  derived and/or modified sequence
atgccgcgtaaggggacacagccatctacagcccggaggagggaggaaggcccccctccaccatcacctgatggtgccagctctgatgctgagcctgagcctccgagcggacgaactgaaagccctgccaccgctgccgagacagcgtccgaggaactcgataatcgttcactggaggagatcctcaattccattccccccccgcctcccccagccatgactaatgaagcaggtgcgccaagactgatgattacccatattgtcaatcaaaactttaaatcatacgccggtgagaagatactgggtccatttcacaaaaggtttagttgcatcataggtcctaatggctcaggcaagtccaacgtgattgatagcatgctttttgttttcggatatcgagcccagaaaatacggagtaaaaagctcagtgtgctcatacacaactccgacgaacacaaggacatccaatcttgtaccgtcgaagtgcatttccagaagatcatcgataaagaaggtgacgattacgaggtcatcccaaactccaacttctatgtgagccgcaccgcatgccgcgataacacctcagtctatcacatctctggtaaaaagaagactttcaaggatgtgggtaacctcctcaggtcacatggaatcgatctagaccacaataggttccttatcctccagggggaagttgaacagatcgccatgatgaagcccaaagggcaaacagagcacgatgagggaatgctcgagtatttagaagacattatcggatgtggtaggctgaatgagcctatcaaggttctgtgccgccgggtcgaaatactaaatgagcacaggggtgaaaaactcaatcgggtgaaaatggtggagaaggaaaaagacgccctggaaggtgagaaaaacatagcaattgagttcctcaccctggagaacgaaatcttccgtaaaaaaaaccatgtgtgccagtattatatttacgagctacagaagagaatcgcagaaatggaaactcagaaggaaaagatccacgaggacaccaaggagattaatgaaaagagcaatatcctgagcaacgaaatgaaagcgaagaacaaggacgtgaaggataccgagaaaaaactcaataagatcaccaagtttattgaagaaaataaggaaaaattcacccagctggatttggaggacgtacaggtcagagaaaagctcaaacacgccacctccaaggccaaaactggtgagaccacgagtaagcgtaagaagtag

SEQ ID NO: 287194 - DNA, 513 bp, Artificial Sequence
  derived and/or modified sequence
atgccccggaaagggactcagccaagcaccgcccggcggcgcgaggaagggccccccccaccaagtcctgacggtgcatcatctgatgcggagcccgagcctccaagcgggcggacagagagtccagccactgcggcggagactgcttcagaagagctggacaacagaagtctggaggagattctgaatagcatccctccacctcccccaccagcaatgacaaacgaggccggcgcacccaggctcatgatcacacacatcgttaaccaaaacttcaagtcctacgcaggggagaagatcttgggacctttccacaagaggttttcctgtatcataggtcccaatgggtcgggcaaatcaaacgtcatagactccatgcttttcgtgttcggctaccgagcacaaaaaattcggtcaaagaaacttagcgtcttgatccataatagcgacgagcacaaagatatccagtcctgcaccgttgaagtgcacttccagaaaataattgacaagtag

SEQ ID NO: 287195 - DNA, 522 bp, Artificial Sequence
  derived and/or modified sequence
atgccaagaaaggggacacaacccagcaccgccaggagacgcgaagagggcccaccacctccctccccagacggagccagctccgatgctgagcctgaaccacccagcgggagaacagagtcaccggccactgcagctgagacggcctcagaagagttggacaataggtccctggaagaaatcctgaattccattccacctccacctcctcccgctatgactaacgaggccggagcaccaagactgatgatcacccacatcgtgaatcagaactttaaaagttacgcaggagagaagatcctgggccctttccacaagaggttttcatgcattattgggcctaacggctccggaaagagtaacgttatagattccatgttgtttgtgtttggttacagggcacagaagattagatccaagaaactctctgtgctgattcataatagtgacgagcacaaagacatccagtcatgcaccgtcgaggtgcactttcagaaaatcatcgataaagaaggcgattag

SEQ ID NO: 287196 - DNA, 1272 bp, Artificial Sequence
  derived and/or modified sequence
atgccccgcaaaggtacacagccatccacagcccgccgccgggaggagggtccaccaccaccttcaccggacggggcctcatccgacgcagagccggagcctcctagcggccgcacagaaagtccggccacagccgcggagaccgcatctgaagaactggataaccgcagtttggaggagatcctgaacagtatcccccccccccctcctcccgccatgaccaacgaagcaggagcgcctcggctgatgattactcatatcgttaaccaaaacttcaaaagctacgccggcgaaaagattctcggaccattccataaacgattcagttgcataattggtccaaatggttctgggaagtctaacgtgatagattcaatgttattcgtgttcggctacagagctcagaaaattagatctaagaagctttccgtacttattcacaatagcgacgagcacaaggatatacagtcttgcaccgtagaggtccacttccagaaaatcatagataaggagggggacgattatgaggttattcccaacagtaatttctatgtttctaggaccgcttgccgggacaacactagcgtgtatcacattagcggaaaaaagaagacattcaaggatgtgggtaatctacttcggtctcacggtattgacttggaccataaccggttcctaattctgcagggcgaggtggagcagatcgcaatgatgaagcccaaagggcagacagagcatgacgaaggcatgctggagtatctggaagatatcattggatgcggtcggctcaacgagcccatcaaagtgttatgtcggcgggttgaaatactgaatgagcataggggcgagaaactgaatagagtgaaaatggttgaaaaggagaaggatgccctcgagggcgaaaagaacatcgccattgaattcttgactctggaaaatgagattttcagaaaaaagaatcacgtgtgtcagtactacatctacgagctgcaaaagagaatcgcagagatggagacgcaaaaagaaaagattcacgaagatacaaaagagattaatgagaaatccaatatcctgagcaacgaaatgaaagcgaagaataaagatgttaaagacaccgaaaagaaactgaacaagattacaaagttcatcgaagaaaacaaggaaaagttcacccaactagacctggaagacgttcaagttcgtgagaagcttaaacacgcaacctccaaggcaaagaaattggaaaagcagctgcagaaggataaggagtag

SEQ ID NO: 287197 - DNA, 543 bp, Artificial Sequence
  derived and/or modified sequence
atgccgcgtaagggtactcagccctctactgcccgaagaagagaagaaggaccaccccctccctccccagacggcgcttctagcgatgccgagcccgaacctccatcaggacgtacagagtcaccagcaactgctgccgagacagcatccgaggaacttgataaccgcagccttgaggagatcctcaactccattcctccacctcccccaccggctatgaccaacgaagcaggagctccccgacttatgatcacccatattgtaaatcagaactttaagtcctacgcaggtgagaagattcttgggccctttcataaacgttttagctgcatcattggacccaacgggtcagggaagtccaatgtgatcgatagcatgctgttcgtttttggctacagggcccagaaaataagatctaagaagttgtctgtccttattcacaacagcgacgaacacaaggatatccagtcatgcacggtggaggtccatttccagaagatcattgacaaggagggtgacgactacgaggtgattcctaattag

SEQ ID NO: 287198 - DNA, 522 bp, Artificial Sequence
  derived and/or modified sequence
atgcctcggaaagggacacagccgtccacagctcggcgacgggaagaggggccacctccccccagtcccgatggagctagcagtgatgctgagccggagccccccagcggaaggactgagagccccgccactgccgctgaaaccgcctctgaagaattggataaccggtccctagaagagattctcaattctattccaccaccacctccgccagccatgactaatgaggctggcgcgccgcggcttatgattacacacatcgttaatcagaacttcaagagctacgcaggagagaaaatcctcggaccattccataaaaggttctcttgcatcattggcccgaacggatcgggcaaaagcaacgtgattgatagcatgttatttgttttcggctaccgggcgcagaaaattaggtctaaaaagctttccgttctgattcacaatagtgacgagcacaaggatattcaatcctgtactgtggaggtacacttccagaagatcatcgataaggaaggagactag

SEQ ID NO: 287199 - DNA, 1269 bp, Artificial Sequence
  derived and/or modified sequence
atgcccaggaagggcacccagcccagcacagccaggagaagagaggagggccccccaccacccagcccagatggagccagcagtgatgctgagcctgagccccccagcggccgcacagagagccctgccacagctgctgagacagccagcgaggagctggacaacagaagcctggaggagatcctgaacagcatccccccacctcctcctccagccatgaccaatgaagctggggccccccggctgatgatcacccacatcgtgaaccagaacttcaagagctatgctggggagaagatcctgggccccttccacaagcgcttcagctgcatcatcggccccaatggaagtggcaagagcaatgtgattgacagcatgctgtttgtgtttggctaccgggcccagaagatccgcagcaagaagctgtctgtgctgatccacaacagtgatgagcacaaggacatccagagctgcaccgtggaggtgcacttccagaagatcatcgacaaggagggagatgattatgaagtcatccccaacagcaacttctacgtgtccaggacagcctgccgggacaacacctctgtgtaccacatcagcggcaagaagaagaccttcaaggatgtgggcaacctgctgcggagccacggcatcgacctggaccacaaccgcttcctgatcctgcagggcgaggtggagcagatcgccatgatgaagcccaagggccagacagaacatgatgagggcatgctggagtacctggaggacatcatcggctgcggccgcctgaatgagcccatcaaggtgctgtgccggcgggtggagatcctgaatgagcacagaggagagaagctgaacagagtgaagatggtggagaaggagaaggatgccctggagggggagaagaacatcgccatcgagttcctgaccctggagaatgagatcttcaggaagaagaaccacgtgtgccagtactacatctatgagctgcagaagagaattgctgagatggagacccagaaggagaagatccacgaggacaccaaggagatcaatgagaagagcaacatcctgagcaatgagatgaaggccaagaacaaggatgtgaaggacacagagaagaagctgaacaagatcaccaagttcatcgaggagaacaaggagaagttcacccagctggacctggaggatgtgcaggtgcgggagaagctgaagcacgccaccagcaaggccaagacaggagagaccaccagcaagaggaagaagtag

SEQ ID NO: 287200 - DNA, 513 bp, Artificial Sequence
  derived and/or modified sequence
atgcccaggaagggcacccagcccagcacagccaggagaagagaggagggccccccaccacccagcccagatggagccagcagtgatgctgagcctgagccccccagcggccgcacagagagccctgccacagctgctgagacagccagcgaggagctggacaacagaagcctggaggagatcctgaacagcatccccccacctcctcctccagccatgaccaatgaagctggggccccccggctgatgatcacccacatcgtgaaccagaacttcaagagctatgctggggagaagatcctgggccccttccacaagcgcttcagctgcatcatcggccccaatggaagtggcaagagcaatgtgattgacagcatgctgtttgtgtttggctaccgggcccagaagatccgcagcaagaagctgtctgtgctgatccacaacagtgatgagcacaaggacatccagagctgcaccgtggaggtgcacttccagaagatcatcgacaagtag

SEQ ID NO: 287201 - DNA, 522 bp, Artificial Sequence
  derived and/or modified sequence
atgcccaggaagggcacccagcccagcacagccaggagaagagaggagggccccccaccacccagcccagatggagccagcagtgatgctgagcctgagccccccagcggccgcacagagagccctgccacagctgctgagacagccagcgaggagctggacaacagaagcctggaggagatcctgaacagcatccccccacctcctcctccagccatgaccaatgaagctggggccccccggctgatgatcacccacatcgtgaaccagaacttcaagagctatgctggggagaagatcctgggccccttccacaagcgcttcagctgcatcatcggccccaatggaagtggcaagagcaatgtgattgacagcatgctgtttgtgtttggctaccgggcccagaagatccgcagcaagaagctgtctgtgctgatccacaacagtgatgagcacaaggacatccagagctgcaccgtggaggtgcacttccagaagatcatcgacaaggagggggactag

SEQ ID NO: 287202 - DNA, 1272 bp, Artificial Sequence
  derived and/or modified sequence
atgcccaggaagggcacccagcccagcacagccaggagaagagaggagggccccccaccacccagcccagatggagccagcagtgatgctgagcctgagccccccagcggccgcacagagagccctgccacagctgctgagacagccagcgaggagctggacaacagaagcctggaggagatcctgaacagcatccccccacctcctcctccagccatgaccaatgaagctggggccccccggctgatgatcacccacatcgtgaaccagaacttcaagagctatgctggggagaagatcctgggccccttccacaagcgcttcagctgcatcatcggccccaatggaagtggcaagagcaatgtgattgacagcatgctgtttgtgtttggctaccgggcccagaagatccgcagcaagaagctgtctgtgctgatccacaacagtgatgagcacaaggacatccagagctgcaccgtggaggtgcacttccagaagatcatcgacaaggagggagatgattatgaagtcatccccaacagcaacttctacgtgtccaggacagcctgccgggacaacacctctgtgtaccacatcagcggcaagaagaagaccttcaaggatgtgggcaacctgctgcggagccacggcatcgacctggaccacaaccgcttcctgatcctgcagggcgaggtggagcagatcgccatgatgaagcccaagggccagacagaacatgatgagggcatgctggagtacctggaggacatcatcggctgcggccgcctgaatgagcccatcaaggtgctgtgccggcgggtggagatcctgaatgagcacagaggagagaagctgaacagagtgaagatggtggagaaggagaaggatgccctggagggggagaagaacatcgccatcgagttcctgaccctggagaatgagatcttcaggaagaagaaccacgtgtgccagtactacatctatgagctgcagaagagaattgctgagatggagacccagaaggagaagatccacgaggacaccaaggagatcaatgagaagagcaacatcctgagcaatgagatgaaggccaagaacaaggatgtgaaggacacagagaagaagctgaacaagatcaccaagttcatcgaggagaacaaggagaagttcacccagctggacctggaggatgtgcaggtgcgggagaagctgaagcacgccaccagcaaggccaagaagctggagaagcagctgcagaaggacaaggagtag

SEQ ID NO: 287203 - DNA, 543 bp, Artificial Sequence
  derived and/or modified sequence
atgcccaggaagggcacccagcccagcacagccaggagaagagaggagggccccccaccacccagcccagatggagccagcagtgatgctgagcctgagccccccagcggccgcacagagagccctgccacagctgctgagacagccagcgaggagctggacaacagaagcctggaggagatcctgaacagcatccccccacctcctcctccagccatgaccaatgaagctggggccccccggctgatgatcacccacatcgtgaaccagaacttcaagagctatgctggggagaagatcctgggccccttccacaagcgcttcagctgcatcatcggccccaatggaagtggcaagagcaatgtgattgacagcatgctgtttgtgtttggctaccgggcccagaagatccgcagcaagaagctgtctgtgctgatccacaacagtgatgagcacaaggacatccagagctgcaccgtggaggtgcacttccagaagatcatcgacaaggagggagatgattatgaagtcatccccaactag

SEQ ID NO: 287204 - DNA, 1379 bp, Artificial Sequence
  derived and/or modified sequence
taggcgccattttcgagtgaaggacccggagccgaaacaccggtaggagcggggaggtgggtactacacaaccgtctccagccttggtctgagtggactgtcctgcagcgaccatgccccgtaaaggcacccagccctccactgcccggcgcagagaggaagggccgccgccgccgtcccctgacggcgccagcagcgacgcggagcctgagccgccgtccggccgcacggagagcccagccaccgccgcagagactgcaagtgaggaacttgataatagaagtttagaagagattttgaacagcattcctcctcccccgcctccagcaatgaccaatgaagctggagctcctcggcttatgataactcatattgtaaaccagaacttcaaatcctatgctggggagaaaattctgggacctttccataagcgcttttcctgtattatcgggccaaatggcagtggcaaatccaatgttattgattctatgctttttgtgtttggctatcgagcacaaaaaataagatctaaaaaactctcagtattaatacataattctgatgaacacaaggacattcagagttgtacagtagaagttcattttcaaaagataattgataaggaaggggatgattatgaagtcattcctaacagtaatttctatgtatccagaacggcctgcagagataatacttctgtctatcacataagtggaaagaaaaagacatttaaggatgttggaaatcttcttcgaagccatggaattgacttggaccataatagatttttaattttacagggtgaagttgaacaaattgctatgatgaaaccaaaaggccagactgaacacgatgagggtatgcttgaatatttagaagatataattggttgtggacggctaaatgaacctattaaagtcttgtgtcggagagttgaaatattaaatgaacacagaggagagaagttaaacagggtaaagatggtggaaaaggaaaaggatgccttagaaggagagaaaaacatagctatcgaatttcttaccttggaaaatgaaatatttagaaaaaagaatcatgtttgtcaatattatatttatgagttgcagaaacgaattgctgaaatggaaactcaaaaggaaaaaattcatgaagataccaaagaaattaatgagaagagcaatatactatcaaatgaaatgaaagctaagaataaagatgtaaaagatacagaaaagaaactgaataaaattacaaaatttattgaggagaataaagaaaaatttacacagctagatttggaagatgttcaagttagagaaaagttaaaacatgccacgagtaaagccaaaactggagaaacaacttcaaaaagaaaaaaa

SEQ ID NO: 287205 - DNA, 1269 bp, Artificial Sequence
  derived and/or modified sequence
atgccccggaagggcacccagcccagcaccgcccggcggcgggaggagggccccccccctccatcgcctgatggcgccagctcagacgcagagcccgagccaccctcaggccgcaccgaatctccagccaccgcagccgaaactgccagcgaagaactggataaccggtctttggaggaaatactcaacagcattccaccacccccaccccctgctatgaccaacgaggcgggagcccctcgcttgatgatcacacatattgttaaccagaattttaaaagttatgcgggcgagaaaatcctggggccattccataaacgattcagctgcattattggcccgaatggtagcggcaaaagtaacgtgatcgacagcatgctgttcgtctttggctacagagcccagaagatccgcagtaagaagctaagcgtgctgattcataactcggacgaacacaaggacatccaatcctgtacggtcgaagtgcactttcaaaaaatcatcgacaaagagggagatgactacgaggtcatcccaaacagcaatttttatgtctccagaactgcgtgtagggacaatacttccgtgtaccatatcagcgggaagaagaaaacttttaaggacgtgggcaacctactccggagccatggcatcgaccttgatcataaccgctttctcatactgcagggagaggtggaacaaatcgcaatgatgaagcccaagggccagaccgagcacgacgaagggatgttggaataccttgaagatatcattgggtgcggacgtctgaacgagcccatcaaggtgctttgcagaagagtggagatcttgaacgaacacaggggtgaaaaactgaaccgcgtgaaaatggtggaaaaggaaaaggacgctctcgagggtgagaagaatattgccattgaattcctgacactggagaatgaaatttttcggaaaaaaaaccacgtgtgtcagtattatatttacgagctacaaaagcggatcgccgagatggaaacacagaaagagaaaatacacgaggataccaaagagattaacgaaaagtcaaatattcttagtaatgagatgaaggccaagaataaggacgttaaagatacagagaagaaacttaacaaaatcactaagtttatcgaggagaataaggagaaattcacccagcttgatcttgaggacgtccaagtgcgtgaaaaactcaagcacgccacgtcaaaagcaaagacaggggagactaccagcaagaggaagaagtag

SEQ ID NO: 287206 - DNA, 513 bp, Artificial Sequence
  derived and/or modified sequence
atgccccggaagggcacccagcccagcaccgcccggcggcgggaggagggaccaccccccccttcacccgatggggcaagttctgatgctgaaccggagcctccaagcggaaggacggaatcccccgccacagcggcagagaccgcttcagaggagttagacaatcggtctctggaagaaattttaaattcaatcccccccccacctccgcctgcaatgactaatgaggccggagcacccagacttatgatcacacacattgtgaatcagaactttaagtcttatgctggagagaaaatcctcggcccctttcataagagatttagctgcatcattggccctaacggcagcggcaagtccaatgttatagattctatgttgttcgtgtttgggtatagagctcaaaagattaggtccaaaaagttgtcagtattgattcataattcagatgagcacaaggatattcagagttgtacggtggaggtgcatttccaaaaaataattgacaagtag

SEQ ID NO: 287207 - DNA, 522 bp, Artificial Sequence
  derived and/or modified sequence
atgccccggaagggcacccagcccagcaccgcccggcggcgggaggagggtcctccgccccctagtcccgatggggccagctcagatgctgagcctgagcccccaagtggcagaacagaatcaccagcaacggcagccgaaaccgcctccgaagaactggataaccgttccctcgaggagatcctcaacagcattcccccgccacctccccccgccatgaccaatgaagccggcgcacccaggcttatgattacacacatcgtcaaccaaaatttcaagtcatatgccggggagaagattctggggccttttcataaacgtttttcatgtatcatcggaccgaatggatctggaaagtccaacgttatagacagtatgctgttcgtgtttggttatcgggcccagaagatccggagcaagaagctgagtgtgcttatccacaactctgatgaacacaaggacattcagtcctgtaccgtggaggtgcacttccagaagattattgataaggagggcgactag

SEQ ID NO: 287208 - DNA, 1272 bp, Artificial Sequence
  derived and/or modified sequence
atgccccggaagggcacccagcccagcaccgcccggcggcgggaggaaggaccccccccaccttctccggatggagcctctagtgacgcagagccagagcccccatccggaagaaccgaaagtccagcgaccgctgcagagacggctagtgaagaactcgacaataggtcccttgaggaaatactcaatagtattccgccgccgccccctcccgcgatgactaacgaagccggcgcacctaggctcatgatcacacatatcgtgaaccaaaactttaaatcttacgccggagaaaagatacttgggccttttcacaagcgcttctcatgtatcattggacctaatggttccggaaagagtaacgtcattgattctatgttatttgtgttcggctaccgggcccagaagatcagatcaaaaaaactgagcgtactgatacacaattccgacgaacacaaggacatccagtcctgcactgttgaagtgcactttcagaaaattatagacaaggagggggacgattacgaggttatcccaaactccaacttctatgtgagtcgcactgcttgtagggacaacacctccgtgtaccacataagcggcaagaaaaagacatttaaggatgttggaaatctactgcggagccatggaatcgatctggaccacaacaggtttctgatactgcagggcgaggtcgagcaaatcgctatgatgaagcccaagggtcagacagagcacgatgaggggatgttggaatacctggaagacataatcggatgtggacgacttaatgagccaatcaaggtgctctgtaggagggtggaaattcttaacgagcacaggggcgagaaattgaaccgcgtaaagatggttgagaaggaaaaagacgcacttgagggtgagaagaatatcgccatagagttcctgactctcgagaatgagatcttccgaaaaaagaatcacgtgtgccagtactatatttacgagttgcaaaaaagaatagcagaaatggagacgcagaaggaaaaaattcatgaggacaccaaggagatcaacgaaaaatccaatattctatcaaacgaaatgaaggcaaagaacaaagatgtcaaagatacagagaaaaaactgaataaaataacgaagttcatcgaggaaaataaagagaagtttactcagttggacttggaagatgtgcaagtgcgtgagaagttgaaacacgccaccagtaaggccaaaaagttggagaagcaactgcaaaaagacaaagaatag

SEQ ID NO: 287209 - DNA, 543 bp, Artificial Sequence
  derived and/or modified sequence
atgccccggaagggcacccagcccagcaccgcccggcggcgggaggagggacccccccctccctcgcctgatggtgcctctagcgacgctgaacccgaacctcccagcgggaggaccgaaagtcctgccaccgccgctgagactgcctctgaggagttggacaaccggtcactggaggagattctgaacagcatcccaccacccccccctcctgcaatgaccaatgaagcaggagcgcctcggctgatgattacccacattgtcaatcaaaattttaagagctatgcaggggaaaagatcttgggtccttttcataagcgcttctcatgcatcattgggccaaatggttcaggaaaatcaaatgttatcgactcgatgctgtttgtgtttggttatagggctcaaaaaatacggtccaagaaactgtctgtactgattcacaacagtgacgagcacaaggacatacaatcctgtacagtagaggtacactttcaaaagataatcgacaaggagggtgatgactacgaagtgattcccaattag

SEQ ID NO: 287210 - DNA, 522 bp, Artificial Sequence
  derived and/or modified sequence
atgccccggaagggcacccagcccagcaccgcccggcggcgggaggagggcccgcctccaccaagcccagacggtgcttcaagtgatgctgagccggagcctccatcaggtagaaccgagagccccgccaccgccgcagagactgcctcagaggagctggataatcggtccctcgaggagatattaaacagtatacctccccccccaccacctgccatgacaaatgaagccggagcgccccggctcatgataacccatatcgtgaatcagaacttcaagagctacgccggggaaaaaattctgggccccttccataagcggttctcctgcattatcggaccaaacgggtctgggaaatcaaacgttatcgactccatgctatttgtctttgggtacagggcccagaagattcgcagcaagaaactgtcagttctaattcacaatagcgacgaacataaggacattcagagttgcactgtagaggtgcactttcaaaagatcattgacaaagagggggactag

SEQ ID NO: 287211 - DNA, 1269 bp, Artificial Sequence
  derived and/or modified sequence
atgccccgaaaaggcactcagcccagcactgcgaggagacgggaagagggcccaccaccaccttcccctgacggggcatcttccgatgcagagccagagcccccatcaggcaggaccgagtccccagccactgccgcagaaaccgcctctgaggaactcgataatcgtagcctggaggagattctgaatagcatcccccctccaccaccccctgctatgacaaacgaggccggagccccaagactgatgatcacccatattgttaatcagaatttcaagtcgtacgctggagaaaagatcctcggccctttccacaagagattctcatgcattatcggacctaacggatctggaaagagcaatgtgattgattctatgctgtttgtgttcgggtaccgagcacagaaaattcggtccaagaagctgtcggtgctgatccataactctgacgagcataaagacatccaaagctgcacagttgaagtgcactttcagaaaataattgacaaagaaggggatgactacgaggtgatccctaattcgaacttctatgtttctcggaccgcttgtagagataatacctccgtttatcatatttcaggaaagaagaaaaccttcaaggatgtgggcaatctccttagaagccatggcatagatctggatcacaacagatttctgatcctccaaggcgaagttgaacagatcgccatgatgaagccgaagggccagacagagcatgacgagggaatgcttgagtaccttgaagatatcattgggtgcgggcgattgaacgagcccatcaaggttctttgcagacgagtcgagatcctcaacgagcaccgtggagaaaagcttaatagggttaaaatggtagagaaggagaaggatgctctggaaggagagaagaatattgctattgaattcttaaccctggaaaatgagatatttaggaaaaagaaccacgtgtgtcagtattatatttacgagctccaaaagcgtatagctgaaatggaaactcaaaaggagaaaatacatgaggacacgaaggaaattaacgagaagtccaacatcttgagcaacgagatgaaagccaagaataaggatgttaaggacaccgaaaagaagctaaacaaaataactaagtttattgaggaaaacaaagaaaagttcactcagctggatctggaggatgtgcaggtgagagaaaagttgaaacatgccaccagcaaggccaagacgggcgagactacctcaaaacgcaaaaaatag

SEQ ID NO: 287212 - DNA, 513 bp, Artificial Sequence
  derived and/or modified sequence
atgccacggaagggaacccaaccctccacagctcggcgacgcgaagagggccctcctcccccaagtcctgatggcgcatcttccgatgccgagcctgagccaccatctggcaggaccgagagccctgcaactgccgctgaaacggctagcgaggaactggacaacagaagcctagaagagatccttaactcaattccaccccctcccccacctgccatgacaaatgaggcaggagctccgaggctgatgataacccatatcgttaatcagaatttcaaaagttacgctggagaaaagatcctgggcccatttcacaaaaggttctcctgcataatcggtcctaatgggtccggcaagagcaacgtcatcgatagcatgctgtttgtcttcggctaccgagctcagaagattagatctaaaaaattgagcgtgctaatccacaatagcgatgagcacaaagatatccaaagctgtaccgttgaagtgcatttccagaagattatcgataaatag

SEQ ID NO: 287213 - DNA, 522 bp, Artificial Sequence
  derived and/or modified sequence
atgccacggaaaggtacacagccgagcacagctaggcgccgtgaggagggcccacctcctccatctccagacggggcttcctccgatgcagagcccgaacccccatcggggcgaaccgaatccccagccactgccgcagaaaccgcaagcgaggagctggacaacaggtctcttgaggagattctgaactccatccctcccccaccccctcctgccatgactaacgaggccggagcccctaggcttatgattactcatattgtgaaccagaactttaagtcttatgccggtgagaagattctgggaccctttcataagcggttcagttgcattatcggacccaatgggtccggcaaaagcaatgtcatcgacagtatgttgtttgtgttcgggtaccgagcccaaaagataagatcaaaaaagcttagtgtcctgatacacaattccgacgagcacaaagacatccagagttgcacagtggaggtgcatttccagaagatcattgataaggagggtgactag

SEQ ID NO: 287214 - DNA, 1272 bp, Artificial Sequence
  derived and/or modified sequence
atgccccgaaaggggacccagccttccaccgcccgtcggagggaagaaggaccccctccacctagcccagatggggcttcatctgatgcagaaccggaacctccatccggcagaactgagagcccagcaacggcagctgagaccgccagtgaggagctagacaatagatccttggaggaaatcctgaactccatcccacctcctccaccacccgctatgaccaacgaagcaggcgcaccacgcctaatgataactcatattgtcaatcaaaatttcaaaagttacgctggtgagaagatactcggaccctttcacaagcgcttttcatgcatcatcgggcctaacggatcagggaaatccaatgtgatcgactcaatgctctttgtgtttggctatcgcgctcagaagatccgtagcaagaagctctccgtacttatccacaatagtgacgaacacaaagacattcagagctgcactgttgaggtgcacttccagaaaatcattgataaggagggcgacgattacgaggtcattccaaatagcaatttttacgtgtctcggaccgcctgccgcgacaatacgtcagtgtatcatattagcggtaagaagaagacattcaaggacgtgggtaaccttcttagatctcacgggatagaccttgaccataacagattccttatcttacagggggaggtggagcaaattgccatgatgaagcctaagggccaaaccgaacatgatgaaggaatgttggagtatctggaggatattatcgggtgcgggcgtctgaacgagcctataaaggtcctatgcagacgcgttgagatattgaatgaacaccgcggagagaaattaaatcgcgttaagatggtcgaaaaagaaaaagacgcattggaaggagaaaaaaacatcgcaattgagttcttgactctggagaacgagattttccgcaagaagaatcacgtgtgtcagtattatatctacgaactgcaaaaacggatcgctgagatggagacacagaaggagaagatccacgaagataccaaagaaatcaatgagaaaagtaacatcctgagtaacgagatgaaggccaagaataaagacgtgaaagacactgaaaaaaagctgaacaagataactaagttcattgaggagaataaagagaagttcacacaactcgatctcgaagacgtgcaggtgcgagaaaagttaaagcacgccacttccaaggctaaaaagctggagaaacagctgcagaaggataaagagtag

SEQ ID NO: 287215 - DNA, 543 bp, Artificial Sequence
  derived and/or modified sequence
atgccgaggaagggcacacagcctagtacagcaagacgccgagaggaaggacctccgccaccaagtccagacggagcgtcttcagatgccgagccggaacctccgtctggacgcactgagtcacctgccactgccgcagagaccgcaagcgaggagcttgacaatagaagcctggaagaaatcctgaattccattccaccaccacctcctccagccatgacaaacgaagctggagcacccagactcatgattacacatattgttaaccagaacttcaaatcatatgccggagagaaaatcttgggcccttttcataagcgcttcagctgtatcataggacccaacggttcgggaaaatctaacgttattgattcaatgttattcgtgtttggctacagggcccagaaaattcgaagcaagaaattatcagttttgattcacaattccgatgagcataaagatatccagagctgtacggttgaggtgcattttcagaagattatcgacaaggaaggcgacgattacgaagtgatccccaactag

SEQ ID NO: 287216 - DNA, 522 bp, Artificial Sequence
  derived and/or modified sequence
atgccgaggaaggggacgcagccttctacagcccgacgcagggaagaagggccaccccctccctcacctgatggggctagttcagatgccgagcctgagccccctagcgggaggacagagtcccccgctacagccgctgagaccgctagtgaggagttggacaaccggtccttggaggagatccttaactctatcccaccaccgccacccccagccatgaccaacgaggccggagctccacgccttatgatcactcacattgtaaaccagaatttcaagtcatacgctggcgaaaaaatcctcggcccttttcataaaaggttttcttgtattattgggcctaatggttctggcaagtccaacgtaatcgatagtatgctctttgtatttggataccgggcacaaaagattcggtcaaaaaaactcagcgtgcttattcacaattcagatgagcataaggacatacagtcatgtactgtggaggtacacttccaaaaaatcatcgataaagagggcgattag

SEQ ID NO: 287217 - DNA, 849 bp, Artificial Sequence
  derived and/or modified sequence
attttaggcgccattttcgagtgaaggacccggagccgaaacaccggtaggagcggggaggtgggtactacacaaccgtctccagccttggtctgagtggactgtcctgcaggcacgtctagattttcccacttacataggtcttgttaagaaaccagtcctgccttcttgccactcgtgtctttcgatggctcccttcccgaagtcccgctgcctctaagcggagtgttaagcggggctctcggaagccggtggaccgagatttccccgggtggggcgggcgcggtgtagcggcccgcgggctgacttgctcccggctgtcccccggccccagcgaccatgccccgtaaaggcacccagccctccactgcccggcgcagagaggaagggccgccgccgccgtcccctgacggcgccagcagcgacgcggagcctgagccgccgtccggccgcacggagagcccagccaccgccgcagagactgcaagtgaggaacttgataatagaagtttagaagagattttgaacagcattcctcctcccccgcctccagcaatgaccaatgaagctggagctcctcggcttatgataactcatattgtaaaccagaacttcaaatcctatgctggggagaaaattctgggacctttccataagcgcttttcctgtattatcgggccaaatggcagtggcaaatccaatgttattgattctatgctttttgtgtttggctatcgagcacaaaaaataagatctaaaaaactctcagtattaatacataattctgatgaacacaaggacattcagagttgtacagtagaagttcattttcaaaagataattgataag

SEQ ID NO: 287218 - DNA, 583 bp, Artificial Sequence
  derived and/or modified sequence
ttttaggcgccattttcgagtgaaggacccggagccgaaacaccggtaggagcggggagcgaccatgccccgtaaaggcacccagccctccactgcccggcgcagagaggaagggccgccgccgccgtcccctgacggcgccagcagcgacgcggagcctgagccgccgtccggccgcacggagagcccagccaccgccgcagagactgcaagtgaggaacttgataatagaagtttagaagagattttgaacagcattcctcctcccccgcctccagcaatgaccaatgaagctggagctcctcggcttatgataactcatattgtaaaccagaacttcaaatcctatgctggggagaaaattctgggacctttccataagcgcttttcctgtattatcgggccaaatggcagtggcaaatccaatgttattgattctatgctttttgtgtttggctatcgagcacaaaaaataagatctaaaaaactctcagtattaatacataattctgatgaacacaaggacattcagagttgtacagtagaagttcattttcaaaagataattgataaggaaggggat

SEQ ID NO: 287219 - DNA, 1553 bp, Artificial Sequence
  derived and/or modified sequence
cccggagccgaaacaccggtaggagcggggaggtgggtactacacaaccgtctccagccttggtctgagtggactgtcctgcaggtcttgttaagaaaccagtcctgccttcttgccactcgtgtctttcgatggctcccttcccgaagtcccgctgcctctaagcggagtgttaagcggggctctcggaagccggtggaccgagatttccccgggtggggcgggcgcggtgtagcggcccgcgggctgacttgctcccggctgtcccccggccccagcgaccatgccccgtaaaggcacccagccctccactgcccggcgcagagaggaagggccgccgccgccgtcccctgacggcgccagcagcgacgcggagcctgagccgccgtccggccgcacggagagcccagccaccgccgcagagactgcaagtgaggaacttgataatagaagtttagaagagattttgaacagcattcctcctcccccgcctccagcaatgaccaatgaagctggagctcctcggcttatgataactcatattgtaaaccagaacttcaaatcctatgctggggagaaaattctgggacctttccataagcgcttttcctgtattatcgggccaaatggcagtggcaaatccaatgttattgattctatgctttttgtgtttggctatcgagcacaaaaaataagatctaaaaaactctcagtattaatacataattctgatgaacacaaggacattcagagttgtacagtagaagttcattttcaaaagataattgataaggaaggggatgattatgaagtcattcctaacagtaatttctatgtatccagaacggcctgcagagataatacttctgtctatcacataagtggaaagaaaaagacatttaaggatgttggaaatcttcttcgaagccatggaattgacttggaccataatagatttttaattttacagggtgaagttgaacaaattgctatgatgaaaccaaaaggccagactgaacacgatgagggtatgcttgaatatttagaagatataattggttgtggacggctaaatgaacctattaaagtcttgtgtcggagagttgaaatattaaatgaacacagaggagagaagttaaacagggtaaagatggtggaaaaggaaaaggatgccttagaaggagagaaaaacatagctatcgaatttcttaccttggaaaatgaaatatttagaaaaaagaatcatgtttgtcaatattatatttatgagttgcagaaacgaattgctgaaatggaaactcaaaaggaaaaaattcatgaagataccaaagaaattaatgagaagagcaatatactatcaaatgaaatgaaagctaagaataaagatgtaaaagatacagaaaagaaactgaataaaattacaaaatttattgaggagaataaagaaaaatttacacagctagatttggaagatgttcaagttagagaaaagttaaaacatgccacgagtaaagccaaaaaactggagaaacaacttcaaaaagataaagaaa

SEQ ID NO: 287220 - DNA, 821 bp, Artificial Sequence
  derived and/or modified sequence
ggagccgaaacaccggtaggagcggggaggtgggtactacacaaccgtctccagccttggtctgagtggactgtcctgcaggtcttgttaagaaaccagtcctgccttcttgccactcgtgtctttcgatggctcccttcccgaagtcccgctgcctctaagcggagtgttaagcggggctctcggaagccggtggaccgagatttccccgggtggggcgggcgcggtgtagcggcccgcgggctgacttgctcccggctgtcccccggccccagcgaccatgccccgtaaaggcacccagccctccactgcccggcgcagagaggaagggccgccgccgccgtcccctgacggcgccagcagcgacgcggagcctgagccgccgtccggccgcacggagagcccagccaccgccgcagagactgcaagtgaggaacttgataatagaagtttagaagagattttgaacagcattcctcctcccccgcctccagcaatgaccaatgaagctggagctcctcggcttatgataactcatattgtaaaccagaacttcaaatcctatgctggggagaaaattctgggacctttccataagcgcttttcctgtattatcgggccaaatggcagtggcaaatccaatgttattgattctatgctttttgtgtttggctatcgagcacaaaaaataagatctaaaaaactctcagtattaatacataattctgatgaacacaaggacattcagagttgtacagtagaagttcattttcaaaagataattgataaggaaggggatgattatgaagtcattcctaaca

SEQ ID NO: 287221 - DNA, 708 bp, Artificial Sequence
  derived and/or modified sequence
gggcccgagaccccgcctctcggcgagcccgccctcttctgaagaggcgtttctggaccactgagccccgcctcccactgcgccattttcgagtgaaggacccggagccgaaacaccggtaggagcggggaggtgggtactacacaaccgtctccagccttggtctgagtggactgtcctgcagcgaccatgccccgtaaaggcacccagccctccactgcccggcgcagagaggaagggccgccgccgccgtcccctgacggcgccagcagcgacgcggagcctgagccgccgtccggccgcacggagagcccagccaccgccgcagagactgcaagtgaggaacttgataatagaagtttagaagagattttgaacagcattcctcctcccccgcctccagcaatgaccaatgaagctggagctcctcggcttatgataactcatattgtaaaccagaacttcaaatcctatgctggggagaaaattctgggacctttccataagcgcttttcctgtattatcgggccaaatggcagtggcaaatccaatgttattgattctatgctttttgtgtttggctatcgagcacaaaaaataagatctaaaaaactctcagtattaatacataattctgatgaacacaaggacattcagagttgtacagtagaagttcattttcaaaagataattgataaggaaggggat

SEQ ID NO: 287222 - DNA, 3148 bp, Artificial Sequence
  derived and/or modified sequence
tttcctcgtccctcccttcgcggtgattttccggtcccggcgcccggcgagggcgcgcggctggtgtccgccccgcccgaaaggtgagccagccatgagagggtatcttgtggccatattcctgagtgctgtcttcctctattatgtactgcattgcatattatggggaacgaatgtctattgggtggcacctgtggaaatgaaacggagaaataagatccagccttgtttatcaaagccagcttttgcctctctgctgagtcagagctctgcatatattttaagaaaaggcattgaggaactcaatcaaaccagtattcttttcacacaggtttcatcagtttcacccttttctgtgtgcggctgattttagaaagattgcttccttgtatggtagcgataagtttgatttgccctatgggatgagaacatcagcggaatattttcgacttgctctttcaaaactgcagagttgtgatctctttgatgagtttgacaaaatgaataatggtcctgttttaggacatgaagaagaagttgggagaaggacaaccttccgacttttttatccagaatctgttttttcagatcctattcacaatgaccctaatacgacagtgattctcactgcttttaagccacatgatttaaggtggctgttggaattgttgatgggtgacaaaataaacactaatggtttttggaagaaaccagccttaaacctgatttataaaccttatcaaatccgaatattagatcctttcattatcagaacagcagcttatgaactgcttcattttccaaaagtgtttcccaaaaatcagaaacctaaacacccaacaacaggaattattgccatcacattggcgttttacatatgtcacgaagttcacctagctggttttaaatacaacttttctgacctcaagagtcctttgcactactatgggaatgccaccatgtctttgatgaataagaacgcgtatcacaatgtgactgcagagcagctctttttgaaggacattatagaaaaaaacctcgtaatcaacttgactcaagattgactctacagactcagaagatgatgctaacagtgttagttttatttttgtactgcaatttttagtttaaaatatgttggatgcactcgtcaaataattatgtatactgtctgttgctgcctggtgattcataaccaccagcttaatttctgtgaatactgtatatttaacttatgaaaaccaagaaatgtaaagataacaggaaaataagttttgattgcattgtttttaaaataagctagttttctgaggtgttttcacacgtctttttatagttacttcatcttagatttttgaagggatatgacttcctactaaggatttagtttaccacaacaattctgactacaataagacattttgaggaggatatttggctactgtaaacatggctggtggaaaatcacgattgtggcttgatgtggcaagccgaaaccacttggctctggaaatctaagttcatactggtttaattaagctctctcctgacaacccccagaattaaatgaaccatgattgtgaagagtaatttggtacaatgaaggcagtgtttgtttttaagttaaaggaaatgggctaaacataaagttcttattagataagtaaataactaaagaaagaatacaattactaaactctgatggctttgtattattttaaagaaatgaagtttaactttatacagtgaagctaagctaggcaagctcaagaaggaaaaaaaaatcttgaacattatttttttttgcctgacttacttattcattaaattttgaaggttttccacttgaagtaaattaggaaaggtaaagaagataacagaacaagtaaacacttaagaaaagtcaagctgaggccgggcagggtggctcacacctgtaatcctaacaaacactttgggaggccgagggaggcagctggattgcctgaactcaggagttcaagaccagcctggccaacatggtgaaacctcatctctactaaaatacaaaataattagctgggcgtggtggtatgcgctgtagtcccaggtactcgggaggctgaggcacgagaattgcttgagcccgggaggcagaggttgcagtgagccaagatcgcgccactgcacttcagcctgggtgacagagtgaggctgtcttctaaaaaatataaaaagtgaagttgggatttttggatttaaatggtacaaaaagaatatctcattttcccatgattaaagctaatcttcagatggaaagcttgcctggctacctagggtgcaccagagaatctgatccaatgcaagccagtcaatcctacaaatgtggtgagctagtcttccttcctatattttaataaatgtaaccaaaggccatctggaggtaggggaatgagaggtgaagaaacagaaaaatagaggttataaggatggaactaaaagttgtcagaagaggtatgagctgaagaaagaattactctcttttgaccaataaatacaattgggaaacactggaaaaccatggcttgattactgacaaccaacctgcctctctaaagagggtgtataaagggtgaaatacattagatttggctcagaaacagaatgcggtacttataaagcagaataaaggggagaacagtagtagttgatctaacccagattagacatgaataccagcatatgtttgcagagtcccacagttttgattcctcttataactttttgaggtgcaaaaggaaggtaccagaactggaatcacatgtaatcaatcagtgtgattttcccctcataccacacagccataggctgcagtgtggctgctgaagttcaattgatataaagtaaatcaggcttcaaaaagaatggtgctgtgggtacacaaggacataaagatgggaacgatagacactgaggactgcggcggggggagcgaggggagcggggagggcaagggctgaaagactatgtattgggtactatgctcacaacctggatgatgggatcattcataccacaaacctcagtatcacacaatatacccatgtaacaacctgcactctgcacatgtacccttagaatctaaaataaaagttgaaattattttttt

SEQ ID NO: 287223 - protein, 919 aa, Artificial Sequence
  derived and/or modified sequence
MAPSRFRTQLELVSNVLIFSCTNIVGVCTHYPAEVSQRQAFQETRECIQARLHSQRENQQQERLLLSVLPRHVAMEMKADINAKQEDMMFHKIYIQKHDNVSILFADIEGFTSLASQCTAQELVMTLNELFARFDKLAAENHCLRIKILGDCYYCVSGLPEARADHAHCCVEMGMDMIEAISLVREVTGVNVNMRVGIHSGRVHCGVLGLRKWQFDVWSNDVTLANHMEAGGKAGRIHITKATLNYLNGDYEVEPGCGGERNAYLKEHSIETFLILRCTQKRKEEKAMIAKMNRQRTNSIGHNPPHWGAERPFYNHLGGNQVSKEMKRMGFEDPKDKNAQESANPEDEVDEFLGRAIDARSIDRLRSEHVRKFLLTFREPDLEKKYSKQVDDRFGAYVACASLVFLFICFVQITIVPHSIFMLSFYLTCSLLLTLVVFVSVIYSCVKLFPSPLQTLSRKIVRSKMNSTLVGVFTITLVFLAAFVNMFTCNSRDLLGCLAQEHNISASQVNACHVAESAVNYSLGDEQGFCGSPWPNCNFPEYFTYSVLLSLLACSVFLQISCIGKLVLMLAIELIYVLIVEVPGVTLFDNADLLVTANAIDFFNNGTSQWSLCENLRHRRMEAGTYFPSGVKEQSPEHATKVALKVVTPIIISVFVLALYLHAQQVESTARLDFLWKLQATEEKEEMEELQAYNRRLLHNILPKDVAAHFLARERRNDELYYQSCECVAVMFASIANFSEFYVELEANNEGVECLRLLNEIIADFDEIISEDRFRQLEKIKTIGSTYMAASGLNDSTYDKVGKTHIKALADFAMKLMDQMKYINEHSFNNFQMKIGLNIGPVVAGVIGARKPQYDIWGNTVNVASRMDSTGVPDRIQVTTDMYQVLAANTYQLECRGVVKVKGKGEMMTYFLNGGPPLS

SEQ ID NO: 287224 - DNA, 2760 bp, Artificial Sequence
  derived and/or modified sequence
atggcaccgtctaggttccgcactcaactggagttagtgtccaacgtgctgatattttcctgcacgaatattgtcggggtgtgtacacactatccagcagaagtgagtcagcgccaagccttccaggaaacgagagagtgcatccaggctagactacattctcagcgagagaaccagcaacaggagcggcttcttctttctgtgctgccgaggcatgtcgccatggaaatgaaggccgacatcaatgccaaacaagaagacatgatgtttcataagatttacatccagaagcatgacaacgtctcaatcctcttcgccgacatcgaggggttcacatccctcgcctcccagtgcaccgctcaagagctcgtgatgactctgaacgaattgtttgctagattcgacaagctcgccgccgagaaccactgtcttcgcatcaaaattttaggggattgttactattgtgtgtcagggctcccggaagctcgagccgaccacgcacactgttgtgtggagatgggcatggatatgattgaggccatttcactcgtgagagaggtgacgggagttaatgtgaacatgagagtgggcatccacagcgggcgggtgcattgtggagtgcttgggctgcggaaatggcagtttgatgtatggtcaaacgatgttactttggccaaccatatggaagcaggaggcaaagcagggcggattcatatcacgaaggcaacactcaattatctgaatggcgattatgaagtggaacccggatgtggcggggaacgcaatgcatatctgaaggagcattctatcgagacctttctcatccttagatgcactcagaagcgtaaagaagaaaaggccatgatcgccaagatgaatcgacagcgaaccaattccattggacataacccaccccactggggggcggagcgccccttctacaaccacctgggcggaaatcaggtgagcaaggaaatgaaacggatggggttcgaggatccaaaagataagaacgcgcaggaatcagcaaatccggaagacgaagtggatgagttcctcggacgggctattgacgccagaagcatcgaccgactccggtcggagcatgtacggaagttcctgctgacgtttagggagcctgatcttgagaagaaatattccaaacaagtcgatgatcgcttcggagcctacgttgcttgcgcgtcactggttttcctgtttatctgtttcgttcaaatcactatcgtgccccatagcatatttatgctaagtttttacctgacctgcagccttcttttgacacttgtagtgttcgtcagcgtgatttactcgtgcgttaaattattccccagtccgttgcaaacactcagccgcaagatcgtgaggtcaaaaatgaactctacattggtaggtgtgttcacaatcacccttgtctttctcgccgccttcgtgaacatgtttacgtgcaacagtagagatctgctaggctgcttggcccaggaacacaacatcagtgcaagccaagtaaacgcctgccacgtagctgaatccgccgtcaattactccttgggtgacgaacagggcttctgtggcagcccctggcccaactgcaattttccggagtattttacctacagcgtgctcctgagcctgctggcttgttccgtgtttctccagatttcatgcattgggaaattggtgctgatgttggcaatagaattaatctatgtgctcattgtcgaggttccaggtgtgaccttgttcgataatgcagatcttctggtaaccgccaacgccatagattttttcaataacggcacctcacaatggtccctatgcgaaaacctgaggcaccgacgtatggaagccggcacctattttccatcaggagtgaaggagcagtccccagagcatgccacgaaggtggctctgaaggttgtcacacccatcattatatccgttttcgtgttagctctttatctgcacgctcagcaagttgagtccacggctcggctagactttttgtggaaattgcaggccacagaggaaaaggaagaaatggaggagttgcaggcctataaccggaggcttctgcacaacattctccccaaggacgtagccgcccattttctggcacgggagcggcgcaatgacgagctctactaccagagctgtgaatgcgtggccgtcatgtttgcctccatcgctaacttctcggagttttacgtggagctcgaggctaataatgaaggagtggaatgtctccggctcttaaatgaaatcatcgcagatttcgacgaaattatcagcgaggatcgcttcaggcagttggagaagatcaagacgatcgggtccacttatatggccgcttcaggtctcaacgattcaacctacgacaaagtggggaagacccatataaaggcgctggccgacttcgccatgaaactgatggaccaaatgaaatatattaatgaacactcattcaataactttcagatgaagattggactcaacattggccccgtcgtggcaggtgttatcggggcccgcaagcctcaatacgatatctgggggaacacggtgaacgtagcctcaagaatggactctacaggggttcccgaccggattcaggtgacaacagatatgtatcaggtgttagccgctaacacctaccagttggagtgccgtggtgtcgtcaaagtgaagggtaaaggcgagatgatgacatactttctgaatggcgggccacctctgtcgtag

SEQ ID NO: 287225 - DNA, 3962 bp, Artificial Sequence
  derived and/or modified sequence
agatgcatggagggcctggaatcatgatgaggggaggggatgcggtgctctctcgggcaccggctgcactatcagcgttccctggagaaacagaacccttaggatttatatagacatatagaaagatttactgtgggggattggctcatgccgttacggagactgagaagacccatgagctgttgtctgtaagctggaggaccagaaaagccagtgacgtggtttcagtccaagcctgaaggcctgaaacccaggagagacaatgttgtaagtcccagcctaagtcagaggcctgagaaccaggagcccgctttccaagggcaggggaagatggatgtctcagctcaagaagagagtgaattctcccctcctctacctttttgctctattcaagccttcagtggatttgataacgcccacctgaatttggcaatctctggggcccctggatccctgctgaggtgcccatggtcccctccatccccacagggcagcctgtgtagtgctgggtagggcccaggcctgtcccacggaagacatggccccatctaggttccgcactcagttggagcttgtctccaatgttctcattttctcctgcaccaacatcgtgggtgtctgcacccactatccggctgaggtctcccagagacaggctttccaggagacccgagagtgcatccaggcgcggctccactcgcagcgggagaaccagcagcaggaacggctcctgctgtctgtccttccccgtcatgttgccatggagatgaaagcagacatcaacgccaagcaggaggatatgatgttccataagatttacatccagaaacatgacaacgtgagcatcctgtttgctgacatcgagggcttcaccagcctggcgtcccagtgcactgcacaggaactggtcatgaccctcaacgagctcttcgcccgctttgacaagctggccgcagagaatcactgtttacgtattaagatccttggggattgttattactgcgtctcggggctgcctgaagcaagggctgaccacgcccactgctgtgtggagatgggcatggacatgatcgaggccatctcgttggtccgggaggtgacaggggtgaacgtgaacatgcgtgtgggaattcacagcgggcgagtacactgcggtgtccttggtctcaggaagtggcagttcgacgtctggtctaacgatgtcacgctagccaaccacatggaggctggcggcaaggcaggacgcatccacatcaccaaggctacactcaactacctgaatggggactacgaggtggagccaggctgtgggggcgagcgcaacgcctacctcaaggagcacagtatcgagaccttcctcatcctgcgctgcacccagaagcggaaagaagagaaggccatgatcgccaagatgaaccgccagagaaccaactccatcgggcacaacccaccacactggggggctgagcgccccttctacaaccacctgggtggcaaccaggtgtccaaggagatgaagcggatgggctttgaagaccccaaggacaagaacgcccaggagagtgcgaaccctgaggatgaagtggatgagtttctgggccgtgccattgacgccaggagcattgataggcttcggtctgagcacgtccgcaagttcctcctgaccttcagggagcctgacttagagaagaagtactccaagcaggtagacgaccgatttggtgcctatgtggcgtgtgcctcgctcgtcttcctcttcatctgctttgtccagatcaccatcgtgccccactccatattcatgctcagcttctacctgacctgttccctgctgctgaccttggtggtgtttgtgtctgtgatctactcctgcgtaaagctcttcccctccccactgcagaccctctccaggaagatcgtgcggtccaagatgaacagcaccctggttggggtgttcaccatcaccctggtgttcctggcggcttttgtcaacatgttcacgtgcaactccagggacctgctgggctgcttggcacaggagcacaacatcagcgcgagccaggtcaacgcgtgtcacgtggcggagtcggccgtcaactacagcctgggcgatgagcagggcttctgtggcagcccctggcccaactgcaacttccccgagtacttcacctacagcgtgctgctcagcctgctggcctgctccgtgttcctgcagatcagctgcatcgggaagctggtgctcatgctggccatcgagctcatctacgtgctcatcgtggaggtgccaggtgtcacgctcttcgacaacgccgacctgctggtcaccgccaacgccatagacttcttcaacaacgggacctcccagtggagcctgtgtgagaacctcagacacaggagaatggaagctggtacctactttccctctggagtcaaggaacaaagccctgagcatgcaaccaaggtggcattgaaggtggtgacgcccatcatcatctcagtctttgtgctggccctgtacctgcacgcccagcaggtggagtccactgcccgcctcgacttcctctggaaactgcaggccacagaggagaaagaggagatggaggagctgcaggcctacaaccggcggctgctgcacaacatcctgcccaaggacgtggccgctcacttcctggcccgcgagcggcgcaatgatgagctctactatcagtcctgtgagtgtgtggcggtcatgttcgcctccatcgccaacttctccgagttctacgttgagctggaggccaacaacgagggtgtcgagtgcctgcggctactcaatgagatcatcgctgactttgatgagatcatcagcgaggatcggttccggcagctggagaagatcaagaccatcggcagcacctacatggctgcctccggcctcaacgactctacctacgacaaggtgggcaagacccacatcaaggcactggccgactttgccatgaagctgatggaccagatgaagtacatcaatgagcactccttcaacaacttccagatgaagatcgggctcaacatcggccccgtggtggccggggtgataggggcacgaaagcctcagtacgacatctggggcaataccgtgaacgtggccagccgcatggacagcaccggtgtacccgaccgcatccaggtcaccacagacatgtaccaggtgctggctgccaacacgtaccagctggagtgccggggcgtggtcaaggtcaagggcaaaggcgagatgatgacctacttcctcaatggagggcccccgctcagttagcagctgttggccaatggtgccaggcagcctggcctccagaggcatggaagcagcttctctgtgtgccgggggtggcggggaagccatgctccagcccgcagggctgcgctgctgagattttccacttggactccagagcagcttctgcctttgctggtgggcagcggcctctgtcccaggccccggggtgccagcgtcctgcgagcacccagctgaccaaagatgtttccctctgtagaagactctgctagactgggtctgaagcttgagttttctaacaggtgctgctgcacaggtggaaaggagccgtgggaatgtgtgtgtggcacggcccagacaagggcagggctgaggggcctccgactcagctgggggtagacgggctcgaatgtggcctgggagagcctagggggccccaggggtctgcttttctatgtgagcctttaaacttcagacaggccaccaccctgcacctgcaggggctttggcacaggagtgctggctttggagggactgtggccttcatcgtggtcctctgcccacacctccacgcacacagacagtgccctaggagggaaacagaactaattacgagggggaggcaagaggacgccaagcaaggagtggtgattctgagaaaaatatttattaaataaaacaaaac

SEQ ID NO: 287226 - DNA, 2760 bp, Artificial Sequence
  derived and/or modified sequence
atggcccccagccgcttccgcacccagctggagctggtgtccaatgtgctgatcttcagctgcaccaacatcgtgggcgtgtgcacccactacccagctgaggtgtcccagaggcaggccttccaggagacccgggagtgcatccaggcccggctgcacagccagcgggagaaccagcagcaggagcggctgctgctgtctgtgctgcccaggcatgtggccatggagatgaaggctgacatcaatgccaagcaggaggacatgatgttccacaagatctacatccagaagcatgacaacgtgtccatcctgtttgctgacatcgagggcttcaccagcctggccagccagtgcacagcccaggagctggtgatgaccctgaatgagctgtttgccaggtttgacaagctggccgctgagaaccactgcctgcgcatcaagatcctgggggactgctactactgtgtgtctggcctgcctgaggcccgggctgaccacgcccactgctgcgtggagatgggcatggacatgattgaggccatcagcctggtgcgggaggtgactggagtgaatgtgaacatgagggtgggcatccacagcggccgggtgcactgcggcgtgctgggcctgaggaagtggcagtttgatgtgtggagcaatgatgtgaccctggccaaccacatggaggccggcggcaaggccggccgcatccacatcaccaaggccaccctgaactacctgaatggagactatgaggtggagcccggctgcggcggggagagaaatgcctacctgaaggagcacagcattgagaccttcctgatcctgcgctgcacccagaagaggaaggaggagaaggccatgattgccaagatgaaccggcagaggaccaacagcatcggccacaaccccccccactggggcgctgagcggcccttctacaaccacctgggcggcaaccaggtgtccaaggagatgaagaggatgggctttgaggaccccaaggacaagaatgcccaggagagcgccaacccagaagatgaggtggatgagttcctgggccgggccattgatgcccggagcattgaccggctgcggagtgaacatgtgaggaagttcctgctgaccttccgggagccagacctggagaagaagtacagcaagcaggtggatgacagatttggagcctacgtggcctgtgccagcctggtgttcctgttcatctgctttgtgcagatcaccatcgtgccccacagcatcttcatgctgtccttctacctgacctgcagcctgctgctgaccctggtggtgtttgtgtctgtcatctacagctgtgtgaagctgttccccagccccctgcagaccctgagcaggaagatcgtgcgcagcaagatgaacagcaccctggtgggcgtcttcaccatcaccctggtgttcctggccgcctttgtgaacatgttcacctgcaacagccgggacctgctgggctgcctggcccaggagcacaacatcagcgccagccaggtgaatgcctgccacgtggccgagagcgctgtgaactacagcctgggagatgagcagggcttctgtggcagcccctggcccaactgcaacttccctgagtacttcacctacagcgtgctgctgagcctgctggcctgcagcgtcttcctgcagatcagctgcatcggcaagctggtgctgatgctggccatcgagctgatctacgtgctgattgtggaggtgcctggggtgaccctgtttgacaatgctgacctgctggtgacagccaatgccatcgacttcttcaacaacggcaccagccagtggagcctgtgtgagaacctgcggcacaggaggatggaggccggcacctacttccccagcggcgtgaaggagcagagccctgagcacgccaccaaggtggccctgaaggtggtgacccccatcatcatctctgtgtttgtgctggccctgtacctgcacgcccagcaggtggagagcacagcccggctggacttcctgtggaagctgcaggccacagaggagaaggaggagatggaggagctgcaggcctacaacagaaggctgctgcacaacatcctgcccaaggatgtggccgcccacttcctggcccgggagaggagaaatgatgagctgtactaccagagctgtgaatgtgtggccgtgatgtttgccagcatcgccaacttcagcgagttctacgtggagctggaggccaacaatgaaggagtggagtgcctgcggctgctgaatgagatcatcgctgactttgatgagatcatcagtgaagatcgcttccggcagctggagaagatcaagaccatcggcagcacctacatggccgccagcggcctgaatgacagcacctatgacaaggtgggcaagacccacatcaaggccctggccgactttgccatgaagctgatggaccagatgaagtacatcaatgagcacagcttcaacaacttccagatgaagattggcctgaacatcggccctgtggtggccggcgtgattggagccaggaagccccagtatgacatctggggcaacacagtgaatgtggccagcaggatggacagcactggagtgcctgaccgcatccaggtgaccacagacatgtaccaggtgctggccgccaacacctaccagctggagtgccggggcgtggtgaaggtgaagggcaagggggagatgatgacctacttcctgaatggaggcccccccctgtcctag

SEQ ID NO: 287227 - DNA, 2760 bp, Artificial Sequence
  derived and/or modified sequence
atggcccccagccggttccggacccagctggagctggtgagcaacgtactcatctttagctgcacaaacatcgtcggcgtgtgtacacattaccctgcagaggtttcccagcggcaagcctttcaggagacccgggagtgcattcaggctcgcctgcactctcagcgggagaatcagcagcaagagcgccttctgttatcagtgctgcctcgacacgtggctatggagatgaaggctgacatcaatgccaaacaggaagatatgatgtttcataagatctatatccaaaaacacgataacgtgagcattttgtttgcagacatcgagggtttcacttcacttgcatcgcagtgcaccgctcaggagctcgtgatgacccttaatgagttgttcgcacgatttgataagctggcagcagagaatcattgcctgcggatcaaaatcctaggtgattgctactactgcgttagtggtctgccggaggcccgagccgatcacgcccattgctgcgtggaaatgggcatggacatgattgaagccatatccctggtgagagaggttaccggcgttaacgtaaacatgagagtcggcattcattctggccgggtgcactgtggcgttttgggactgcgtaaatggcagtttgatgtttggagtaatgatgtgacactggccaaccacatggaggcaggtggaaaagctggccggatccatatcactaaagccacgctcaattatttgaacggggattacgaagttgagcccggttgcggcggagagcggaacgcctacctgaaggagcactctattgagacatttcttatactccggtgcactcagaagagaaaagaggaaaaagccatgattgcaaagatgaaccggcagcgaactaatagtatcggtcataacccccctcattggggagccgagcggcccttctacaaccatttaggcggtaaccaggtgagtaaggagatgaaaaggatgggctttgaagacccaaaagataagaatgcacaagagagcgctaatcctgaagacgaagttgacgagttcttggggcgagccattgatgctaggagcatcgacaggctgcgcagtgaacatgtcagaaagttcctgttgacattcagagaaccggacctagaaaaaaaatattctaagcaggtagatgatcgatttggggcatatgtcgcctgcgcctcccttgtgttcctctttatatgcttcgtgcagattacgatcgtgccacatagtatatttatgctgagtttttaccttacctgctccctgctcctcacactggtggtgttcgtgagtgttatctactcatgcgtcaagttattcccctctcctcttcagacactctccaggaagatcgttcgcagcaaaatgaattcaacccttgtgggagtattcactatcacactggtttttcttgctgcattcgtgaacatgtttacctgcaactccagggacctccttgggtgccttgctcaggaacacaatatttcagctagccaagtaaacgcctgccatgtggctgaaagcgccgtgaactattctctaggcgatgaacagggattctgtggttccccttggcccaattgcaattttcctgagtacttcacctatagtgtgctgctgagtctcctggcttgcagcgttttcctgcagatatcatgtattgggaaactcgtactgatgctggccattgaactaatttatgtcctgatagtcgaggtgccgggcgtgaccctgtttgacaacgccgacctgctcgtgactgccaatgccatcgacttcttcaacaatggaacgtcccagtggtccctatgcgaaaacctgcgccacaggcgaatggaagctggtacatacttccctagcggtgtcaaggaacaaagtccagagcacgctaccaaagtggcattgaaagtagtgactcccattattataagtgtgttcgtgttggccctttacctgcacgcccagcaggtagagtcgaccgctagactcgattttttgtggaaactccaggcaactgaagagaaggaagagatggaagaactgcaggcctataaccgaaggttactgcacaacattcttcctaaggatgtggccgcgcatttcctcgcacgggagcgcaggaacgacgagctgtattaccagtcgtgtgagtgcgtagccgtaatgtttgcgagtattgccaatttctcagaattttacgtggagcttgaggcgaataatgaaggggttgagtgccttcgattgttaaatgagatcatagctgattttgatgagattatatcagaagacagatttcgccagctggaaaagataaaaaccatcggctcgacctatatggccgcatctggtctgaacgactcaacctatgataaggtgggcaagacacacatcaaagctctggcggattttgctatgaagctcatggatcagatgaagtatataaacgaacactctttcaacaacttccagatgaaaatcggcttgaatataggcccagtggtcgccggggtgatcggtgctcgcaaacctcagtacgacatctgggggaatacagttaacgtggcgtccaggatggattccacgggggtcccagatcggatacaggtgactactgacatgtatcaggtcctggcagccaacacctaccagctcgagtgcagaggagtggttaaagtgaaaggcaaaggggagatgatgacttactttctcaacggagggccaccactcagttag

SEQ ID NO: 287228 - DNA, 2760 bp, Artificial Sequence
  derived and/or modified sequence
atggctcccagtcgcttcaggacacagctggagctcgtgagcaacgtgctgatatttagctgcacaaatatcgtgggcgtttgtactcactatccagcggaggtgagccagagacaggcttttcaggagacgcgggaatgtatccaggcgcgactgcattctcagagagagaatcaacagcaggaacgtctcctgctctccgttctgcctagacacgttgcgatggagatgaaggccgacatcaacgctaagcaagaagacatgatgtttcacaaaatttacattcagaaacatgataacgttagtattttattcgcagatattgaaggatttacctctctcgccagccaatgtaccgctcaggaactcgtcatgactttgaacgagctatttgccagatttgataaattagctgctgaaaaccactgtctgaggattaaaattcttggcgattgctattactgcgtctctggcctcccagaggctcgcgcagaccatgctcattgttgtgtggaaatgggtatggatatgatcgaggctatctctctcgtacgcgaagttaccggagtgaatgtaaacatgcgggtcgggatccatagcggccgagttcactgcggtgtcctggggctgaggaagtggcagtttgatgtttggtcaaatgatgtgactctggccaaccacatggaggcaggcggaaaagcgggacgcatacatatcaccaaggcaaccctgaattacctaaacggggattacgaagtcgaacccggatgcggcggagaacggaacgcgtatctcaaggagcattctattgaaacattcctgatactgagatgtacccaaaagcgcaaagaggaaaaagctatgatagccaagatgaaccgacagagaaccaacagcatcggccataacccaccacactggggcgcagagcggcctttctacaaccatctcgggggtaaccaggtgtctaaagaaatgaaacgcatgggatttgaggaccccaaagataaaaacgcgcaggaatcagcaaatccggaggatgaagtagatgagttcctaggaagggctattgatgcccgaagcattgatcgactccgatccgaacatgtgaggaagttcctattgactttccgtgagccggacctggaaaagaagtactcgaaacaggtcgatgatcgattcggtgcatacgttgcatgtgcttctttggtgttcttatttatctgtttcgttcagattaccatcgtcccacattccatcttcatgctgagtttctacttaacctgttccctgcttttgacactggtggtcttcgtgtccgttatctattcttgcgtgaagttgttcccttctcctctgcagaccctgtccagaaaaattgtgcgctctaaaatgaattccacactggtcggggtattcacgattacactggtctttctagcggcttttgtgaacatgttcacatgcaacagccgggatctgctgggatgcctcgctcaggaacacaatataagcgccagccaggtgaacgcctgccacgtcgccgaatcagccgtcaactatagtctcggggacgagcagggcttctgcggatccccatggccgaactgcaattttcccgagtattttacctacagcgttttgctgtccctgttagcatgtagtgtatttttgcagatcagctgtattggaaagctggtcttgatgctcgccattgagttaatttacgtgcttatcgtggaggttcctggggtgacattatttgacaacgccgatttgctcgtgacagctaatgctattgacttcttcaataacggtacatctcagtggtctttatgtgagaacctgagacatcggagaatggaggctggaacctacttccccagcggcgtcaaagagcagagtcccgagcacgcaactaaagtcgccctgaaggtggtgactcctattatcatcagtgtgttcgtactggctctgtatctacacgcacaacaagtggagtctacggcaagacttgactttttatggaagttgcaggctaccgaggagaaagaagagatggaagagttacaagcctataatagacggcttctccacaatatcctgcccaaagacgtggcagcccatttcttggcccgagaaagaagaaacgacgaactgtactaccaatcttgtgaatgcgtggccgttatgtttgcatcaattgcaaattttagcgagttttacgtcgaactagaggcaaataatgagggggttgaatgcctacgactcttaaatgagatcatcgccgactttgacgagatcatctccgaagaccgctttaggcagctcgaaaaaattaaaactataggttctacatatatggctgccagcggtttgaatgatagtacgtatgacaaggtgggaaaaacccacataaaagcacttgcagacttcgccatgaaactaatggaccagatgaagtacattaatgaacactcttttaataatttccagatgaagatcgggctgaacattgggccagttgtggcaggggttatcggtgcaaggaagcctcagtatgatatttggggtaacactgtgaacgtggcaagtagaatggactcaactggggtcccggacaggattcaggtaaccacagatatgtaccaggtcctggcagccaacacttaccagttggagtgtcgtggcgtggtgaaagtaaagggcaaaggtgaaatgatgacttattttctgaacggtggaccgcctttgagttag

SEQ ID NO: 287229 - DNA, 2760 bp, Artificial Sequence
  derived and/or modified sequence
atggcccccagcagattcagaacccagctggagctggtgagcaacgtgctgatcttcagctgcaccaacatcgtgggcgtgtgcacccactaccccgccgaggtgagccagagacaggccttccaggagaccagagagtgcatccaggccagactgcacagccagagagagaaccagcagcaggagagactgctgctgagcgtgctgcccagacacgtggccatggagatgaaggccgacatcaacgccaagcaggaggacatgatgttccacaagatctacatccagaagcacgacaacgtgagcatcctgttcgccgacatcgagggcttcaccagcctggccagccagtgcaccgcccaggagctggtgatgaccctgaacgagctgttcgccagattcgacaagctggccgccgagaaccactgcctgagaatcaagatcctgggcgactgctactactgcgtgagcggcctgcccgaggccagagccgaccacgcccactgctgcgtggagatgggcatggacatgatcgaggccatcagcctggtgagagaggtgaccggcgtgaacgtgaacatgagagtgggcatccacagcggcagagtgcactgcggcgtgctgggcctgagaaagtggcagttcgacgtgtggagcaacgacgtgaccctggccaaccacatggaggccggcggcaaggccggcagaatccacatcaccaaggccaccctgaactacctgaacggcgactacgaggtggagcccggctgcggcggcgagagaaacgcctacctgaaggagcacagcatcgagaccttcctgatcctgagatgcacccagaagagaaaggaggagaaggccatgatcgccaagatgaacagacagagaaccaacagcatcggccacaaccccccccactggggcgccgagagacccttctacaaccacctgggcggcaaccaggtgagcaaggagatgaagagaatgggcttcgaggaccccaaggacaagaacgcccaggagagcgccaaccccgaggacgaggtggacgagttcctgggcagagccatcgacgccagaagcatcgacagactgagaagcgagcacgtgagaaagttcctgctgaccttcagagagcccgacctggagaagaagtacagcaagcaggtggacgacagattcggcgcctacgtggcctgcgccagcctggtgttcctgttcatctgcttcgtgcagatcaccatcgtgccccacagcatcttcatgctgagcttctacctgacctgcagcctgctgctgaccctggtggtgttcgtgagcgtgatctacagctgcgtgaagctgttccccagccccctgcagaccctgagcagaaagatcgtgagaagcaagatgaacagcaccctggtgggcgtgttcaccatcaccctggtgttcctggccgccttcgtgaacatgttcacctgcaacagcagagacctgctgggctgcctggcccaggagcacaacatcagcgccagccaggtgaacgcctgccacgtggccgagagcgccgtgaactacagcctgggcgacgagcagggcttctgcggcagcccctggcccaactgcaacttccccgagtacttcacctacagcgtgctgctgagcctgctggcctgcagcgtgttcctgcagatcagctgcatcggcaagctggtgctgatgctggccatcgagctgatctacgtgctgatcgtggaggtgcccggcgtgaccctgttcgacaacgccgacctgctggtgaccgccaacgccatcgacttcttcaacaacggcaccagccagtggagcctgtgcgagaacctgagacacagaagaatggaggccggcacctacttccccagcggcgtgaaggagcagagccccgagcacgccaccaaggtggccctgaaggtggtgacccccatcatcatcagcgtgttcgtgctggccctgtacctgcacgcccagcaggtggagagcaccgccagactggacttcctgtggaagctgcaggccaccgaggagaaggaggagatggaggagctgcaggcctacaacagaagactgctgcacaacatcctgcccaaggacgtggccgcccacttcctggccagagagagaagaaacgacgagctgtactaccagagctgcgagtgcgtggccgtgatgttcgccagcatcgccaacttcagcgagttctacgtggagctggaggccaacaacgagggcgtggagtgcctgagactgctgaacgagatcatcgccgacttcgacgagatcatcagcgaggacagattcagacagctggagaagatcaagaccatcggcagcacctacatggccgccagcggcctgaacgacagcacctacgacaaggtgggcaagacccacatcaaggccctggccgacttcgccatgaagctgatggaccagatgaagtacatcaacgagcacagcttcaacaacttccagatgaagatcggcctgaacatcggccccgtggtggccggcgtgatcggcgccagaaagccccagtacgacatctggggcaacaccgtgaacgtggccagcagaatggacagcaccggcgtgcccgacagaatccaggtgaccaccgacatgtaccaggtgctggccgccaacacctaccagctggagtgcagaggcgtggtgaaggtgaagggcaagggcgagatgatgacctacttcctgaacggcggcccccccctgagctag

SEQ ID NO: 287230 - protein, 756 aa, Artificial Sequence
  derived and/or modified sequence
MAAFGLLSYEQRPLKRPRLGPPDVYPQDPKQKEDELTAVNVKQGFNNQPAFTGDEHGSARNIVINPSKIGAYFSSILAEKLKLNTFQDTGKKKPQVNAKDNYWLVTARSQSAIHSWFSDLAGNKPLSILAKKVPILSKKEDVFAYLAKYSVPMVRATWLIKMTCAYYSAISEAKIKKRQAPDPNLEWTQISTRYLREQLAKISDFYHMASSTGDGPVPVPPEVEQAMKQWEYNEKLAFHMFQEGMLEKHEYLTWILDVLEKIRPMDDDLLKLLLPLMLQYSDEFVQSAYLSRRLAYFCARRLSLLLSDSPNLLAAHSPHMMIGPNNSSIGAPSPGPPGPGMSPVQLAFSDFLSCAQHGPLVYGLSCMLQTVTLCCPSALVWNYSTNENKSANPGSPLDLLQVAPSSLPMPGGNTAFNQQVRARIYEVEQQIKQRGRAVEVRWSFDKCQESTAGVTISRVLHTLEVLDRHCFDRTDSSNSMETLYHKIFWANQNKDNQEVAPNDEAVVTLLCEWAVSCKRSGKHRAMAVAKLLEKRQAEIEAERCGESEVLDEKESISSSSLAGSSLPVFQNVLLRFLDTQAPSLSDPNSECEKVEFVNLVLLFCEFIRHDVFSHDAYMCTLISRGDLSVTASTRPRSPVGENADEHYSKDHDVKMEEQSIMAHMGIDSGTTNIFDEVDKSDFKTDFGSEFPIFSPMPGESCENANTSLGRRMSVNCEKLVKREKPRELIFPSNYDLLRHLQYATHFPIPLVSHCFS

SEQ ID NO: 287231 - protein, 194 aa, Artificial Sequence
  derived and/or modified sequence
MIEDTMTLLSLLGRIMRYFLLRPETLFLLCISLALWSYFFHTDEVKTIVKSSRDAVKMVKGKVAEIMQNDRLGGLDVLEAEFSKTWEFKNHNVAVYSIQGRRDHMEDRFEVLTDLANKTHPSIFGIFDGHGGETAAEYVKSRLPEALKQHLQDYEKDKENSVLSYQTILEQQILSIDREMLEKLTVSYDEAVTF

SEQ ID NO: 287232 - DNA, 585 bp, Artificial Sequence
  derived and/or modified sequence
atgatagaggatactatgacgcttctttcgctcctgggcaggatcatgagatattttttgttacgaccggagacactatttctgctgtgcatctcccttgcattgtggagttactttttccacaccgatgaggtgaagacaatcgttaagtcctccagggacgcggttaagatggttaagggcaaggtggccgagatcatgcagaatgatcgcctgggcggcctcgatgtgcttgaggctgagttctccaaaacgtgggagttcaaaaaccacaatgttgcagtgtactccattcaggggaggagagaccacatggaggatcgattcgaagtgcttaccgatctggctaataaaacccatcccagcatttttggcatatttgacggccatggaggcgagacggcggccgagtacgtcaagtcgcgtctccctgaggcccttaaacagcatctgcaggattacgaaaaggacaaggagaattcagttctgtcctaccagactatcctggagcagcagattcttagcatagaccgggagatgttggaaaagttgacggtgtcttacgacgaggcagtcaccttctag

SEQ ID NO: 287233 - DNA, 585 bp, Artificial Sequence
  derived and/or modified sequence
atgattgaggacaccatgaccctgctgagcctgctgggccgcatcatgagatacttcctgctgcggcctgagaccctcttcctgctgtgcatcagcctggccctgtggagctacttcttccacacagatgaggtgaagaccatcgtgaagagcagcagagatgctgtgaagatggtgaagggcaaggtggccgagatcatgcagaatgaccggctgggcggcctggatgtgctggaggccgagttcagcaagacctgggagttcaagaaccacaacgtggccgtgtacagcatccagggcagaagagaccacatggaggacagatttgaggtgctgacagacctggccaacaagacccaccccagcatcttcggcatctttgatggccacggcggggagacagctgctgaatatgtgaagagccggctgcctgaggccctgaagcagcacctgcaggactatgagaaggacaaggaaaattctgtgctgagctaccagaccatcctggagcagcagatcctgagcattgaccgggagatgctggagaagctgactgtgtcctatgatgaagctgtgaccttctag

SEQ ID NO: 287234 - DNA, 585 bp, Artificial Sequence
  derived and/or modified sequence
atgatcgaggacaccatgaccctgctgagcctgctgggccggatcatgcggtactttctgttaaggcccgaaaccttattccttctgtgtatctccttggccctgtggagctactttttccatacggacgaggtaaagacaatcgtgaaaagctccagagatgctgtgaagatggtgaaagggaaggtggcagagattatgcaaaatgaccgcctcggcggcctagatgttctggaggctgaattctcaaaaacgtgggagttcaagaatcataatgtagccgtctactcaattcagggacgcagagaccatatggaagatcgatttgaagtattgacagatttagctaacaaaacccaccctagtatctttggaatttttgatgggcatggtggagaaactgcagccgagtatgtaaaaagtagactgcctgaagccctcaaacagcacctccaggactacgaaaaggataaagaaaactcggttctgagttaccagactatcctcgagcagcaaattctcagtatcgaccgtgagatgctcgaaaagctaacagtgtcatatgacgaagccgttacattctag

SEQ ID NO: 287235 - DNA, 585 bp, Artificial Sequence
  derived and/or modified sequence
atgattgaagataccatgacactgcttagcttgcttggaagaatcatgcggtacttcctgctgcgtcctgagacactgttcctgctatgtatcagccttgccctgtggagctatttttttcacacggacgaagtgaagactattgtcaagagcagccgagatgctgtgaagatggtgaaaggtaaagtggcagagatcatgcagaacgatagattggggggactggacgtgctggaagctgaattcagcaaaacctgggagtttaagaatcacaatgtggctgtgtacagtatccaggggagaagggatcacatggaggataggttcgaggtgctgaccgaccttgcgaataaaacacacccatcgatcttcggcatattcgatggccacggaggcgagaccgcagccgagtatgttaagtctcgccttcccgaagcattaaaacagcatttgcaggactacgagaaggataaggaaaattccgttctgtcttaccagaccatcctcgagcagcagatcctgtcgattgatcgtgagatgctcgaaaagctaaccgtgtcttacgatgaggctgtgaccttttag

SEQ ID NO: 287236 - DNA, 1589 bp, Artificial Sequence
  derived and/or modified sequence
ccgggaggtgcctgggagaggcaggcagagcccagccggccgcctgcggctcagtaccgaccgtgccgcgtcgccgggctctgcgtacccctgtctctgcccaggctcccgcaaaacttttattctctggggcccccggggtgtgtgaaggaattggaaccttccgccatctccgcgctccccttcggcggcgaccgaggggacctgcgtccctcgtccgccgggctctggagccctgcgcctcacctgctgatcgctctccggagtctcgagggggcacccccggagggaccgcgcgggcgccggcgcccctgaactctcccgctcaccgcggcagacccgcccagcgcaactttaacttgattcttcttgcccaaccggggcaccagcggctgctgctgcggcggctgctgctaccgccgccgccgcggtctcacaaaggggctcagggaagggaggcggcgcgggcggcagggacgggcctccgggccgccgaggcggggagacaaaagggaagctgcctctgctcgcgctgcctgctcggagccgcttgctcggctgcctctggctgggctccgcgatcctctcccccaccctcgggcactgctccgcctccctcccggcgggctgtccccgcagtgctcccggacccggcgagccttcggggcgcgcgtcgctggtggtggttgaggctctagcgataataaatgatagaggatacaatgactttgctgtctctgctgggtcgcatcatgcgctacttcttgctgagacccgagacgcttttcctgctgtgcatcagcttggctctatggagttacttcttccacaccgacgaggtgaagaccatcgtgaagtccagccgggacgccgtgaagatggtgaagggcaaggtagccgagatcatgcagaacgatcgactcggggggcttgatgtgctcgaggccgagttttccaagacctgggagttcaagaaccacaacgtggcggtgtactccatccagggccggagagaccacatggaggaccgcttcgaagttctcacggatctggccaacaagacgcacccgtccatcttcgggatcttcgacgggcacgggggagagactgcagctgaatatgtaaaatctcgactcccagaggcccttaaacagcatcttcaggactacgagaaagacaaagaaaatagtgtattatcttaccagaccatccttgaacagcagattttgtcaattgaccgagaaatgctagaaaaattgactgtatcctatgatgaagcagttactttttgaatgactgcttggagactgcaagtaacaccttagcttcaaaatatctagttcatattaattctaaactaatttcgattttaaacaaagactttgctttaatataccactattccctccccattctctgtgctgttgtcaaccaaattatatgcttatacattataatgtcatcaataatttcataattatttctttatgcatttattttttaaattagaagaaaaaagttaacaaataagatcaaattagaacaaaatataattctttttaaattaaaatcctgcttctgtaaaaaaa

SEQ ID NO: 287237 - DNA, 585 bp, Artificial Sequence
  derived and/or modified sequence
atgatcgaggacaccatgaccctgctgagcctgctgggcagaatcatgagatacttcctgctgagacccgagaccctgttcctgctgtgcatcagcctggccctgtggagctacttcttccacaccgacgaggtgaagaccatcgtgaagagcagcagagacgccgtgaagatggtgaagggcaaggtggccgagatcatgcagaacgacagactgggcggcctggacgtgctggaggccgagttcagcaagacctgggagttcaagaaccacaacgtggccgtgtacagcatccagggcagaagagaccacatggaggacagattcgaggtgctgaccgacctggccaacaagacccaccccagcatcttcggcatcttcgacggccacggcggcgagaccgccgccgagtacgtgaagagcagactgcccgaggccctgaagcagcacctgcaggactacgagaaggacaaggagaacagcgtgctgagctaccagaccatcctggagcagcagatcctgagcatcgacagagagatgctggagaagctgaccgtgagctacgacgaggccgtgaccttctag

SEQ ID NO: 287238 - protein, 298 aa, Artificial Sequence
  derived and/or modified sequence
MSDANLDSSKKNFLEGEVDDEESVILTLVPVKDDANMEQMEPSVSSTSDVKLEKPKKYNPGHLLQTNEQFTAPQKARCKIPALPLPTILPPINKVCRDTLRDWCQQLGLSTNGKKIEVYLRLHRHAYPEQRQDMPEMSQETRLQRCSRKRKAVTKRARLQRSYEMNERAEETNTVEVITSAPGAMLASWARIAARAVQPKALNSCSIPVSVEAFLMQASGVRWCVVHGRLLSADTKGWVRLQFHAGQAWVPTTHRRMISLFLLPACIFPSPGIEDNMLCPDCAKRNKKMMKRLMTVEK

SEQ ID NO: 287239 - DNA, 1383 bp, Artificial Sequence
  derived and/or modified sequence
agccctttgtttatggcctgatctagctaaggcttctagacttcaggagcttaagaatcgtccggagggctgggcgtggcggtgcaggcctgtagtcccacccactccgaaggctgcggagggaggatcaacttgagtctgggaactcagccaggaattcaagaccagcctgggcaacacagtgaggccccctacccacatcctctccgtccccgcaatctccttccatcccagggtgttgctgaaaatgtcagatgcaaatttggatagcagcaagaagaatttcttggagggggaagtagatgatgaggaaagtgtgattttgacactggtgccagttaaagatgacgcaaatatggaacaaatggaaccaagcgtttcttcaacttctgatgtcaaactggagaagcctaagaaatacaatccaggtcatctacttcaaacaaatgagcaatttacagctccacaaaaagctagatgcaaaataccagcccttcccttgccgaccattttgcctcccattaataaggtgtgtcgggacactttgcgggactggtgtcaacaactcggtttgagtactaatggcaagaaaatcgaagtttatctgaggcttcataggcatgcttaccctgaacaacggcaagatatgcctgaaatgtcacaagagaccagattacagcgatgttcgaggaaacgcaaggcagtgaccaagagagcaaggcttcagagaagttatgagatgaatgagagagcagaagagaccaatacagttgaagtgataacttcagcaccgggagccatgttggcatcatgggcaagaattgctgcaagagctgttcagcctaaggctttgaattcatgttccattcctgtttctgttgaggcctttttgatgcaagcctctggcgtcaggtggtgtgtggtccatggcagacttctctcggcagacacaaagggttgggtacgcctgcagtttcatgcaggtcaggcctgggtgcctaccactcacaggaggatgatttctctcttcttgttacctgcctgcattttcccatccccaggcatagaagataatatgttatgccccgactgtgctaagaggaataagaagatgatgaaaagattaatgacagtagagaagtagcagcaacctgtttgaatacaatgtactaaaggagggatgtactttcagatcatgtaacctattacgaaggagtggaagaggagacaatttgaatgaatcctcatgatctacaaaacaaaatcatagtgactaggactccacagtgaagatggttgactagtgacacagccccatctaaagaatccctttctgtatgtctgaaaacccattaaaataaagtcactgcaattggccttgta

SEQ ID NO: 287240 - protein, 18 aa, Artificial Sequence
  derived and/or modified sequence
MAENSVLTSTTGRTSLAD

SEQ ID NO: 287241 - DNA, 5631 bp, Artificial Sequence
  derived and/or modified sequence
tttgcattagctgctctagcaaactgcgtgcgcgcgcacacacacggatgcttgtttggcagaagctttctgtttattcagcacagagttctcctaggctcccagatatagaaagctctaagagttgctacaggagatagaattgaaactatacataggctgaggtgggcactgcggaggattggctatgcgagggtattaatgtggtgcggctgtacctgcctgttttgtgaaagtcacttctctgagactgtgaaggtgagaagcccagggatccactagaagcttcactgcggctctttggtgggggaaagcattcccagtggtagctgtcctcatttgcagcgttattctcggaaaccaagtatgtgcagcagtgacagactatgccacagctcctctgcagtttggaagctggaacaaatggaaagagcttatagccaagagaggttgtgatttttttttttttaccatccaagctttctctggcagtgcacaaatgaaggatgagctttgtggcaagcaaaatcagcagactgcctgacagggggttttgatcgaacggttggaagtaagcagccttgcccaaacatccagtgcagtggcctccagtaccgatggcagcatccacacagactctgtggatggaacaccagaccctcagcgcacaaaggctgccattgctcacctgcagcagaagatcctgaagctcacagaacaaatcaagattgcacaaacagcccgggacgacaacgttgctgaatacttgaagcttgccaacagtgcagacaaacagcaggctgcccgcatcaagcaagtctttgagaagaagaaccagaaatctgcccaaactatcctccagctgcaaaagaaacttgagcactaccacaggaagctcagagaggtagagcagaatgggatcccccggcagccaaaggatgtcttcagggacatgcaccagggtctgaaggatgtaggagcaaaggtgactggcttcagtgaaggtgtggtggatagtgtcaaaggtgggttttccagcttctcccaggccacccattcagcagcaggcgctgtagtctcaaagcccagagagattgcctcactcattcggaacaaatttggcagtgcagacaacatccccaacctgaaggactctttagaggaagggcaagtggatgatgcggggaaggctttgggagtgatttcaaactttcagtctagcccaaaatatggtagtgaagaagattgttctagtgccacttcaggctcagtgggagccaacagcaccacagggggcatcgctgtaggagcatccagctccaaaacaaacaccctggacatgcagagctcaggatttgatgcactactacatgagatccaggagatccgggaaacccaggccagactagaggaatcctttgagactctcaaggaacattatcagagggactattccttaataatgcagaccttacaggaggagcgatatagatgtgaacgattggaagaacagctaaatgacctaacagagctccaccagaatgaaatcttgaacttgaagcaggaactggcaagcatggaagaaaaaatcgcgtatcagtcctatgaacgggcccgggacatccaggaggccctggaggcatgccagacgcgcatctccaagatggagctgcagcagcagcagcagcaggtggtgcagctagaagggctggagaatgccactgcccggaaccttctgggcaaactcatcaacatcctcctggctgtcatggcagtccttttggtctttgtctccactgtagccaactgtgtggtccccctcatgaagactcgcaacaggacgttcagcactttattccttgtggtttttattgcctttctctggaagcactgggacgccctcttcagctatgtggaacggttcttttcatcccctagatgatgctggcacagaaggcattgttccctaccctctggcgagtgcatgcagcagagagttagacagcaacttacctactctgaagttttctacaacaaaaaaagagttgagtgaatctgtttacatttagaataatgtttttttcttcaagagacgcaattgcaatagtattttttagattttatccaagaagttttttgggcgaaaatcttggatcatttttatgtagcatgattttccttgggatgcaaatcttaaaacagtcctttaatatgaaccaacaatctggagcacaccgaagggcaatctaaattgtggcttgaaggactgcactaaaacccactaaaaagatgcgaaaacctgatgagggcaaaccagttaaacctaacaccctgccttgtctgggctcatcacctctccctatcccagactaactttactgtgaaatcctaccacattccatgtctgaatttttggattcggggtggattttcgttgtccgtggaagaacacatggatctctctggctttctcacccaagttggccacttacgctaatcctggaagtatgatcacttttgaacctgccccttaaccttgacgaggatacaaaagtgaaagcatcatcccccaaaggatcactgcacagtcctactacagtatttttaagtagccctctaaatacttaattttaagcaaaatcccttggccgcacttttaaggtttttttatatgtgtatagttaccaacctaaaaataaaaaatccgaacagcatacttgaagaatgtaatactcaaactctcagtgcttccttatggtttctaataggattttttattattgttattattattattgggtttttttggacagggttgggagggtcttttatttttcctttgaaataaagaagtgatgtttttaaatgaagaaatgtgtggatatttaagtgtgctgctccctcttgtcttgaaacagtttgagtaagaaagtcttgctgtaaatgctgccctctgccgcctttgttttgagatgcagtttaaactccctctggctgctgctgctgctttttggtgtcccgacatacctacgcccccgttttatgggtttggcttagttgaagaggaaagggttgtgcaaggagagcaggaggctgtttccaaaaaccagtgtagtaggatagggattttttttttttttttttgccccaagaaaacgttcacccagtgatcttgggctggggttgtctttaggaaaagttgagactataagagtcataaataagtccttgtgtttccttaatttattttgttaacacccctaattacaaccaaagtgatgatgtggagtcttctgtcttcattttggccccagcattcttaatttcaaagctttattctgtctgcctaagagaatcaaccaaaggtgattctcctaaagagcagtgaaggaaatgtcaggttagcaggacccaagttttgggtgtgaaatgttgccagcttcctataatgtaaacggacttgttaacctaacctaattatgctcagtggacttctatagatggttttgaaaaatgaactgagctgccttcccccgtcgcataaccagttccatcatcctggtggaacttgaacatttagagtttatctagagagcttggttaatctttccatattatttgtagtattggtcacaaatgctgttccctcttagcctcattctgtgcaaccaagtgcatataagatgccctgaaaagagtaacaaagtatgctttgcctgtttccacttaccaggaaattccttcagaactagattagcattgccctgcctgtctgaaaggacagtttacctaatggtgccagcctccttttgctttggcaagctggatttctcagagccagcatgttgtttccataactactttgatattttaactcaggtactccagtcttcaccccaacctcagctgattgtagtacacctgctagctctgttgccccctcaaaactgcacccagagcagggccacaagggtgctttttttctttaaaaaaaaaaaaattagaaccaattcatgttcatgccaaaaacaaattgtccccaagcctatatgtattaaaatgttaactttgcctaaaaatattgcagtgactttttaggcaggagtgccaaaggacactatgaactttttgaactgacagtttctcctaactttctgctttagcgtaattgctcagagtagagagcccccacaaagttatttaaaagatgccctagcagcaatccaccagtttttctaagctagaacctttgagtcccccaaactgcctgaagacttaagttttgtgggcactggaagtcactttgatagatggattgaaactgttcctatttgccctgggacggtttctatctatcaaaggaaggttttcacctgtagaaagccccctgcctccagccaaatagtcccatgctgactttctatcttcctttctcaaactgtcttaggaaggaccttcagtgcagatcaggtgcagtaatggctttcttgtcccttaattattcaccagacccagaagttgtacgcatttaatgctgtttgtaaccatgcatctgttttcattctttgctgtaccttttgctgcccatcctgttacttttgagtttctttcattgtggttgttcttgggttcttttgtcttgtcagagctcttctataacctcgctctaatggcttaacagttgttctgggtggaaacgtcccctcatttgaatgctcctctaaaaaaaaaagaaaagaaaactgtattcattccctttaaaatgaaacattcctggtttatttgtccatgcctctagcctgggtgagtgaagctggctgtgttggcctgggtgattgttcaggttgtagaatgcgcattttacattgtttatgataattgaagggtacttctgtctgctccaatttccattccttggtatactcagtatgtcctagtaaggaaggctttccactctactggctccttaagaagcaaaagtaggttaaattttatacttcactgactagggtcttctctctcccctgttctgaatggagtaaaagtctgatgccaagacaaatattgggagcgagccttcctcactagccatgtccaaataatgagcgtattttcatgtggtcttcactgcatttggttttgtttctgatttcatgttcctttgaggtacagtcagatgaaaatgctgagttctgagagagttccaatgaggagctgcctttcagctttggaaaatatgcaactaaaacaaaaccaaacattattgtaatctgacacaggcaaaattatggttcccacaccccaaccccaaatgaaacctgggattttgaatgtggctctaagagttaacattgctgtctgtatgtcgtgtatgctaggtgatatcctcagtagggattgactactagactgtgtgttttatcaaagtgtgtaagaataaaaactcacttgcacgaattgaaacgtaaagaaatgacacttgtgaacgtgtgaacgttaacactgtagttgatagatcttaagctgctaattgttgagagagatttaaatttatgttctgtctggtcgctgcagattctcagcagcacttttactgtatatagaaattgaaataaagacctcagctattaa

SEQ ID NO: 287242 - protein, 663 aa, Artificial Sequence [sequence omitted]

SEQ ID NO: 287243 - protein, 673 aa, Artificial Sequence
  derived and/or modified sequence
MACLLETPIRMSVLSEVTASSRHYVDRLFDPDPQKVLQGVIDMKNAVIGNNKQKANLIVLGAVPRLLYLLQQETSSTELKTECAVVLGSLAMGTENNVKSLLDCHIIPALLQGLLSPDLKFIEACLRCLRTIFTSPVTPEELLYTDATVIPHLMALLSRSRYTQEYICQIFSHCCKGPDHQTILFNHGAVQNIAHLLTSLSYKVRMQALKCFSVLAFENPQVSMTLVNVLVDGELLPQIFVKMLQRDKPIEMQLTSAKCLTYMCRAGAIRTDDNCIVLKTLPCLVRMCSKERLLEERVEGAETLAYLIEPDVELQRIASITDHLIAMLADYFKYPSSVSAITDIKRLDHDLKHAHELRQAAFKLYASLGANDEDIRKKIIETENMMDRIVTGLSESSVKVRLAAVRCLHSLSRSVQQLRTSFQDHAVWKPLMKVLQNAPDEILVVASSMLCNLLLEFSPSKEPILESGAVELLCGLTQSENPALRVNGIWALMNMAFQAEQKIKADILRSLSTEQLFRLLSDSDLNVLMKTLGLLRNLLSTRPHIDKIMSTHGKQIMQAVTLILEGEHNIEVKEQTLCILANIADGTTAKDLIMTNDDILQKIKYYMGHSHVKLQLAAMFCISNLIWNEEEGSQERQDKLRDMGIVDILHKLSQSPDSNLCDKAKMALQQYLA

SEQ ID NO: 287244 - DNA, 1992 bp, Artificial Sequence
  derived and/or modified sequence
atgagcgtgctgagcgaggtgaccgccagcagcagacactacgtggacagactgttcgaccccgacccccagaaggtgctgcagggcgtgatcgacatgaagaacgccgtgatcggcaacaacaagcagaaggccaacctgatcgtgctgggcgccgtgcccagactgctgtacctgctgcagcaggagaccagcagcaccgagctgaagaccgagtgcgccgtggtgctgggcagcctggccatgggcaccgagaacaacgtgaagagcctgctggactgccacatcatccccgccctgctgcagggcctgctgagccccgacctgaagttcatcgaggcctgcctgagatgcctgagaaccatcttcaccagccccgtgacccccgaggagctgctgtacaccgacgccaccgtgatcccccacctgatggccctgctgagcagaagcagatacacccaggagtacatctgccagatcttcagccactgctgcaagggccccgaccaccagaccatcctgttcaaccacggcgccgtgcagaacatcgcccacctgctgaccagcctgagctacaaggtgagaatgcaggccctgaagtgcttcagcgtgctggccttcgagaacccccaggtgagcatgaccctggtgaacgtgctggtggacggcgagctgctgccccagatcttcgtgaagatgctgcagagagacaagcccatcgagatgcagctgaccagcgccaagtgcctgacctacatgtgcagagccggcgccatcagaaccgacgacaactgcatcgtgctgaagaccctgccctgcctggtgagaatgtgcagcaaggagagactgctggaggagagagtggagggcgccgagaccctggcctacctgatcgagcccgacgtggagctgcagagaatcgccagcatcaccgaccacctgatcgccatgctggccgactacttcaagtaccccagcagcgtgagcgccatcaccgacatcaagagactggaccacgacctgaagcacgcccacgagctgagacaggccgccttcaagctgtacgccagcctgggcgccaacgacgaggacatcagaaagaagatcatcgagaccgagaacatgatggacagaatcgtgaccggcctgagcgagagcagcgtgaaggtgagactggccgccgtgagatgcctgcacagcctgagcagaagcgtgcagcagctgagaaccagcttccaggaccacgccgtgtggaagcccctgatgaaggtgctgcagaacgcccccgacgagatcctggtggtggccagcagcatgctgtgcaacctgctgctggagttcagccccagcaaggagcccatcctggagagcggcgccgtggagctgctgtgcggcctgacccagagcgagaaccccgccctgagagtgaacggcatctgggccctgatgaacatggccttccaggccgagcagaagatcaaggccgacatcctgagaagcctgagcaccgagcagctgttcagactgctgagcgacagcgacctgaacgtgctgatgaagaccctgggcctgctgagaaacctgctgagcaccagaccccacatcgacaagatcatgagcacccacggcaagcagatcatgcaggccgtgaccctgatcctggagggcgagcacaacatcgaggtgaaggagcagaccctgtgcatcctggccaacatcgccgacggcaccaccgccaaggacctgatcatgaccaacgacgacatcctgcagaagatcaagtactacatgggccacagccacgtgaagctgcagctggccgccatgttctgcatcagcaacctgatctggaacgaggaggagggcagccaggagagacaggacaagctgagagacatgggcatcgtggacatcctgcacaagctgagccagagccccgacagcaacctgtgcgacaaggccaagatggccctgcagcagtacctggcctag

SEQ ID NO: 287245 - DNA, 2022 bp, Artificial Sequence
  derived and/or modified sequence
atggcctgcctgctggagacccccatcagaatgagcgtgctgagcgaggtgaccgccagcagcagacactacgtggacagactgttcgaccccgacccccagaaggtgctgcagggcgtgatcgacatgaagaacgccgtgatcggcaacaacaagcagaaggccaacctgatcgtgctgggcgccgtgcccagactgctgtacctgctgcagcaggagaccagcagcaccgagctgaagaccgagtgcgccgtggtgctgggcagcctggccatgggcaccgagaacaacgtgaagagcctgctggactgccacatcatccccgccctgctgcagggcctgctgagccccgacctgaagttcatcgaggcctgcctgagatgcctgagaaccatcttcaccagccccgtgacccccgaggagctgctgtacaccgacgccaccgtgatcccccacctgatggccctgctgagcagaagcagatacacccaggagtacatctgccagatcttcagccactgctgcaagggccccgaccaccagaccatcctgttcaaccacggcgccgtgcagaacatcgcccacctgctgaccagcctgagctacaaggtgagaatgcaggccctgaagtgcttcagcgtgctggccttcgagaacccccaggtgagcatgaccctggtgaacgtgctggtggacggcgagctgctgccccagatcttcgtgaagatgctgcagagagacaagcccatcgagatgcagctgaccagcgccaagtgcctgacctacatgtgcagagccggcgccatcagaaccgacgacaactgcatcgtgctgaagaccctgccctgcctggtgagaatgtgcagcaaggagagactgctggaggagagagtggagggcgccgagaccctggcctacctgatcgagcccgacgtggagctgcagagaatcgccagcatcaccgaccacctgatcgccatgctggccgactacttcaagtaccccagcagcgtgagcgccatcaccgacatcaagagactggaccacgacctgaagcacgcccacgagctgagacaggccgccttcaagctgtacgccagcctgggcgccaacgacgaggacatcagaaagaagatcatcgagaccgagaacatgatggacagaatcgtgaccggcctgagcgagagcagcgtgaaggtgagactggccgccgtgagatgcctgcacagcctgagcagaagcgtgcagcagctgagaaccagcttccaggaccacgccgtgtggaagcccctgatgaaggtgctgcagaacgcccccgacgagatcctggtggtggccagcagcatgctgtgcaacctgctgctggagttcagccccagcaaggagcccatcctggagagcggcgccgtggagctgctgtgcggcctgacccagagcgagaaccccgccctgagagtgaacggcatctgggccctgatgaacatggccttccaggccgagcagaagatcaaggccgacatcctgagaagcctgagcaccgagcagctgttcagactgctgagcgacagcgacctgaacgtgctgatgaagaccctgggcctgctgagaaacctgctgagcaccagaccccacatcgacaagatcatgagcacccacggcaagcagatcatgcaggccgtgaccctgatcctggagggcgagcacaacatcgaggtgaaggagcagaccctgtgcatcctggccaacatcgccgacggcaccaccgccaaggacctgatcatgaccaacgacgacatcctgcagaagatcaagtactacatgggccacagccacgtgaagctgcagctggccgccatgttctgcatcagcaacctgatctggaacgaggaggagggcagccaggagagacaggacaagctgagagacatgggcatcgtggacatcctgcacaagctgagccagagccccgacagcaacctgtgcgacaaggccaagatggccctgcagcagtacctggcctag

SEQ ID NO: 287246 - DNA, 1992 bp, Artificial Sequence
  derived and/or modified sequence
atgagtgtcctgtccgaagtgacagcgtcatctaggcattacgttgaccgcctgttcgaccccgatccccagaaggtgctgcaaggagtgattgacatgaaaaatgcggttatcggaaataataaacaaaaggccaacttaattgtcctgggggccgtccctaggctcctgtacctcctgcagcaagaaactagctctacagagctcaagactgaatgcgctgtcgttcttgggtctctggccatggggactgagaataatgtgaaatccctgcttgactgccacattatccccgctctcctgcaaggtctcttgtcccccgacctcaagttcatcgaggcctgcctgaggtgcctgagaacaatcttcactagtccagtgactcctgaagagctcttgtacaccgacgctactgttatcccacacctcatggccctcttgtcccgatcccgatacacacaggagtacatatgccagatcttctcacactgctgcaagggccccgatcaccagaccatcctgtttaaccacggtgctgttcaaaatatcgcacacctcttgacgtctttgagttacaaggtgcggatgcaagctcttaaatgtttttcagttctggctttcgaaaatccccaggtatcgatgacactggtgaatgtcctggttgatggggaacttctacctcaaatctttgtgaaaatgctgcagcgggacaaacccatcgaaatgcagctgacctctgcaaaatgtctgacttatatgtgccgagccggggcaatcaggaccgatgataactgtatcgtcctaaagacactgccatgcctagttcgtatgtgtagcaaggaaaggctcctggaggaacgggtggaaggcgctgaaaccctcgcctacctcattgaacccgatgtggaactccagcggatcgcatccataacagaccatttaatcgccatgctcgctgactacttcaagtatccttcaagtgttagcgcgattaccgacataaagcgactcgaccatgatctgaaacacgcccatgaactgcggcaggcagctttcaaactatacgcaagcctgggtgcaaatgacgaggacattcgtaagaagatcatagaaacagagaatatgatggacagaattgtcacagggttaagtgagtcgtctgtgaaagtgcgcctggccgcagtgcgctgcttgcactcgttgtctcgcagcgtccagcagctgcggacgagctttcaggatcatgccgtgtggaaacccctcatgaaagtgttgcagaacgctcccgatgagattctcgtggtggcgtcatccatgctctgcaacctactgttggaattttcaccaagcaaagagcccattctggaatctggtgcagtcgaattgctgtgcggccttacacagtccgagaacccagcactaagagtgaatggtatctgggcacttatgaatatggccttccaggctgagcagaagattaaggccgatattctcagatccctgtccactgaacagcttttccgattgcttagcgattccgatctgaatgtgctgatgaaaaccttagggctgctaaggaatttactgtctactcgtcctcacattgacaaaattatgtcaacccatggtaagcaaattatgcaggccgtgacacttatcctggagggtgagcacaacatcgaggtaaaagagcagaccctatgtatcctcgccaatatcgctgacggcacaacggccaaggatttgattatgaccaacgatgatattctgcagaaaattaaatattacatgggccacagccacgtgaaattgcagcttgcagccatgttctgtatctccaacctgatttggaatgaggaagaagggagccaagagcgtcaggacaaactccgagatatgggtatcgtggatattctccacaagctgtcccagtcacccgatagcaatttgtgtgacaaggccaaaatggctctccagcagtatctggcctag

SEQ ID NO: 287247 - DNA, 2022 bp, Artificial Sequence
  derived and/or modified sequence
atggcctgcctgctcgagacgcccatcaggatgtcggtgttgtcagaggttacggcctcttctcgtcattatgtcgacaggctgtttgacccagatccgcagaaagtattgcagggcgtcattgacatgaaaaacgccgttatcggtaataacaaacagaaggccaacctgattgtgctgggggctgtgcctaggctgctatatctgctccagcaggagacaagttccaccgagctcaaaactgagtgtgccgtcgtcttaggctctctcgcgatgggaaccgaaaataacgtgaagagcttgttagactgccatattattccagccttgctgcaaggcctactctcccctgacttgaaatttatcgaggcttgcttgcgatgcctaaggaccattttcactagccccgtcacccctgaggagctgctgtacacagatgccacagtgataccccatctgatggcattgctctctcgtagccgttacacccaagaatacatctgtcagatctttagccactgctgcaagggtcccgaccaccagacaatcctgttcaatcatggggcagtccagaatatcgcgcacctgctaacatccctttcatataaggtacgaatgcaggcgctgaaatgttttagcgtcttggctttcgagaatcctcaagtttccatgactctagtcaatgttttggtagatggggagctgcttccccagattttcgtcaagatgctgcagcgtgataagcctattgaaatgcagctgacctcagccaaatgcctgacatatatgtgtcgagccggggcaataagaactgatgacaactgtatcgtgttgaagaccctgccctgcctcgtgaggatgtgctctaaagagagactgctggaggagcgggtggaaggcgctgaaacactcgcctacctcattgaacccgacgtggagctgcagaggattgcaagcatcacggaccacctgatagccatgctcgctgattactttaaataccccagcagcgtatcagccatcacagacattaagagacttgatcatgatctcaagcacgctcatgaactgcgccaagctgcattcaagctgtatgcctccctgggcgccaatgatgaagatatcaggaagaaaatcattgaaactgagaacatgatggacagaattgtcactggtctctcagagagttcagtcaaagtgcggttagcggccgtcagatgtttacactccctgtcaagaagcgtccagcagttgcgcacctcattccaggaccatgccgtctggaagccattaatgaaggttttacaaaacgctcctgatgagatcttggtagtggcttccagcatgctgtgcaatttgctcctcgaattctccccttcgaaagaacctatccttgagtctggggccgtggagctcctgtgtggcctcacacagagtgaaaaccccgctctgcgcgtgaacgggatctgggccctgatgaatatggcgtttcaggccgagcaaaaaattaaagctgacatcctaagatccttgtccacagaacagctcttcagactgttgtctgacagcgaccttaatgtactcatgaaaaccctggggctgctgaggaacctgcttagcacacggccccacattgacaaaataatgtcgacccacggcaaacaaattatgcaggctgttactctgatcttggaaggggagcacaatatagaggtgaaagagcagacactctgtattcttgctaacattgctgacggtacaacggctaaagacctcataatgacaaatgatgatatacttcagaaaataaaatactatatgggacactcccacgttaaactccagctagcagcaatgttttgtatttctaatctcatttggaacgaggaggagggtagccaagagcgtcaggataagctccgtgacatgggcattgtggacatccttcataaactctctcagagcccggattccaacctatgtgacaaggccaagatggccctgcagcagtatctcgcctag

SEQ ID NO: 287248 - DNA, 1992 bp, Artificial Sequence
  derived and/or modified sequence
atgtctgtgctgtctgaggtgacagccagcagccgccactacgtggaccggctgtttgatcctgacccccagaaggtgctgcagggcgtgattgacatgaagaatgctgtgattggcaacaacaagcagaaggccaacctgattgtgctgggcgctgtgccccggctgctgtacctgctgcagcaggagaccagcagcacagagctgaagacagaatgtgctgtggtgctgggcagcctggccatgggcacagaaaataatgtgaagagcctgctggactgccacatcatcccagccctgctgcagggcctgctgagcccagacctgaagttcatcgaggcctgcctgcgctgcctgcggaccatcttcaccagccctgtgaccccagaggagctgctgtacacagatgccaccgtcatcccccacctgatggccctgctgagccgcagccgctacacccaggagtacatctgccagatcttcagccactgctgcaagggccctgaccaccagaccatcctcttcaaccacggggctgtgcagaacatcgcccacctgctgaccagcctgagctacaaggtgaggatgcaggccctgaagtgcttctctgtgctggcctttgagaacccccaggtgtccatgaccctggtgaatgtgctggtggatggagagctgctgccccagatctttgtgaagatgctgcagagggacaagcccatcgagatgcagctgaccagcgccaagtgcctgacctacatgtgccgggccggggccatcagaacagatgacaactgcatcgtgctgaagaccctgccctgcctggtgaggatgtgcagcaaggagcggctgctggaggagcgggtggagggcgctgagaccctggcctacctgattgaaccagatgtggagctgcagagaattgccagcatcacagaccacctgattgccatgctggccgactacttcaagtaccccagctctgtgtctgccatcacagacatcaagaggctggaccatgacctgaagcacgcccacgagctgcggcaggccgccttcaagctgtatgccagcctgggcgccaatgatgaggacatcaggaagaagatcatcgagacagagaacatgatggacagaattgtgacaggcctgtctgagagctctgtgaaggtgcggctggccgctgtgcgctgcctgcacagcctgagccgctctgtgcagcagctgcggaccagcttccaggaccatgctgtgtggaagcccctgatgaaggtgctgcagaatgccccagatgagatcctggtggtggccagctccatgctgtgcaacctgctgctggagttcagccccagcaaggagcccatcctggagagcggggctgtggagctgctgtgtggcctgacccagagcgagaacccagccctgcgggtgaatggcatctgggccctgatgaacatggccttccaggccgagcagaagatcaaggctgacatcctgcggagcctgagcacagagcagctgttccggctgctgagtgacagcgacctgaatgtgctgatgaagaccctgggcctgctgaggaacctgctgagcacccggccccacatcgacaagatcatgagcacccacggcaagcagatcatgcaggccgtgaccctcatcctggagggggagcacaacatcgaggtgaaggagcagaccctgtgcatcctggccaacattgctgatggcaccacagccaaggacctgatcatgaccaatgatgacatcctgcagaagatcaagtactacatgggccacagccacgtgaagctgcagctggccgccatgttctgcatcagcaacctgatctggaatgaggaggagggcagccaggagcggcaggacaagctgcgggacatgggcatcgtggacatcctgcacaagctgagccagagcccagacagcaacctgtgtgacaaggccaagatggccctgcagcagtacctggcctag

SEQ ID NO: 287249 - DNA, 2022 bp, Artificial Sequence
  derived and/or modified sequence
atggcctgcctgctggagacccccatccgcatgtctgtgctgtctgaggtgacagccagcagccgccactacgtggaccggctgtttgatcctgacccccagaaggtgctgcagggcgtgattgacatgaagaatgctgtgattggcaacaacaagcagaaggccaacctgattgtgctgggcgctgtgccccggctgctgtacctgctgcagcaggagaccagcagcacagagctgaagacagaatgtgctgtggtgctgggcagcctggccatgggcacagaaaataatgtgaagagcctgctggactgccacatcatcccagccctgctgcagggcctgctgagcccagacctgaagttcatcgaggcctgcctgcgctgcctgcggaccatcttcaccagccctgtgaccccagaggagctgctgtacacagatgccaccgtcatcccccacctgatggccctgctgagccgcagccgctacacccaggagtacatctgccagatcttcagccactgctgcaagggccctgaccaccagaccatcctcttcaaccacggggctgtgcagaacatcgcccacctgctgaccagcctgagctacaaggtgaggatgcaggccctgaagtgcttctctgtgctggcctttgagaacccccaggtgtccatgaccctggtgaatgtgctggtggatggagagctgctgccccagatctttgtgaagatgctgcagagggacaagcccatcgagatgcagctgaccagcgccaagtgcctgacctacatgtgccgggccggggccatcagaacagatgacaactgcatcgtgctgaagaccctgccctgcctggtgaggatgtgcagcaaggagcggctgctggaggagcgggtggagggcgctgagaccctggcctacctgattgaaccagatgtggagctgcagagaattgccagcatcacagaccacctgattgccatgctggccgactacttcaagtaccccagctctgtgtctgccatcacagacatcaagaggctggaccatgacctgaagcacgcccacgagctgcggcaggccgccttcaagctgtatgccagcctgggcgccaatgatgaggacatcaggaagaagatcatcgagacagagaacatgatggacagaattgtgacaggcctgtctgagagctctgtgaaggtgcggctggccgctgtgcgctgcctgcacagcctgagccgctctgtgcagcagctgcggaccagcttccaggaccatgctgtgtggaagcccctgatgaaggtgctgcagaatgccccagatgagatcctggtggtggccagctccatgctgtgcaacctgctgctggagttcagccccagcaaggagcccatcctggagagcggggctgtggagctgctgtgtggcctgacccagagcgagaacccagccctgcgggtgaatggcatctgggccctgatgaacatggccttccaggccgagcagaagatcaaggctgacatcctgcggagcctgagcacagagcagctgttccggctgctgagtgacagcgacctgaatgtgctgatgaagaccctgggcctgctgaggaacctgctgagcacccggccccacatcgacaagatcatgagcacccacggcaagcagatcatgcaggccgtgaccctcatcctggagggggagcacaacatcgaggtgaaggagcagaccctgtgcatcctggccaacattgctgatggcaccacagccaaggacctgatcatgaccaatgatgacatcctgcagaagatcaagtactacatgggccacagccacgtgaagctgcagctggccgccatgttctgcatcagcaacctgatctggaatgaggaggagggcagccaggagcggcaggacaagctgcgggacatgggcatcgtggacatcctgcacaagctgagccagagcccagacagcaacctgtgtgacaaggccaagatggccctgcagcagtacctggcctag

SEQ ID NO: 287250 - DNA, 1992 bp, Artificial Sequence
  derived and/or modified sequence
atgagcgtgctgagcgaggtgaccgccagcagccggcactacgtggatagactgttcgatcccgacccacagaaggtcttgcagggcgtgattgacatgaagaatgccgtgatcgggaataataagcaaaaggcaaatctcatagtgcttggggccgtgccgcggttgctgtatcttcttcagcaggagacttctagcaccgaactgaaaaccgagtgcgccgtagttcttgggtctctggccatgggcactgaaaacaacgtgaagtccctgctcgattgccacataatcccagccctgttacagggcctgctcagcccagatcttaagtttatcgaagcgtgtctgcggtgcctaaggacaattttcacctctccagtaactcctgaagagcttttatataccgacgccaccgttatcccacacctaatggccttgctgtctcgatcccggtatacacaggaatatatttgtcaaatcttcagccactgttgcaagggccctgaccatcagaccattttgtttaaccacggtgcagtgcagaatatcgctcacctcctgacgtctcttagctacaaagtgaggatgcaggccctcaagtgtttctctgtgctggcattcgaaaacccacaagtctccatgacactggtgaacgtcctggtggacggagagttattaccccagatcttcgtcaagatgctacagcgggataagccgattgagatgcagctcactagtgctaagtgcctcacttatatgtgtcgcgccggggctatccgaacagacgataattgcatagtgctgaagaccctgccgtgcctagtgagaatgtgttcaaaggagcggctgttggaggagcgggttgagggcgctgaaactttagcctaccttattgagccagacgtggaacttcagcggatcgccagcatcaccgaccatctcatagcaatgttggcggattatttcaagtaccccagttcggtctccgcaattacagacatcaaacgcctcgaccacgacttgaagcacgcccacgaattacggcaggccgcctttaaactatatgcaagccttggggccaatgatgaggacatcaggaaaaagattatcgagaccgagaatatgatggatcgaatcgtgacaggccttagtgagtcctctgtgaaagtgagattggcagccgttaggtgcctccattcactgtcgaggtccgttcagcagctgcgcacctcatttcaggaccacgctgtgtggaaacccctgatgaaggtgctccagaacgcccctgacgaaatcctagttgtcgcttcatctatgctgtgcaacctgctgttggaattttctccttctaaagagcctattcttgagagcggagcggtagagctactttgcggcctgacacagagtgaaaatcccgccttgagggttaacggaatctgggccttaatgaacatggccttccaggctgagcaaaagattaaggctgatatcttacgaagcctgtccactgagcaactgtttcgcctgctgagtgactctgacctcaacgtcttgatgaagacgctgggtctgctccggaatctccttagcacacggccccacattgacaaaatcatgtctactcatgggaagcagataatgcaagccgtgacacttatcctggaaggtgagcataacattgaagtgaaggagcagacactctgcatcctcgccaacattgccgacggcacgaccgccaaggacctgatcatgaccaatgacgacatcctgcagaagattaagtactatatgggtcacagccacgtaaagctgcagctcgcagccatgttctgcattagtaatcttatctggaatgaggaggagggcagccaggaaagacaggacaagctccgcgacatggggatcgtagatattctgcataaactgtctcagtcccccgactcaaacctctgcgacaaagctaaaatggctctgcaacagtaccttgcttag

SEQ ID NO: 287251 - DNA, 2022 bp, Artificial Sequence
  derived and/or modified sequence
atggcctgcctgctggagacccccatccggatgagcgtgctgagcgaagtgacagcttcaagtcgccattacgtagatcggctgttcgaccctgacccacagaaggtattacagggcgtaattgatatgaagaacgctgtaatagggaacaacaaacaaaaagcaaacctgatcgtgcttggagccgtgcctcggttgctttatctgttgcagcaggagacctcctcaactgagcttaagaccgagtgcgcggtcgtgctgggaagcctcgcaatggggacagagaacaacgtgaagagtctcttggactgtcacataatccccgcattgctacaagggctgcttagccccgatttaaaattcatcgaagcctgtctgcggtgtcttagaaccatctttaccagtccagtgacgcctgaggagcttctctatactgatgccactgttatccctcacctgatggccctgctgagccggagtcgttacactcaggagtacatctgccagattttcagtcattgctgtaagggccctgatcatcagaccattctctttaaccatggcgctgtgcagaatattgctcacctccttacttcattgagttacaaagtccgcatgcaggctcttaagtgtttcagcgtcctagcttttgaaaatcctcaggtgtcaatgaccttggtaaatgtgctggttgacggagaactgctgccccagatttttgtgaagatgctccagagggataaacccattgagatgcagctgacctcagcaaaatgtctgacctacatgtgtagagcgggtgccatcaggacagatgacaactgcatagtccttaagacgctgccctgtctggttcgcatgtgctccaaagaacggttgcttgaggaacgggtggagggcgctgaaacgctggcgtaccttatcgagcctgacgttgaacttcaacgaatcgcatcaatcaccgaccatctgatcgcaatgctggccgactacttcaagtatccctcttcagtctcagccattaccgatatcaaacggttagatcacgatctgaagcacgcacacgagttgcgacaggccgcttttaaactttacgcctctctcggcgctaatgacgaggacatacgcaaaaaaatcatcgaaacagaaaatatgatggataggattgttacggggttgtctgaaagttccgttaaggtacgtctcgctgcagtgcggtgtcttcattcccttagtaggagcgtgcagcagttgcgcacatcgtttcaggatcatgcggtgtggaaacctttgatgaaagtgttacagaatgcccctgacgagattcttgttgtggcctcctctatgctgtgtaatctgctcctcgaattctccccctcgaaagaacccattctggaatcaggcgccgtggagttactgtgcggattaacacagtccgagaatcctgcacttcgggtgaatggcatctgggccttgatgaacatggctttccaggctgaacaaaaaattaaggctgacattctccgctcactctcaacagagcaactttttagactactctcagacagcgacctgaacgtactgatgaagacgctcggcctgctcagaaatctactgtctactaggccgcacatcgacaaaattatgtcaacccatgggaagcagattatgcaagccgtcaccttgattctggaaggtgagcataatatcgaggtgaaagagcaaaccctgtgcatcctggccaacatcgcagacggcaccaccgcaaaagatctgatcatgacaaacgatgatattctgcaaaagattaagtactacatgggccacagtcacgtcaaactccagttggccgcaatgttctgcatttccaacctaatatggaacgaagaagaaggctctcaagagcgacaggacaaattgagagacatgggaattgtggatattctgcacaaactgagccagagtccagacagtaacctttgcgacaaggccaaaatggcattgcagcagtatcttgcatag

SEQ ID NO: 287252 - DNA, 1992 bp, Artificial Sequence
  derived and/or modified sequence
atgagtgttctgagtgaggtgaccgcgagctctagacattacgtggaccgattgttcgatcctgaccctcagaaggtcctgcagggcgtgatcgatatgaagaacgccgtgatcgggaataataagcagaaggccaatttgatcgttcttggcgctgtgccccgtctgctctatctcctgcaacaagagacttctagtaccgagctgaagacagagtgtgccgtggttctggggtccctggccatgggaaccgaaaacaacgttaagtccctgttggattgccatattatccctgctctgctgcaaggccttctaagtcccgacctgaaattcatcgaggcctgtctccgatgcctccgcacaatctttacctctccagtgacgcctgaagagctgctttacacagatgctactgtgatcccccatctgatggccctcctgtcccgctctagatacacccaggagtatatatgtcagatcttctcccattgctgtaaggggcctgaccaccagacaatccttttcaatcacggcgcagtgcagaacatcgcccacctgctgacgtcactgtcctacaaagtgcggatgcaagcccttaagtgcttttccgtgttggccttcgagaaccctcaggtttccatgacacttgtcaacgtgcttgtggacggagaacttttgccacaaatctttgtaaaaatgctgcagagagataaaccgattgaaatgcagttgacaagtgccaaatgtctaacctatatgtgtagagccggtgcgatccggactgacgacaattgcattgtgcttaagaccctcccctgccttgtgcgaatgtgctcaaaagagaggcttctggaggagagagtagagggggctgagacactggcctatctgatcgagcccgacgttgagctgcagcgaatcgcttccatcaccgaccacctaatagcaatgctcgcagactactttaaatatccttcaagcgtcagtgctatcaccgatattaagcggttggatcacgacctgaaacacgctcacgagcttcggcaagcggctttcaaactatatgctagccttggagctaacgatgaggatatcagaaaaaagattatcgaaactgagaacatgatggacagaattgtaactggactgtccgagtcaagtgtgaaagtccggcttgcagctgtgcgctgtctacatagcctgtcccgatccgtgcagcagctacggacctcatttcaggaccacgctgtgtggaaaccactcatgaaggtattgcaaaacgcaccggatgagattctagtggtggcttcttcaatgctctgtaatctgctgctggagttcagtccgtctaaagaaccgatccttgaatctggcgctgttgaactgctttgcggtctgacccaaagcgagaaccctgctctgagggtgaacggtatctgggctttgatgaatatggcgttccaggccgagcagaaaataaaggcggatatactccggagcttgtccactgaacagttgttccgactgttgagcgattcagacctcaatgtgttgatgaagacccttgggctccttcgaaaccttctttccacaaggccacacattgataaaatcatgtcgacccatggcaaacagattatgcaggcggttacgcttatactggaaggagaacacaacatcgaggtgaaggagcaaacgctgtgcatcctcgcaaacattgcggacggcaccaccgccaaggacctgattatgacgaatgacgatattctacagaaaatcaagtattacatgggtcattcccacgtgaaactccagttagcagctatgttctgcatctccaatctgatttggaatgaagaggagggatcacaggagagacaagacaagcttcgggatatgggcatcgtagacatccttcacaaactatctcagtcgcccgacagtaacctgtgcgataaagctaagatggccctacagcaatacttggcttag

SEQ ID NO: 287253 - DNA, 2022 bp, Artificial Sequence
  derived and/or modified sequence
atggcctgtctattggaaacccctattaggatgagtgtgctatcagaagtgactgcttcatccaggcattacgtcgacaggctattcgaccctgacccgcagaaggtgctgcagggagtgatagatatgaagaatgctgttattgggaacaacaagcaaaaagccaatctgatagtcctgggcgctgttccacggctcttgtatctgctccagcaggagacttcttcaacagaacttaagaccgaatgtgccgtggtgttgggatccttagccatgggaaccgagaacaacgttaaatcactgctggattgtcacattatccctgcactgcttcagggcctgctatcgccagatcttaaatttatcgaagcttgcttgcggtgtctgcggacaatctttacttctccggtcacgcctgaagagctcctgtacacagatgctaccgtgatcccccatctgatggctctcctttcccgatccagatatacccaggagtatatttgccaaattttttctcactgctgtaagggccctgatcaccaaaccatcctcttcaaccatggagctgtccagaatatcgctcacttgctaacatctctctcttacaaggtgcgcatgcaggctcttaagtgtttttccgtcctagcattcgagaatccacaggtgagtatgactctagtaaacgtccttgtggatggcgagctactccctcagatttttgtaaagatgctgcagcgggacaaacccatagagatgcaactgacctcggccaaatgtttaacttacatgtgccgtgcgggtgctatccggactgacgacaattgcatcgtgctgaaaacccttccgtgcctcgtcagaatgtgtagtaaggagcggttgctggaggaacgcgtcgaaggcgctgaaacgctggcttatttgatcgaacctgatgtggagctccagcggattgccagtatcacggaccacttaatcgccatgctcgctgactattttaaatatccgagtagcgtgagtgccatcacagatatcaagcgcttggatcacgatctaaaacatgctcacgagttgagacaagcagcattcaagttgtatgccagcctgggtgccaacgacgaggacatacgcaaaaagatcattgagaccgagaacatgatggatagaattgtcaccggtctgagcgagagctcagttaaagttcggttagccgcagtccgctgcttgcacagcttgtccagaagcgtgcagcagctaaggaccagctttcaggatcacgcagtctggaagccactcatgaaggtcctccagaacgccccagatgagattttagtggtggccagcagtatgctctgtaacctcttgctggaattctctccttcaaaagagccaatcctagagtctggcgcagtggaactcctgtgcgggctgacccagtctgagaaccccgcattgcgcgtcaatggcatttgggctttaatgaatatggcctttcaggccgaacagaaaatcaaggcagacatcctgaggagcttgtcaaccgagcagttatttcgattgctgagcgactctgatctgaacgtactcatgaaaaccctgggactcctgcgcaacctgttgtcgaccagaccccacattgacaagataatgtcaactcacgggaagcagataatgcaggctgttaccttgatccttgagggggagcacaatatcgaggtgaaagagcagactctgtgcattctggccaacatcgccgatggcaccacagcaaaggacctgataatgacaaacgatgacattctccaaaagattaagtactatatggggcacagccacgtaaagctgcagcttgctgcaatgttctgcatttctaacctgatatggaatgaggaggaaggatcccaagaaagacaagataaacttcgggatatgggaattgtcgacatactgcataaactctcacagtctcctgattctaacctgtgtgataaggcgaaaatggccttacagcaatatctcgcctag

SEQ ID NO: 287254 - DNA, 2558 bp, Artificial Sequence
  derived and/or modified sequence
gctcaagatggcgtgcttgttggagaccccaatccgcatgagcgtcctttcggaagtaacagctagcagtcgccactatgttgacaggctatttgaccctgatccccagaaagttctacaaggtgtcatagacatgaaaaatgctgtaattggaaacaacaagcagaaagccaatctcattgttttaggagctgttccaagattgttgtacttgcttcagcaagaaacctcaagcacagagctgaaaactgaatgtgcagtggtgttgggaagtcttgctatgggtactgaaaacaatgtcaagtctctactggactgccatattatccctgccttattgcaaggactactgtccccagacctgaagtttattgaagcttgcctccgatgcctgcgtaccatcttcaccagtcctgtcactccagaggagctactgtatacagatgccacagtgataccacacctcatggcactgcttagcaggtcccgctatacccaggagtacatctgtcagatcttctcacactgctgtaaagggccagatcatcaaacaattttatttaaccacggtgcagttcagaatattgctcacctactaacctcactgtcctacaaagttcgaatgcaagcactgaaatgtttctcagttttagcttttgaaaacccccaggtatcgatgaccctggtaaatgttttggttgatggagaattgttaccacagatttttgtgaagatgttacagagggataagcctattgagatgcagctcacatcagcaaaatgtttaacttacatgtgtagagctggagcaattcggacagatgataactgtattgtattaaagacattaccttgtttggttcgaatgtgcagtaaggagagattactagaggagagagttgaaggagctgagacacttgcctatctgattgaaccagatgttgagctacagagaatcgctagcataactgatcacctcattgccatgcttgctgattatttcaagtatcccagctcagtgagtgccatcactgatattaaaaggcttgatcatgatttaaaacatgctcacgaactccgccaggctgcattcaagctctatgcctctcttggagcaaatgatgaagacatccggaagaagatcattgagactgaaaatatgatggaccgaattgtgactggcttgtctgagtctagtgtcaaggtgcggttagctgccgtcagatgtttgcacagtttatccagatctgtgcagcagcttcgaaccagtttccaggatcatgctgtttggaaacctttaatgaaggttttacaaaatgcaccagatgaaatcctagtggtagcatcttccatgctgtgtaatcttcttcttgaattttctccaagcaaagagccaattttggaatcaggagccgtagagctactttgtggattaactcagagtgaaaatcctgctttacgagtgaatggaatttgggctttaatgaatatggcatttcaggctgaacaaaaaataaaagcagatattttacgaagcttgagtactgaacagctattccggttattatcagattcagatttgaatgtgctgatgaagacattgggacttcttagaaatctcctctccactcgtcctcatatagataaaataatgagtactcatggaaagcaaattatgcaagccgtcactcttattctagaaggggaacataacattgaggtcaaagagcagacactgtgcatcttagccaacatagcggatgggacaacagcaaaagatcttattatgaccaatgatgatatcctacagaaaatcaagtattacatgggccattcacatgttaaactgcagcttgcagccatgttttgtatatcaaacctcatatggaatgaagaggaaggttcacaagaacgccaggataaattacgagacatgggcatcgtagatattctacacaaactgagtcagtcaccagattcaaacctttgtgacaaggcaaagatggcactgcagcagtacctggcatgatgggagtgcccctgggcacctgcgagcatcccacctccttgtttaaggaagtacaggaaccagcctcatttgattccttctatttgcacaagtcaccttggactgcagggagctgttttgcaaaagcagtttagtaggcttagatctcaaattcatcttgagaacatttttttgaggtagtaatttcctcagaagactcttgtgttttgttttggtttttttttctgagctactcggactctttattagaacaatcaatcattttcctttggacctacaatttttgcctatgctgcagccactttgtgagtgagaatgaatatgtctgtgtgaacacacaggcatgcgtgtgtatgtgcacgtacatgggccagaatgaatggatgtgtgtgtgtgagggatacctcagatttttcttttcttattttgtgtgaaaatctcttttctacagattttccagggtttaagcattgcttgctgtataaaaaactttactgaattatatacagtttgaatgaaatgttatttt

SEQ ID NO: 287255 - DNA, 4790 bp, Artificial Sequence
  derived and/or modified sequence
tgcggaaaccgctgcccgcttccacctctaacccaggctcagagtagctgctgtttctgagagaacgattcgtaggacagcccctgacgccattcccttttgcccttctttctgcgggcctttccggtacttgagcggtgtccagagcgtggccagttctcgtctatctggctgcctttagggagcggtgcctagcgttggccaatagttggctgtcgaaagtgccggcccccgcgccggcgcctgcagcagccgggtgggaaggctcaagatggcgtgcttgttggagaccccaatccgcatgagcgtcctttcggaagtaacagctagcagtcgccactatgttgacaggctatttgaccctgatccccagaaagttctacaaggtgtcatagacatgaaaaatgctgtaattggaaacaacaagcagaaagccaatctcattgttttaggagctgttccaagattgttgtacttgcttcagcaagaaacctcaagcacagagctgaaaactgaatgtgcagtggtgttgggaagtcttgctatgggtactgaaaacaatgtcaagtctctactggactgccatattatccctgccttattgcaaggactactgtccccagacctgaagtttattgaagcttgcctccgatgcctgcgtaccatcttcaccagtcctgtcactccagaggagctactgtatacagatgccacagtgataccacacctcatggcactgcttagcaggtcccgctatacccaggagtacatctgtcagatcttctcacactgctgtaaagggccagatcatcaaacaattttatttaaccacggtgcagttcagaatattgctcacctactaacctcactgtcctacaaagttcgaatgcaagcactgaaatgtttctcagttttagcttttgaaaacccccaggtatcgatgaccctggtaaatgttttggttgatggagaattgttaccacagatttttgtgaagatgttacagagggataagcctattgagatgcagctcacatcagcaaaatgtttaacttacatgtgtagagctggagcaattcggacagatgataactgtattgtattaaagacattaccttgtttggttcgaatgtgcagtaaggagagattactagaggagagagttgaaggagctgagacacttgcctatctgattgaaccagatgttgagctacagagaatcgctagcataactgatcacctcattgccatgcttgctgattatttcaagtatcccagctcagtgagtgccatcactgatattaaaaggcttgatcatgatttaaaacatgctcacgaactccgccaggctgcattcaagctctatgcctctcttggagcaaatgatgaagacatccggaagaagatcattgagactgaaaatatgatggaccgaattgtgactggcttgtctgagtctagtgtcaaggtgcggttagctgccgtcagatgtttgcacagtttatccagatctgtgcagcagcttcgaaccagtttccaggatcatgctgtttggaaacctttaatgaaggttttacaaaatgcaccagatgaaatcctagtggtagcatcttccatgctgtgtaatcttcttcttgaattttctccaagcaaagagccaattttggaatcaggagccgtagagctactttgtggattaactcagagtgaaaatcctgctttacgagtgaatggaatttgggctttaatgaatatggcatttcaggctgaacaaaaaataaaagcagatattttacgaagcttgagtactgaacagctattccggttattatcagattcagatttgaatgtgctgatgaagacattgggacttcttagaaatctcctctccactcgtcctcatatagataaaataatgagtactcatggaaagcaaattatgcaagccgtcactcttattctagaaggggaacataacattgaggtcaaagagcagacactgtgcatcttagccaacatagcggatgggacaacagcaaaagatcttattatgaccaatgatgatatcctacagaaaatcaagtattacatgggccattcacatgttaaactgcagcttgcagccatgttttgtatatcaaacctcatatggaatgaagaggaaggttcacaagaacgccaggataaattacgagacatgggcatcgtagatattctacacaaactgagtcagtcaccagattcaaacctttgtgacaaggcaaagatggcactgcagcagtacctggcatgatgggagtgcccctgggcacctgcgagcatcccacctccttgtttaaggaagtacaggaaccagcctcatttgattccttctatttgcacaagtcaccttggactgcagggagctgttttgcaaaagcagtttagtaggcttagatctcaaattcatcttgagaacatttttttgaggtagtaatttcctcagaagactcttgtgttttgttttggtttttttttctgagctactcggactctttattagaacaatcaatcattttcctttggacctacaatttttgcctatgctgcagccactttgtgagtgagaatgaatatgtctgtgtgaacacacaggcatgcgtgtgtatgtgcacgtacatgggccagaatgaatggatgtgtgtgtgtgagggatacctcagatttttcttttcttattttgtgtgaaaatctcttttctacagattttccagggtttaagcattgcttgctgtataaaaaactttactgaattatatacagtttgaatgaaatgttattttaaaaacaaaacaattgttaagtgttccataaaggttatgttgaattttggtcagatgaatatttgtaagtaaaaaatatatgcatttctgaacctcaacttacatagattttctttatataaaaaaaaagaaaaaaaaagaaaaagttggctatagttggcctgattaacaggcactatacatggtgctgtgcaaaatagtaagctagcatcttactgccgtcaatattagcaggtacagagccttttttcatcctaattcagtaagttctcaggcttccaagtcaaatggagaagtaaagtgaggcaacagattcaccataggctttttgaagcatcaaagggaaatataactactgatagtgaaagcccagccatgacccagatgggcttacccttgacaggaactggggaccaagagcctcccaattgccctaactcctgtcattggtattagcaatatctggccagatttagaaccagtcatggaaacttgtgctcaaactaaaagtaggtcatcacttcccagaaacagaataccttgtgcttcctgaaacagcatatatcactgtgaaactaaagaatattctacagacacccctgtagaaagaaacaaagaacaggatagtttagaaagctttctgttagctgtattcagcaaatttcatactagttgctcaggactgctagttggtatgcttttgtaaaacgagattgaaatttaataaaagatgcaactaaaatctttcctgcatgaagctaaaagcactcaagttgagagaggggcaagggaatctccccaggatgactgaagatgacttctttttacagcaagtactgttagcctttctgcaccccttagcttggcccctgctccaacttctgggtcagcagcaaggtgaactcaacagaagttgctcttgactgtttgaaggtagaagcagcctaccttttctctttgctaaaagaaggtcaaaggcttcgcaaccaggatgcaaggtctgcggtccagaagcttgcggtgagtgtgtgccactgatggagctccaagcccacccaccagccactcctgatggggttgctcacactgcagctgccctatcaccaccctgcacgttccttggaagatttaaatgtttggttgcaaatgaatgttttaaaaatgtatttaatgcaatttttcctgctctcaacatgaccacccaagattcaaacacagagacttccaagttactattttttcagaacatcaccgattttaaaatctgtcacaacaggacttggttttgtgcagatatcagagtgctaatgtgagaaacccagttaaaagaaaacttagtttattgggaagaaagcctcaggcccactcgtttctagaactgtgaaaatatccttggttggcatttttaacacaaaacactatagtgttggtattaaatagtactaggtaaatataaagaaaccaataatgaattgctgagacaatcttgaacccaaatagcattagaaagctgaaggcccaatgaaataacactttcacacttaaactctgtggataaattttgcctgtgggtataaacagatggtcaaattaaaaatgctttactataattaacttttctgatttgaatgaagggaaatgtatttattgaaacaaagctgtttgctgctttatgcaggtgcagtgttcagtcagcaaggaagtgggaagagtggacatggtattgtgtctacacccaagttcttaactaagcttctcgctctaatactgcattctgtttctccttttgtgccctgattgtaatccaaaatttatgaactagaaaagaatgtccaatttaataagttgcatttttttttctttaagcactttattcagaacaatacatgttcttctggtagtgtttggataatatgattttaacacatgctaataaaagccaagaaaaatcatggcaacttctaaaaa

SEQ ID NO: 287256 - protein, 631 aa, Artificial Sequence
  derived and/or modified sequence
MKNAVIGNNKQKANLIVLGAVPRLLYLLQQETSSTELKTECAVVLGSLAMGTENNVKSLLDCHIIPALLQGLLSPDLKFIEACLRCLRTIFTSPVTPEELLYTDATVIPHLMALLSRSRYTQEYICQIFSHCCKGPDHQTILFNHGAVQNIAHLLTSLSYKVRMQALKCFSVLAFENPQVSMTLVNVLVDGELLPQIFVKMLQRDKPIEMQLTSAKCLTYMCRAGAIRTDDNCIVLKTLPCLVRMCSKERLLEERVEGAETLAYLIEPDVELQRIASITDHLIAMLADYFKYPSSVSAITDIKRLDHDLKHAHELRQAAFKLYASLGANDEDIRKKIIETENMMDRIVTGLSESSVKVRLAAVRCLHSLSRSVQQLRTSFQDHAVWKPLMKVLQNAPDEILVVASSMLCNLLLEFSPSKEPILESGAVELLCGLTQSENPALRVNGIWALMNMAFQAEQKIKADILRSLSTEQLFRLLSDSDLNVLMKTLGLLRNLLSTRPHIDKIMSTHGKQIMQAVTLILEGEHNIEVKEQTLCILANIADGTTAKDLIMTNDDILQKIKYYMGHSHVKLQLAAMFCISNLIWNEEEGSQERQDKLRDMGIVDILHKLSQSPDSNLCDKAKMALQQYLA

SEQ ID NO: 287257 - protein, 530 aa, Artificial Sequence
  derived and/or modified sequence
YQDATVIPHLMALLSRSRYTQEYICQIFSHCCKGPDHQTILFNHGAVQNIAHLLTSLSYKVRMQALKCFSVLAFENPQVSMTLVNVLVDGELLPQIFVKMLQRDKPIEMQLTSAKCLTYMCRAGAIRTDDNCIVLKTLPCLVRMCSKERLLEERVEGAETLAYLIEPDVELQRIASITDHLIAMLADYFKYPSSVSAITDIKRLDHDLKHAHELRQAAFKLYASLGANDEDIRKKIIETENMMDRIVTGLSESSVKVRLAAVRCLHSLSRSVQQLRTSFQDHAVWKPLMKVLQNAPDEILVVASSMLCNLLLEFSPSKEPILESGAVELLCGLTQSENPALRVNGIWALMNMAFQAEQKIKADILRSLSTEQLFRLLSDSDLNVLMKTLGLLRNLLSTRPHIDKIMSTHGKQIMQAVTLILEGEHNIEVKEQTLCILANIADGTTAKDLIMTNDDILQKIKYYMGHSHVKLQLAAMFCISNLIWNEEEGSQERQDKLRDMGIVDILHKLSQSPDSNLCDKAKMALQQYLA

SEQ ID NO: 287258 - DNA, 4923 bp, Artificial Sequence
  derived and/or modified sequence
atgctctcaaggctcagcgggcttgccaatgtggtgctacatgagctgagcggggacgatgacacagaccagaatatgcgagctcctttggaccctgaactacatcaggaatctgatatggagtttaataatactacccaagaggacgttcaagagaggctggcttatgctgagcagttagtggtcgagctcaaagacattattcggcagaaagatgtccagctccagcagaaggatgaggcactgcaggaagagcggaaagcagcggataataaaatcaaaaaattaaaactccacgcaaaagccaaactgacctccttgaacaaatacatcgaagaaatgaaggcacagggcgggaccgtactgccaacagaaccacagtccgaagaacagctgtcaaagcacgataagtccagcactgaggaagaaatggagattgaaaaaataaaacacaagttacaagaaaaggaagaattaattagcacactgcaggctcagctgacacaggctcaggccgagcagcccgctcaatcttctactgagatggaggaattcgttatgatgaagcagcagctacaggagaaggaagagttcatctctacactgcaggcacagcttagtcagacccaagcagaacaggccgctcagaaactgagagtgctgcagagaaagttggaggaacatgaagaaagtctcgtaggcagggcacaggtggtcgatctcctgcagcaggagctgactgcggccgagcaaaggaaccagattctgtcccaacaactccagcaaatggaggcagaacataacactctgaggaacaccgtggagactgaacgcgaggaaagtaagatactgctggaaaaaatggagctcgaggtggccgaaagaaaattgagctttcataacctacaggaggaaatgcaccacctgttggaacaattcgagcaagctggccaagcccaggcagagctggagtcccggtatagtgcacttgagcagaaacacaaggccgagatggaagagaagacctcacatatcctgtccctgcagaaaactggacaggaactgcaaagcgcttgtgacgccctgaaagaccagaattcaaagctgctgcaagacaagaacgagcaggccgtgcagagcgcacaaactatacagcagcttgaagaccagctgcaacagaagtctaaggaaatttcacaattcctgaataggctgcccctccaacagcacgagaccgcttctcaaacatccttcccagatgtgtataatgagggcactcaggctgttactgaggaaaacatcgcaagcctgcaaaaacgcgtagtggagctggaaaatgaaaagggtgccttgttgctcagcagcatcgaacttgaagagctcaaagcagaaaatgagaagctctcctctcagattaccctgcttgaggcccagaaccggaccggggaagcggaccgagaggtgtccgaaatctccattgttgatatcgccaacaaaagatcttcgagcgctgaggagagtggccaagatgtactcgaaaacaccttcagtcaaaaacataaggaacttagcgttttgctcctggaaatgaaggaagcacaggaggagatcgcttttttgaagctgcaactacagggaaagagagccgaagaggctgatcacgaagtgctggaccagaaggagatgaagcagatggagggcgagggaatcgctccaattaaaatgaaggtcttcctggaggacaccggccaggactttcccctgatgccaaacgaggaatcgtcactgcctgcagtggagaaggaacaagcctcaactgaacatcaaagtcgcacaagtgaggagatttccctgaatgatgccggtgtggaactgaaatccactaaacaagatggcgacaagtctcttagcgcagtgcctgacatcggacagtgccaccaggacgagctagaaagactcaagtctcagattctggagttggagctgaattttcacaaggcacaggagatatacgagaagaacctagacgagaaggccaaagagatctccaacctaaatcagctcattgaggaatttaaaaagaacgctgataataactccagcgcctttactgccctgtcagaagagagggaccagctgctctcacaggtgaaggagctgagcatggtaactgagctgagggcccaggtcaagcagttggagatgaatcttgcagaggctgaacgtcaaagaaggctggattacgaatctcagacagcccatgataatttgctgactgagcagatccacagtctctctatcgaagctaaatccaaagacgttaaaatcgaagtgctccagaatgagcttgatgacgtccagctgcagttttcggagcagtctaccctgatacggtctcttcagagccaactccagaacaaagaatcagaggtgctggagggtgcggagagagttcgacacatcagtagcaaggtcgaggagctgagccaggccttgtcgcagaaggaactggaaatcacgaagatggatcagctactcctcgagaaaaaaagagacgtggagacgttgcagcagactattgaggagaaggaccagcaagtcacagaaatatcgttctctatgacagagaagatggtacagctgaacgaggaaaaattttccctgggcgtcgagatcaaaactctgaaagaacagctgaatctcctgtcacgggctgaagaggcaaagaaagagcaggttgaagaagataacgaagttagtagcgggctcaaacagaactacgacgagatgtccccagccggacagatcagtaaagaggagctgcaacatgaatttgacctgctaaaaaaagagaacgagcaacggaaacgcaagcttcaggccgccctgattaaccgaaaggagctgctgcagcgcgtcagtaggctggaggaggagctcgcaaaccttaaggacgaatcaaaaaaggagattcccttaagcgagactgagcgaggagaagtcgaagaagacaaggagaataaggaatattctgagaagtgtgtaacctcaaagtgccaggaaattgagatctacctgaagcagaccatctccgaaaaagaagtagaacttcagcacatacgaaaagacctggaggagaaactcgctgccgaggaacaatttcaggcactagtcaagcagatgaaccagacattgcaggacaaaacaaatcagatagatctgcttcaggctgaaatcagcgagaaccaggctatcattcaaaaattgatcactagcaatactgatgcatctgatggagattccgtggcacttgtgaaagagacggtagtgatttccccgccttgtactgggtcttctgaacactggaagcccgaacttgaagagaagatactcgccctcgaaaaagagaaggagcaattgcagaagaaactccaagaggccttgactagccgaaaagccatccttaaaaaagcccaggagaaggaacgtcatttaagagaagagttgaaacagcaaaaagatgactacaacagactgcaggagcagtttgacgagcagagcaaagagaacgagaatatcggagaccagctgaggcagcttcagattcaagtgcgtgagtcgatcgatggtaaactgccctccacagaccagcaggaatcctgttctagcactccagggctcgaggagccgttgtttaaagcgaccgaacagcaccatacacagccagtgctggagtccaatttatgtcccgactggccttctcattcagaagacgcctcagctctgcaaggcggcacatctgtggcacagattaaggcccagttaaaagagatagaagcggagaaggtggaactcgagcttaaggtgtcctctactaccagcgagttaactaaaaaatcggaggaggtttttcaactccaggaacagataaataagcagggcctggagatcgaaagtctgaaaacggtgtcccatgaggccgaggtccacgcagagtctctgcagcaaaagttagaatcatcacagctgcagatcgcggggctcgaacaccttagagaactgcagcccaagctggacgaattgcagaaactaatttctaagaaagaggaggatgtctcatacctctctggccagttgtcagagaaggaagcagcactcaccaagattcagaccgagattatagagcaggaagacctgatcaaggctctgcatacacagctggagatgcaagcaaaagagcacgacgagagaatcaagcaactgcaggtcgaactgtgcgagatgaaacagaaacccgaggaaattggagaggaaagtagggcgaaacaacagattcagagaaagctccaagccgcactgatctcgaggaaagaggcacttaaggagaataagagtctacaagaagaactgtctctcgctcggggcacgattgaaagactgacgaagtctttggccgacgtcgaaagtcaagtgagtgcccagaacaaggaaaaagatactgtgcttgggagattggcactgcttcaggaagaaagggacaagctgatcacagagatggatcggagccttctcgagaaccagtctttatcatcttcatgtgagtcactgaaacttgcactggaaggcctgacagaggacaaagaaaagctggtgaaggagattgaaagtctcaagtcctctaaaattgccgaatctactgaatggcaggagaagcataaagaactccaaaaggaatatgagattctcctgcagtcttacgagaacgtctcaaatgaggccgaacgtattcagcacgtagttgaggccgtgaggcaggaaaagcaggaactctacgggaaactgaggagcactgaggccaataaaaaggaaacagagaaacagttacaggaggccgaacaggagatggaagagatgaaggaatag

SEQ ID NO: 287259 - DNA, 4959 bp, Artificial Sequence
  derived and/or modified sequence
ggggcagctggagcctcaggcggcagcgcttctagaaatgctgagccgattatcaggattagcaaatgttgttttgcatgaattatcaggagatgatgacactgatcagaatatgagggctcccctagaccctgaattacaccaagaatctgacatggaatttaataatactacacaagaagatgttcaggagcgcctggcttatgcagagcaattggtggtggagctaaaagatattattagacagaaggatgttcaactgcagcagaaagatgaagctctacaggaagagagaaaagctgctgataacaaaattaaaaaactaaaacttcatgcgaaggccaaattaacttctttgaataaatacatagaagaaatgaaagcacaaggagggactgttctgcctacagaacctcagtcagaggagcaactttccaagcatgacaagagttctacagaggaagagatggaaatagaaaagataaaacataagctccaggagaaggaggaactaatcagcactttgcaagcccagcttactcaggcacaggcagaacaacctgcacagagttctacagagatggaagaatttgtaatgatgaagcaacagctccaggagaaggaagaattcattagcactttacaagcccagctcagccagacacaggcagagcaagctgcacagaaattgagggtgctgcaaaggaagcttgaggaacacgaagaatccttggtgggccgtgctcaggtcgttgacttgctgcaacaggagctgactgctgctgagcagagaaaccagattctctctcagcagttacagcagatggaagctgagcataatactttgaggaacactgtggaaacagaaagagaggagtccaagattctactggaaaagatggaacttgaagtggcagagagaaaattatccttccataatctgcaggaagaaatgcatcatcttttagaacagtttgagcaagcaggccaagcccaggctgaactagagtctcggtatagtgctttggagcagaagcacaaagcagaaatggaagagaagacctctcatattttgagtcttcaaaagactggacaagagctgcagtctgcctgtgatgctctaaaggatcaaaattcaaagcttctccaagataagaatgagcaagcagttcagtcagcccagaccattcagcaactggaagatcagctccagcaaaaatccaaagaaattagccaatttctaaatagactgcccttgcaacaacatgaaacagcatctcagacttctttcccagatgtttataatgagggcacacaggcagtcactgaggagaatattgcttctttgcagaagagagtggtagaactagagaatgaaaagggagccttgctccttagttctatagagctggaggagctgaaagctgagaatgaaaaactgtcttctcagattactctcctagaggctcagaatagaactggggaggcagacagagaagtcagtgagatcagcattgttgatattgccaacaagaggagctcttctgctgaggaaagtggacaagatgttctagaaaacacattttctcagaaacataaagaattatcagttttattgttggaaatgaaagaagctcaagaggaaattgcatttcttaaattacagctccagggaaaaagggctgaggaagcagatcatgaggtccttgaccagaaagaaatgaaacagatggagggtgagggaatagctccaattaaaatgaaagtatttcttgaagatacagggcaagattttcccttaatgccaaatgaagagagcagtcttccagcagttgaaaaagaacaggcgagcactgaacatcaaagtagaacatctgaggaaatatctttaaatgatgctggagtagaattgaaatcaacaaagcaggatggtgataaatccctttctgctgtaccagatattggtcagtgtcatcaggatgagttggaaaggttaaaaagtcaaattttggagctcgagctaaactttcataaagcacaagaaatctatgagaaaaatttagatgagaaagctaaggaaattagcaacctaaaccagttgattgaggagtttaagaaaaatgctgacaacaacagcagtgcattcactgctttgtctgaagaaagagaccagcttctctctcaggtgaaggaacttagcatggtaacagaattgagggctcaggtaaagcaactggaaatgaaccttgcagaagcagaaaggcaaagaagacttgattatgaaagccaaactgcccatgacaacctgctcactgaacagatccatagtctcagcatagaagccaaatctaaagatgtgaaaattgaagttttacagaatgaactggatgatgtgcagcttcagttttctgagcagagtaccctgataagaagcctgcaaagccagctgcaaaataaggaaagtgaagtgcttgagggggcagaacgtgtaaggcatatctcaagtaaagtggaagaactgtcccaggctctttcacagaaggaacttgaaataacaaaaatggatcagctcttactagagaaaaagagagatgtggaaaccctccaacaaaccatcgaggagaaggatcaacaagtgacagaaatcagctttagtatgactgagaaaatggttcagcttaatgaagagaagttttctcttggggttgaaattaagactcttaaagaacagctaaatttattatccagagctgaggaagcaaaaaaagagcaggtggaagaagataatgaagtttcttctggccttaaacaaaattatgatgagatgagcccagcaggacaaataagtaaggaagaacttcagcatgaatttgaccttctgaagaaagaaaatgagcagagaaagagaaagctccaggcagctcttattaacagaaaggagcttctgcaaagagtcagtagattggaagaagaattagccaacttgaaagatgaatctaagaaagaaatcccactcagtgagactgagaggggagaagtggaagaagataaagaaaacaaagaatactcagaaaaatgtgtgacttctaagtgccaagaaatagaaatttatttaaaacagacaatatctgagaaagaagtggaactacagcatataaggaaggatttggaagaaaagctggcagctgaagagcaattccaggctctggtcaaacagatgaatcagaccttgcaagataaaacaaaccaaatagatttgctccaagcagaaatcagtgaaaaccaagcaattatccagaagttaatcacaagtaacacggatgcaagtgatggggactccgtagcacttgtaaaggaaacagtggtgataagtccaccttgtacaggtagtagtgaacactggaaaccagaactagaagaaaagatactggcccttgaaaaagaaaaggagcaacttcaaaagaagctacaggaagccttaacctcccgcaaggcaattcttaaaaaggcacaggagaaagaaagacatctcagggaggagctaaagcaacagaaagatgactataatcgcttgcaagaacagtttgatgagcaaagcaaggaaaatgagaatattggagaccagctaaggcaactccagattcaagtaagggaatccatagacggaaaactcccaagcacagaccagcaggaatcgtgttcttccactccaggtttagaagaacctttattcaaagccacagaacagcatcacactcaacctgttttagagtccaacttgtgcccagactggccttctcattctgaagatgcgagtgctctgcagggcggaacttctgttgcccagattaaggcccagctgaaggaaatagaggctgagaaagtagagttagaattgaaagttagttctacaacaagtgagcttactaaaaaatcagaagaggtatttcagttacaagagcagataaataaacagggtttagaaatcgagagtctaaagacagtatcccatgaagctgaagtccatgccgaaagcctgcagcagaaattggaaagcagccaactacaaattgctggcctagaacatctaagagaattgcaacctaaactggatgaactgcaaaaactcataagcaaaaaggaagaagacgttagctacctttctggacaacttagtgagaaagaagcagctctcactaaaatacagacagagataatagaacaagaagatttaattaaggctctgcatacacagctagaaatgcaagccaaagagcatgatgagaggataaagcagctacaggtggaactttgtgaaatgaagcaaaaaccagaagagattggagaagaaagtagagcaaagcaacaaatacaaaggaaactgcaagctgcccttatttcccgaaaagaagcactaaaagaaaacaaaagtctccaagaggaattgtctttggccagaggtaccattgaacgtctcaccaagtctctggcagatgtggaaagccaagtttctgctcaaaataaagaaaaagatacggtcttaggaaggttagctcttcttcaagaagaaagagacaaactcattacagaaatggacaggtctttattggaaaatcagagtctcagcagctcctgtgaaagtctaaaactagctctagagggtcttactgaagacaaggaaaagttagtgaaggaaattgaatctttgaaatcttctaagattgcagaaagtactgagtggcaagagaaacacaaggagctacaaaaagagtatgaaattcttctgcagtcctatgagaatgttagtaatgaagcagaaaggattcagcatgtggtggaagctgtgaggcaagagaaacaagaactgtatggcaagttaagaagcacagaggcaaacaagaaggagacagaaaagcagttgcaggaagctgagcaagaaatggaggaaatgaaagaaaa

SEQ ID NO: 287260 - DNA, 4923 bp, Artificial Sequence
  derived and/or modified sequence
atgctgagccggctgagcggcctggccaacgtggtgctgcacgagctgtctggagatgatgacacagaccagaacatgagggcccccctggaccctgagctgcaccaggagagtgacatggagttcaacaacaccacccaggaggatgtgcaggagcggctggcctatgcagagcagctggtggtggagctgaaggacatcatccggcagaaggatgtgcagctgcagcagaaggatgaggccctgcaggaggagaggaaggctgctgacaacaagatcaagaagctgaagctgcacgccaaggccaagctgaccagcctgaacaagtacatcgaggagatgaaggcccagggcggcaccgtgctgcccacagagccccagagcgaggagcagctgagcaagcatgacaagagcagcacagaggaggagatggagattgagaagatcaagcacaagctgcaggagaaggaggagctgatcagcaccctgcaggcccagctgacccaggcccaggccgagcagcctgcccagagcagcacagagatggaggagtttgtgatgatgaagcagcagctgcaggagaaggaggagttcatcagcaccctgcaggcccagctgagccagacccaggccgagcaggccgcccagaagctgcgggtgctgcagaggaagctggaggagcacgaggagagcctggtgggccgggcccaggtggtggacctgctgcagcaggagctgacagctgctgagcagaggaaccagatcctgagccagcagctgcagcagatggaggccgagcacaacaccctgaggaacacagtggagacagagcgggaggagagcaagatcctgctggagaagatggagctggaggtggccgagaggaagctgtccttccacaacctgcaggaggagatgcaccacctgctggagcagtttgagcaggccggccaggcccaggccgagctggagagccgctacagcgccctggagcagaagcacaaggccgagatggaggagaagaccagccacatcctgagcctgcagaagacaggccaggagctgcagagcgcctgtgatgccctgaaggaccagaacagcaagctgctgcaggacaagaatgagcaggccgtgcagagcgcccagaccatccagcagctggaggaccagctgcagcagaagagcaaggagatcagccagttcctgaaccggctgcccctgcagcagcacgagacagccagccagaccagcttcccagatgtgtacaatgaaggcacccaggccgtgacagaggagaacatcgccagcctgcagaagagggtggtggagctggagaatgagaagggggccctgctgctgagcagcattgagctggaggagctgaaggccgagaatgagaagctgagcagccagatcaccctgctggaggcccagaacagaactggagaggccgaccgggaggtgtctgagatcagcatcgtggacatcgccaacaagaggagcagcagcgctgaggagagcggccaggatgtgctggagaacaccttcagccagaagcacaaggagctgtctgtgctgctgctggagatgaaggaggcccaggaggagatcgccttcctgaagctgcagctgcagggcaagagagctgaggaggccgaccacgaggtgctggaccagaaggagatgaagcagatggagggggagggcatcgcccccatcaagatgaaggtgttcctggaggacaccggccaggacttccccctgatgcccaatgaggagagcagcctgcctgctgtggagaaggagcaggccagcacagagcaccagagcaggaccagcgaggagatcagcctgaatgatgctggggtggagctgaagagcaccaagcaggatggagacaagagcctgtctgctgtgcctgacatcggccagtgccaccaggatgagctggagcggctgaagagccagatcctggagctggagctgaacttccacaaggcccaggagatctatgagaagaacctggatgagaaggccaaggagatcagcaacctgaaccagctgattgaggagttcaagaagaatgctgacaacaacagcagcgccttcaccgccctgtctgaggagcgggaccagctgctgagccaggtgaaggagctgtccatggtgacagagctgcgggcccaggtgaagcagctggagatgaacctggccgaggccgagcggcagaggcggctggactatgagagccagacagcccatgacaacctgctgacagagcagatccacagcctgagcattgaggccaagagcaaggatgtgaagattgaggtgctgcagaatgagctggatgatgtgcagctgcagttcagcgagcagagcaccctcatccgcagcctgcagagccagctgcagaacaaggagagcgaggtgctggagggcgctgagcgggtgcgccacatcagcagcaaggtggaggagctgagccaggccctgagccagaaggagctggagatcaccaagatggaccagctgctgctggagaagaagagagatgtggagaccctgcagcagaccatcgaggagaaggaccagcaggtgacagagatctccttctccatgacagagaagatggtgcagctgaatgaggagaagttcagcctgggcgtggagatcaagaccctgaaggagcagctgaacctgctgagcagagctgaggaggccaagaaggagcaggtggaggaggacaatgaggtgagcagcggcctgaagcagaactatgatgagatgagccctgctggccagatcagcaaggaggagctgcagcatgaatttgacctgctgaagaaggaaaatgagcagaggaagaggaagctgcaggccgccctgatcaacaggaaggagctgctgcagagggtgtcccggctggaggaggagctggccaacctgaaggatgagagcaagaaggagatccccctgtctgaaacagagcggggggaggtggaggaggacaaggagaacaaggagtacagcgagaagtgtgtgaccagcaagtgccaggagattgagatctacctgaagcagaccatcagcgagaaggaggtggagctgcagcacatcaggaaggacctggaggagaagctggccgctgaggagcagttccaggccctggtgaagcagatgaaccagaccctgcaggacaagaccaaccagattgacctgctgcaggccgagatcagcgagaaccaggccatcatccagaagctgatcaccagcaacacagatgccagtgatggagacagcgtggccctggtgaaggagaccgtggtgatcagccccccctgcaccggcagcagcgagcactggaagccagagctggaggagaagatcctggccctggagaaggagaaggagcagctgcagaagaagctgcaggaggccctgaccagcaggaaggccatcctgaagaaggcccaggagaaggagcggcacctgcgggaggagctgaagcagcagaaggatgactacaaccggctgcaggagcagtttgatgagcagagcaaagaaaatgaaaatattggagaccagctgcggcagctgcagatccaggtgcgggagagcattgatggcaagctgcccagcacagaccagcaggagagctgcagcagcaccccaggcctggaggagcccctcttcaaggccacagagcagcaccacacccagcctgtgctggagagcaacctgtgcccagactggcccagccacagtgaagatgccagcgccctgcagggcggcacctctgtggcccagatcaaggcccagctgaaggagattgaggccgagaaggtggagctggagctgaaggtgagcagcaccaccagcgagctgaccaagaagtctgaggaggtgttccagctgcaggagcagatcaacaagcagggcctggagattgagagcctgaagacagtgtcccatgaagctgaggtgcatgctgagagcctgcagcagaagctggagagcagccagctgcagattgctggcctggagcacctgcgggagctgcagcccaagctggatgagctgcagaagctgatcagcaagaaggaggaggatgtgtcctacctgagcggccagctgtctgagaaggaggccgccctgaccaagatccagacagagatcatcgagcaggaggacctgatcaaggccctgcacacccagctggagatgcaggccaaggagcatgatgagcgcatcaagcagctgcaggtggagctgtgtgagatgaagcagaagccagaggagattggagaggagagccgggccaagcagcagatccagaggaagctgcaggccgccctgatcagcaggaaggaggccctgaaggagaacaagagcctgcaggaggagctgagcctggcccggggcaccatcgagcggctgaccaagagcctggctgatgtggagagccaggtgtctgcccagaacaaggagaaggacacagtgctgggccgcctggccctgctgcaggaggagcgggacaagctgatcacagagatggacaggagcctgctggagaaccagagcctgagcagcagctgtgagagcctgaagctggccctggagggcctgacagaggacaaggagaagctggtgaaggagattgagagcctgaagagcagcaagattgctgagagcacagagtggcaggagaagcacaaggagctgcagaaggagtatgagatcctgctgcagagctatgaaaatgtgtccaatgaagctgagcgcatccagcacgtggtggaggccgtgcggcaggagaagcaggagctgtatggcaagctgcggagcacagaggccaacaagaaggagacagagaagcagctgcaggaggccgagcaggagatggaggagatgaaggagtag

SEQ ID NO: 287261 - DNA, 4923 bp, Artificial Sequence
  derived and/or modified sequence
atgctgagccggctgagcggcctggccaacgtggtgctgcacgagctctcgggagacgacgacacggaccagaatatgagagccccactggaccccgaactgcaccaggagtcagacatggaatttaataacacaacccaagaagacgtgcaggaacgattagcttacgctgagcagctggtcgtagaactcaaggatatcatacgtcagaaggatgtgcaactgcagcagaaagacgaagccctgcaagaggaacgcaaagcagctgacaacaaaattaaaaagctgaaattacacgcaaaagccaaacttacgtctctgaataagtacatagaggagatgaaggcacaaggtggaacagtgctgccaaccgagccacagtcggaagaacagctaagcaagcacgacaaatcctcgaccgaagaagaaatggagatagagaaaattaaacataagttgcaggagaaagaagagttgatcagcacattacaggctcagctgacccaggcccaggctgaacaaccagctcagtccagtactgaaatggaagaattcgtgatgatgaaacaacagctgcaagagaaagaagagtttatatccaccctgcaggctcaactgtctcagactcaggctgaacaggcagctcaaaaactgcgggtactgcagcgtaagctggaagagcacgaagagtccctagttgggagggcccaggtggtcgatctgctgcaacaagaacttaccgccgccgagcaaagaaaccagattctgtctcagcagctgcaacagatggaagccgaacataatacactaagaaacaccgtcgagactgagagggaagagtctaaaatcctcctggagaagatggaattggaggtggctgagcgtaaactgtcctttcataatttgcaagaggagatgcatcacctcctcgagcaattcgagcaggcgggacaggcacaggcagagcttgaaagcaggtactcagctctggagcaaaagcacaaagccgaaatggaagagaagaccagccatatcctgtctctgcagaagacgggccaggaactacagtccgcttgcgatgctctgaaagaccaaaattccaaactgctccaggacaagaacgaacaggccgtgcagtccgcccaaaccatccaacaattggaggaccagctgcagcagaaaagtaaagagatcagccagtttctgaaccgtctaccgctgcagcagcacgagacggcctcacagacatcattcccggatgtttacaacgaagggacacaggctgtaaccgaggagaacattgcatcattgcagaagagagtggttgaactggagaacgagaagggtgctttgctgctcagcagcattgagcttgaggagctgaaagcagaaaatgagaagctgtcatctcagatcacactcttggaggctcagaaccgcaccggcgaggctgatagagaggttagcgagatttccattgtggacatcgccaataagcgctcaagctctgccgaggagagcgggcaggacgtgctggaaaataccttttcacagaagcacaaggaattaagcgtgctgttgctcgaaatgaaggaggctcaggaagagatcgcatttctgaagcttcagctgcagggaaaacgggccgaagaggctgaccacgaagtcctcgatcaaaaggaaatgaagcagatggagggcgaagggatcgcaccaatcaagatgaaagtgtttcttgaggatacaggacaggacttcccactgatgcctaatgaggagagttcactacctgccgtggagaaggagcaggcatctactgaacatcagtctaggacctcggaggaaattagccttaatgacgctggcgtagagctgaagagtacaaagcaggatggggacaaaagtctttccgcggtcccagatatcggacagtgccatcaagacgaactcgagaggctgaaatctcaaatcctggaactggagctaaactttcacaaggctcaggaaatctacgagaaaaacttggacgagaaggccaaagagatctccaaccttaaccagctaattgaagaatttaaaaaaaatgccgataacaacagtagcgcattcaccgcactttctgaggagcgggatcaactactgagtcaagtcaaagagctgtctatggtgaccgagctgcgcgcccaagtcaagcagctcgagatgaacttagccgaagcagagcggcagagacggctagactacgagtcgcagaccgctcacgacaacctcctcacagaacagatccacagcttgagcatcgaggcaaagagcaaggacgtaaagatcgaggtgctccaaaatgagctggatgacgtacagctgcagttcagtgagcagtccacactcatcagaagtctgcagtcccaactccagaataaagaatctgaagttttagaaggcgccgaaagggtaaggcacatatcttctaaggtggaggagctgtcccaggccctcagccagaaagagctcgaaatcacgaagatggaccagcttctgctggaaaaaaagagagacgttgagacactccagcagactatcgaggaaaaagatcagcaggttacagagatcagtttttctatgactgagaaaatggtgcagctcaatgaggaaaagttcagcctgggagttgagattaagacccttaaggaacagttaaatctgctgtctcgtgctgaggaagccaaaaaggagcaggtggaagaagacaatgaggtgagttcaggcctgaagcagaactacgatgagatgtcccccgccgggcaaatttccaaagaggagctgcaacatgaatttgacttgcttaagaaggagaatgaacagcggaagaggaaattgcaagccgccttaatcaatcgaaaggaactccttcagcgagtgtcccggcttgaggaggaactcgcaaatttgaaggatgagagcaaaaaggagatcccgctgtccgagactgaacgaggtgaggtggaggaagacaaagagaacaaggagtactcggagaagtgcgtaaccagcaagtgccaggaaatcgagatttatttaaaacagaccatttccgagaaagaggtagagctgcagcatatacgcaaggacctggaggagaagctggccgcagaggagcagttccaggccttggtcaagcagatgaatcagacgttgcaggacaaaactaaccagattgatttgcttcaggctgaaatttctgagaatcaagctatcattcaaaagctcattacctctaataccgatgcttctgatggtgacagcgtcgcattagtcaaagaaactgtagtgatctcacccccctgcaccgggagctctgagcactggaagccggagctggaggaaaagatcctggctctcgagaaagagaaagaacagttgcagaagaagctgcaagaagccttgacttctcggaaggctatactgaagaaggcacaggagaaggagcgacatctgcgtgaagagctgaaacagcagaaggatgactacaaccggttacaggagcagttcgacgagcagagtaaagaaaatgaaaacataggggaccagctgcgtcagttacaaattcaggtcagagaaagtatcgatggaaagctcccgagtactgatcagcaggagtcatgcagttctaccccagggctggaagagcccttgtttaaagcgaccgagcagcatcacacgcagccagttctggagagcaatctgtgcccggattggccctcccattccgaggacgcctccgccctacagggcgggacgtccgtggcccaaattaaagcccaactgaaagagattgaggccgagaaagtggaactggaactgaaggtatccagcactactagcgaactcaccaagaagagtgaggaagtgttccagctgcaagaacagatcaacaagcaaggactggaaatcgaaagtctcaagaccgtctctcatgaggccgaggtgcacgctgaatctctgcagcagaaactagaatcaagtcagctgcagattgctggtttagagcatctgagagagctgcagcccaagctcgatgagctccagaaattgatcagcaaaaaggaagaagatgttagctatctgagtggccagcttagcgaaaaagaggcagctttaacgaagattcagaccgaaatcatcgaacaagaggatctcatcaaggccctccacacccagctggagatgcaagcaaaagagcatgatgaaagaatcaagcagttacaagtggaattgtgtgagatgaaacagaagcccgaagagatcggagaagagagtagggctaaacaacaaattcaacgaaaactgcaggcagctctgatatctaggaaggaggccctaaaggaaaataagtctctgcaggaagagctaagcctggctcgcggaaccattgaacgtctaacgaagtcacttgcggacgtggaaagccaggtgagcgcccagaacaaggagaaagacactgtgctaggaagattggcgttactgcaggaggagagggataaactcataaccgagatggaccggtctcttctcgaaaatcagagcctgagttctagttgcgagtcactgaaactagctttggaggggctaactgaagataaagagaaacttgtgaaggaaattgaatcactgaaatcctctaagatagccgagtcaacagaatggcaggagaaacacaaggagttgcaaaaggaatatgaaatccttctacagtcttatgagaacgttagtaatgaggccgagcggatccagcatgtggttgaggccgtaagacaggaaaaacaagagctttatggcaagcttagaagtaccgaggcaaacaagaaggagaccgaaaaacaactgcaagaagcggagcaggagatggaagaaatgaaggagtag

SEQ ID NO: 287262 - DNA, 4923 bp, Artificial Sequence
  derived and/or modified sequence
atgctttcgcgtctgtccggtttagctaatgtcgtgctgcacgaactgtccggcgacgacgacactgaccagaatatgcgggctccgctggatccggagctgcaccaagagtctgacatggaatttaacaataccactcaggaggatgtgcaggagcggcttgcttacgccgagcagctggtcgtagagctgaaggacattatcaggcaaaaagacgttcaactccagcaaaaagacgaagcactacaagaggaaagaaaagcggcagataacaagataaaaaaactgaaactccatgccaaagcaaaactgacctcactcaacaaatatatcgaagagatgaaagcgcagggcggaactgtccttccgactgagccacagtccgaggagcaactgagtaaacacgacaaatcctccaccgaggaggagatggaaatcgagaagataaaacacaagcttcaggaaaaagaagagcttatttccactctgcaggcacaactcactcaggcccaggccgagcagccggcacagtcatcaacagagatggaggagttcgtcatgatgaagcagcagctccaggagaaagaggaattcatcagtactttgcaagcacagctcagccagactcaggcagagcaagcagcccagaagctaagggtcctgcagcgtaaactggaggagcacgaggagagcctagtgggacgagcacaggttgttgatctgcttcagcaggaactgaccgctgctgaacagagaaatcagatcctgtcacagcagctccagcagatggaggcagaacacaacactctgagaaacaccgtggagaccgagcgagaggagtctaaaattctgctggaaaaaatggaattagaggtggccgaaaggaaattatcatttcataatctccaggaggagatgcatcatttgttggagcagtttgagcaggctgggcaggcacaggctgaactggagtcacgttatagcgccttagagcaaaaacataaggcagaaatggaggagaagacgtctcatatcctctctctgcagaaaaccggtcaagagttacagtccgcctgcgatgcattaaaggaccaaaactctaagctgctccaggataagaatgagcaagccgtccaaagtgcccaaactatccagcagctggaggaccagctgcaacagaagtcaaaggaaatatcgcaatttctgaaccgtctacctctacagcagcacgaaaccgcatcccagacgtccttccctgatgtctataacgaagggacacaggctgtgacagaggaaaatatagcttcgctgcagaagagggtcgtcgagctggaaaacgaaaaaggagctctgcttttgagcagtattgagcttgaggaactgaaagccgaaaatgagaaactcagcagccaaataacccttctcgaggcgcagaaccgcactggagaggcagacagggaggtctcagagatctctattgtggacatcgcaaacaaacgaagcagttctgccgaagagtcagggcaggatgtgttggagaatacatttagccagaaacacaaggaattgagcgtgctgttacttgaaatgaaggaagcccaggaagagatcgctttcttgaaacttcagctacagggcaaaagagccgaagaggcagatcacgaagtgttagaccaaaaagaaatgaaacagatggagggcgaaggaatcgctcccattaaaatgaaggtcttcctggaggataccgggcaagacttccccttgatgccaaatgaggagtctagcctcccagccgtggaaaaggagcaagctagcacagagcaccagtctagaacctcagaggagatttccctgaatgacgccggagtggagttgaagtcgacgaagcaggatggagataaatcactgtctgctgttcctgatatcggccaatgccatcaagacgaattagagcgcttgaagagtcagatcctcgagcttgagctgaatttccataaggctcaggaaatttacgagaagaacttggacgaaaaagccaaggaaatctccaaccttaatcagctcatcgaggaatttaagaagaacgccgataataacagctcagcctttactgcactcagtgaagaacgtgatcaactcctcagtcaggttaaggagttaagcatggtgacggaactaagggcccaggtaaagcagctcgagatgaacctggccgaggccgaacgacagaggagactggattacgaatctcagacagcccacgataacctgctcacagagcagatccattctctgagcatcgaggccaaatccaaggacgtcaagatcgaggtgctccagaatgaactagacgacgtgcagctgcagttcagtgagcagagcacactgatcagaagtttgcaatctcaactccagaacaaggaatctgaagttctggaaggcgcagagcgagtgcggcacatatctagtaaagtggaagaactttctcaggcgctgagtcagaaggagcttgaaatcacaaagatggaccagctgctgctggaaaagaaacgggacgtcgagacattacagcaaacaattgaggagaaggatcagcaggtgaccgaaatctcctttagtatgacggagaaaatggtgcagttgaatgaagagaagtttagtctgggtgtggaaatcaaaacactgaaagagcaactgaacttgctgtcccgggctgaggaggccaaaaaagaacaagtggaagaggacaacgaagtatcttccggcctaaaacaaaactatgatgaaatgagcccagcagggcagatatcaaaggaggagcttcagcacgaatttgacctgcttaagaaagagaatgagcagaggaagcgaaaactgcaggccgcactgattaacagaaaggaactactgcagcgggtgtctagattagaagaagagctcgctaatttgaaggacgaaagcaaaaaagagatccccctcagtgaaacagagcggggagaggtggaagaagacaaagaaaataaagagtattctgagaagtgcgtcacctctaaatgccaggagatcgaaatctatctaaagcagaccatcagcgaaaaggaggtggaactgcagcacattcgaaaagatctggaagagaagttggccgctgaagaacagtttcaggctctggtgaaacaaatgaatcagacactgcaggataagaccaatcagattgatcttctgcaggctgagatctcagaaaaccaggccattatccagaagctcatcacttcaaatactgacgccagcgatggcgattctgtagcgttagtgaaagagacagtggtcatctcacccccatgtacaggctccagcgagcattggaagcctgaactggaggaaaagatactggcactcgaaaaggaaaaagagcagctccaaaaaaagctgcaggaagctcttacctcaagaaaggccatacttaagaaagcccaggagaaagagcgtcacctcagggaagaactgaagcagcagaaggacgactacaacaggttacaggagcaatttgacgagcagtctaaggaaaacgaaaacattggagaccagctccggcaattacagattcaggtgcgagaaagcatcgatggcaagctcccttctactgaccagcaggaatcttgcagcagcaccccagggctcgaggagcctctgttcaaagctaccgaacagcatcacacccagccagtgcttgaaagtaacctgtgcccggattggccatcccattctgaggacgccagcgccctgcagggaggaactagcgtcgcacagattaaggctcaactcaaggagattgaagccgaaaaggttgagctcgaactgaaggtctcttcgacaacgtccgagctcactaagaagtccgaggaggtctttcaactgcaggagcagatcaataagcagggcctcgagatcgagtctctcaaaaccgtttcccacgaagccgaagtgcacgccgagagcttacagcagaaattggagagttcacagctccagattgcaggccttgagcatctgcgcgaactccagcccaagctcgacgagctgcagaagctcatttctaagaaggaggaggacgtgtcatacctgtctggacaattgtcggaaaaggaggctgctttaactaagatccagactgagatcattgaacaagaagacttgattaaagctctgcacacccagctcgagatgcaagcaaaggaacatgacgaacgtatcaagcagttgcaggtggagctctgcgagatgaagcagaagccagaagagattggggaggagtcacgtgctaagcagcagattcaacgcaaactccaagccgcactgattagcagaaaggaagcacttaaagaaaacaagagcctgcaggaagagctttcactggcccgaggcacaattgagcgtttaaccaaaagcctcgccgatgtggagagtcaggtgagtgcacagaataaggagaaggataccgtcctgggcaggctggccctcctgcaggaggagagagataagttaataacagagatggacaggtccctgttggagaaccaaagcctgagctcgagttgcgaatctctcaagctggcattggaaggtctgactgaggataaagaaaagcttgttaaggaaatcgagtccctgaagtcctctaagatagccgaaagcactgagtggcaggagaaacataaagagttgcagaaggagtacgagattctgctccagagctacgagaacgtgagcaatgaggccgagcgaatccagcacgttgtggaagcggtacggcaggagaaacaggaattgtatggcaaactgagatctacagaagcaaacaaaaaagaaacagaaaagcagctgcaggaagccgaacaggaaatggaagaaatgaaagagtag

SEQ ID NO: 287263 - DNA, 4923 bp, Artificial Sequence
  derived and/or modified sequence
atgctgagcagactgagcggcctggccaacgtggtgctgcacgagctgagcggcgacgacgacaccgaccagaacatgagagcccccctggaccccgagctgcaccaggagagcgacatggagttcaacaacaccacccaggaggacgtgcaggagagactggcctacgccgagcagctggtggtggagctgaaggacatcatcagacagaaggacgtgcagctgcagcagaaggacgaggccctgcaggaggagagaaaggccgccgacaacaagatcaagaagctgaagctgcacgccaaggccaagctgaccagcctgaacaagtacatcgaggagatgaaggcccagggcggcaccgtgctgcccaccgagccccagagcgaggagcagctgagcaagcacgacaagagcagcaccgaggaggagatggagatcgagaagatcaagcacaagctgcaggagaaggaggagctgatcagcaccctgcaggcccagctgacccaggcccaggccgagcagcccgcccagagcagcaccgagatggaggagttcgtgatgatgaagcagcagctgcaggagaaggaggagttcatcagcaccctgcaggcccagctgagccagacccaggccgagcaggccgcccagaagctgagagtgctgcagagaaagctggaggagcacgaggagagcctggtgggcagagcccaggtggtggacctgctgcagcaggagctgaccgccgccgagcagagaaaccagatcctgagccagcagctgcagcagatggaggccgagcacaacaccctgagaaacaccgtggagaccgagagagaggagagcaagatcctgctggagaagatggagctggaggtggccgagagaaagctgagcttccacaacctgcaggaggagatgcaccacctgctggagcagttcgagcaggccggccaggcccaggccgagctggagagcagatacagcgccctggagcagaagcacaaggccgagatggaggagaagaccagccacatcctgagcctgcagaagaccggccaggagctgcagagcgcctgcgacgccctgaaggaccagaacagcaagctgctgcaggacaagaacgagcaggccgtgcagagcgcccagaccatccagcagctggaggaccagctgcagcagaagagcaaggagatcagccagttcctgaacagactgcccctgcagcagcacgagaccgccagccagaccagcttccccgacgtgtacaacgagggcacccaggccgtgaccgaggagaacatcgccagcctgcagaagagagtggtggagctggagaacgagaagggcgccctgctgctgagcagcatcgagctggaggagctgaaggccgagaacgagaagctgagcagccagatcaccctgctggaggcccagaacagaaccggcgaggccgacagagaggtgagcgagatcagcatcgtggacatcgccaacaagagaagcagcagcgccgaggagagcggccaggacgtgctggagaacaccttcagccagaagcacaaggagctgagcgtgctgctgctggagatgaaggaggcccaggaggagatcgccttcctgaagctgcagctgcagggcaagagagccgaggaggccgaccacgaggtgctggaccagaaggagatgaagcagatggagggcgagggcatcgcccccatcaagatgaaggtgttcctggaggacaccggccaggacttccccctgatgcccaacgaggagagcagcctgcccgccgtggagaaggagcaggccagcaccgagcaccagagcagaaccagcgaggagatcagcctgaacgacgccggcgtggagctgaagagcaccaagcaggacggcgacaagagcctgagcgccgtgcccgacatcggccagtgccaccaggacgagctggagagactgaagagccagatcctggagctggagctgaacttccacaaggcccaggagatctacgagaagaacctggacgagaaggccaaggagatcagcaacctgaaccagctgatcgaggagttcaagaagaacgccgacaacaacagcagcgccttcaccgccctgagcgaggagagagaccagctgctgagccaggtgaaggagctgagcatggtgaccgagctgagagcccaggtgaagcagctggagatgaacctggccgaggccgagagacagagaagactggactacgagagccagaccgcccacgacaacctgctgaccgagcagatccacagcctgagcatcgaggccaagagcaaggacgtgaagatcgaggtgctgcagaacgagctggacgacgtgcagctgcagttcagcgagcagagcaccctgatcagaagcctgcagagccagctgcagaacaaggagagcgaggtgctggagggcgccgagagagtgagacacatcagcagcaaggtggaggagctgagccaggccctgagccagaaggagctggagatcaccaagatggaccagctgctgctggagaagaagagagacgtggagaccctgcagcagaccatcgaggagaaggaccagcaggtgaccgagatcagcttcagcatgaccgagaagatggtgcagctgaacgaggagaagttcagcctgggcgtggagatcaagaccctgaaggagcagctgaacctgctgagcagagccgaggaggccaagaaggagcaggtggaggaggacaacgaggtgagcagcggcctgaagcagaactacgacgagatgagccccgccggccagatcagcaaggaggagctgcagcacgagttcgacctgctgaagaaggagaacgagcagagaaagagaaagctgcaggccgccctgatcaacagaaaggagctgctgcagagagtgagcagactggaggaggagctggccaacctgaaggacgagagcaagaaggagatccccctgagcgagaccgagagaggcgaggtggaggaggacaaggagaacaaggagtacagcgagaagtgcgtgaccagcaagtgccaggagatcgagatctacctgaagcagaccatcagcgagaaggaggtggagctgcagcacatcagaaaggacctggaggagaagctggccgccgaggagcagttccaggccctggtgaagcagatgaaccagaccctgcaggacaagaccaaccagatcgacctgctgcaggccgagatcagcgagaaccaggccatcatccagaagctgatcaccagcaacaccgacgccagcgacggcgacagcgtggccctggtgaaggagaccgtggtgatcagccccccctgcaccggcagcagcgagcactggaagcccgagctggaggagaagatcctggccctggagaaggagaaggagcagctgcagaagaagctgcaggaggccctgaccagcagaaaggccatcctgaagaaggcccaggagaaggagagacacctgagagaggagctgaagcagcagaaggacgactacaacagactgcaggagcagttcgacgagcagagcaaggagaacgagaacatcggcgaccagctgagacagctgcagatccaggtgagagagagcatcgacggcaagctgcccagcaccgaccagcaggagagctgcagcagcacccccggcctggaggagcccctgttcaaggccaccgagcagcaccacacccagcccgtgctggagagcaacctgtgccccgactggcccagccacagcgaggacgccagcgccctgcagggcggcaccagcgtggcccagatcaaggcccagctgaaggagatcgaggccgagaaggtggagctggagctgaaggtgagcagcaccaccagcgagctgaccaagaagagcgaggaggtgttccagctgcaggagcagatcaacaagcagggcctggagatcgagagcctgaagaccgtgagccacgaggccgaggtgcacgccgagagcctgcagcagaagctggagagcagccagctgcagatcgccggcctggagcacctgagagagctgcagcccaagctggacgagctgcagaagctgatcagcaagaaggaggaggacgtgagctacctgagcggccagctgagcgagaaggaggccgccctgaccaagatccagaccgagatcatcgagcaggaggacctgatcaaggccctgcacacccagctggagatgcaggccaaggagcacgacgagagaatcaagcagctgcaggtggagctgtgcgagatgaagcagaagcccgaggagatcggcgaggagagcagagccaagcagcagatccagagaaagctgcaggccgccctgatcagcagaaaggaggccctgaaggagaacaagagcctgcaggaggagctgagcctggccagaggcaccatcgagagactgaccaagagcctggccgacgtggagagccaggtgagcgcccagaacaaggagaaggacaccgtgctgggcagactggccctgctgcaggaggagagagacaagctgatcaccgagatggacagaagcctgctggagaaccagagcctgagcagcagctgcgagagcctgaagctggccctggagggcctgaccgaggacaaggagaagctggtgaaggagatcgagagcctgaagagcagcaagatcgccgagagcaccgagtggcaggagaagcacaaggagctgcagaaggagtacgagatcctgctgcagagctacgagaacgtgagcaacgaggccgagagaatccagcacgtggtggaggccgtgagacaggagaagcaggagctgtacggcaagctgagaagcaccgaggccaacaagaaggagaccgagaagcagctgcaggaggccgagcaggagatggaggagatgaaggagtag

SEQ ID NO: 287264 - protein, 972 aa, Artificial Sequence
  derived and/or modified sequence
MKAQGGTVLPTEPQSEEQLSKHDKSSTEEEMEIEKIKHKLQEKEELISTLQAQLTQAQAEQPAQKLRVLQRKLEEHEESLVGRAQVVDLLQQELTAAEQRNQILSQQLQQMEAEHNTLRNTVETEREESKILLEKMELEVAERKLSFHNLQEEMHHLLEQFEQAGQAQAELESRYSALEQKHKAEMEEKTSHILSLQKTGQELQSACDALKDQNSKLLQDKNEQAVQSAQTIQQLEDQLQQKSKEISQFLNRLPLQQHETASQTSFPDVYNEGTQAVTEENIASLQKRVVELENEKGALLLSSIELEELKAENEKLSSQITLLEAQNRTGEADREVSEISIVDIANKRSSSAEESGQDVLENTFSQKHKELSVLLLEMKEAQEEIAFLKLQLQGKRAEEADHEVLDQKEMKQMEGEGIAPIKMKVFLEDTGQDFPLMPNEESSLPAVEKEQASTEHQSRTSEEISLNDAGVELKSTKQDGDKSLSAVPDIGQCHQDELERLKSQILELELNFHKAQEIYEKNLDEKAKEISNLNQLIEEFKKNADNNSSAFTALSEERDQLLSQVKELSMVTELRAQVKQLEMNLAEAERQRRLDYESQTAHDNLLTEQIHSLSIEAKSKDVKIEVLQNELDDVQLQFSEQSTLIRSLQSQLQNKESEVLEGAERVRHISSKVEELSQALSQKELEITKMDQLLLEKKRDVETLQQTIEEKDQQVTEISFSMTEKMVQLNEEKFSLGVEIKTLKEQLNLLSRAEEAKKEQVEEDNEVSSGLKQNYDEMSPAGQISKEELQHEFDLLKKENEQRKRKLQAALINRKELLQRVSRLEEELANLKDESKKEIPLSETERGEVEEDKENKEYSEKCVTSKCQEIEIYLKQTISEKEVELQHIRKDLEEKLAAEEQFQALVKQMNQTLQDKTNQIDLLQAEISENQAIIQKLITSNTDASDGDSVALVKETVVISPPCTGSSEHWKP

SEQ ID NO: 287265 - DNA, 2919 bp, Artificial Sequence
  derived and/or modified sequence
atgaaagcccaaggcggtacggtgttgccaactgagcctcagagcgaagagcagctttcgaaacatgacaaatcgtctaccgaggaagagatggaaatcgagaaaatcaaacataagctgcaggagaaggaggagctcattagcacgctgcaagcgcagctgacgcaagcacaggccgaacagcctgcccagaaactgcgcgttctccaaagaaagttggaagagcacgaggaaagcctggtcggacgcgcccaggtggtggatcttctgcagcaggaactcacggctgccgagcagcgaaaccagatcctgtcccagcaactgcagcagatggaagcagagcataatactctgcgcaacacggtagagaccgaaagggaagagtctaagatcctgctggagaagatggagctagaggtggcggaacggaaactgtccttccataatcttcaggaggagatgcaccacctgcttgagcagttcgaacaggctgggcaggctcaggcagagttggagtcacggtattccgccctggaacagaagcacaaggctgaaatggaggagaagacctcccacatcctgtctctgcagaagacaggacaagaacttcagtccgcttgcgacgctctgaaggaccagaatagtaagctactccaagacaagaatgagcaggctgtccagtccgcacagaccattcagcaactcgaggaccagctacagcagaaatccaaggagatctcccagttcctgaacaggctgcccctgcagcagcatgagaccgcttcccaaacaagttttcccgatgtatataatgagggcacgcaggccgtcactgaagaaaatatcgccagccttcaaaaacgggtggttgaactggaaaacgagaagggtgcactgctcctttcctccattgagctggaggagctcaaggccgaaaatgagaagctgtcctctcaaataacactgctagaagcccagaatcgtaccggcgaagcggaccgggaagtgagcgagatcagcattgttgacattgcaaacaaacggagttctagtgctgaggaaagtggtcaggacgtactagaaaacactttttcccagaagcataaagaactcagtgttttgctgctggagatgaaagaagcacaggaggagattgccttcctgaaacttcagctgcaaggcaagcgcgccgaagaggccgatcatgaagtgttagaccagaaagaaatgaagcaaatggagggcgaggggattgcccccataaaaatgaaggtgtttctggaggacaccggacaggattttccccttatgcccaacgaggaatcctcgctgcctgcggtcgagaaagaacaggcatcgactgaacaccagtctaggaccagcgaagagatttcgctgaacgatgccggggtggaactgaaaagtaccaagcaggatggagataaatcactatccgctgttcccgatattggacagtgtcatcaagacgagctcgagagattgaagtctcagatcctggagctcgagctgaacttccataaagctcaggaaatctatgaaaagaatttggacgaaaaagccaaagaaataagtaatctgaatcagttgatcgaagaattcaaaaagaacgctgacaacaatagttccgctttcaccgccttatcagaagagcgggaccagctgctgagtcaggtgaaagaactcagtatggtcactgagctccgggctcaagtaaaacaattggagatgaatcttgcagaggctgaacgacagcgtcgcttggactacgagtcacaaaccgcacacgataatctattgaccgagcagattcactctcttagcattgaagccaagtctaaggacgtgaaaattgaagtcctgcaaaacgaactggacgacgtccaattacagttctccgagcagagcactctgatcaggagtctccaaagtcagctccagaacaaggaatccgaagtgctagagggggctgaacgagttcggcatatctctagtaaggtcgaggaactgagtcaggcacttagccaaaaggaacttgaaatcactaagatggatcagctgctcttagagaagaaaagggatgtggagacactgcagcagacgatcgaagaaaaggatcagcaggtaacggaaatttccttctctatgactgagaagatggttcagctgaacgaagagaagtttagcctcggcgttgagattaagacactgaaagaacagctgaacctactgagccgggccgaggaggctaaaaaagagcaggtcgaggaagataatgaggtaagctcagggctcaagcagaactacgatgaaatgagccctgccggtcagatttccaaagaggagctacagcatgagtttgatctgttaaaaaaggaaaacgagcagagaaaacgcaagctgcaggcagccttgattaatcgcaaggaactcctgcagagggtctcgagattggaagaggagctagctaaccttaaagacgaaagtaagaaagagattccccttagcgaaacggaacgcggtgaagtggaggaggataaggagaacaaggagtactccgagaagtgtgtaaccagcaaatgccaggagattgaaatctaccttaagcaaaccatctccgagaaagaggtggaattgcagcacatacgcaaagatttggaggaaaagctggccgcagaggagcagttccaggcactcgtcaaacagatgaatcagaccctccaggataaaacaaatcagattgacctcctccaggccgagatatctgagaatcaagctataattcagaaactcatcacctcaaacacggatgcaagcgatggtgactctgtggctctggttaaggagacagttgtgatttcgcccccatgtacaggctcctctgagcactggaagccatag

SEQ ID NO: 287266 - DNA, 3395 bp, Artificial Sequence
  derived and/or modified sequence
gagtccctggcggggcgcggcggtggaaggtgtcgcgtacgggcttcccgagctgacgtggcttgaattgggaggggggcagctggagcctcaggcggcagcgcttctagaaatgctgagccgattatcaggattagcaaatgttgttttgcatgaattatcaggagatgatgacactgatcagaatatgagggctcccctagaccctgaattacaccaagaatctgacatggaatttaataatactacacaagaagatgttcaggagcgcctggcttatgcagagcaattggtggtggagctaaaagatattattagacagaaggatgttcaactgcagcagaaagatgaagctctacaggaagagagaaaagctgctgataacaaaattaaaaaactaaaacttcatgcgaaggccaaattaacttctttgaataaatacatagaagaaatgaaagcacaaggagggactgttctgcctacagaacctcagtcagaggagcaactttccaagcatgacaagagttctacagaggaagagatggaaatagaaaagataaaacataagctccaggagaaggaggaactaatcagcactttgcaagcccagcttactcaggcacaggcagaacaacctgcacagaaattgagggtgctgcaaaggaagcttgaggaacacgaagaatccttggtgggccgtgctcaggtcgttgacttgctgcaacaggagctgactgctgctgagcagagaaaccagattctctctcagcagttacagcagatggaagctgagcataatactttgaggaacactgtggaaacagaaagagaggagtccaagattctactggaaaagatggaacttgaagtggcagagagaaaattatccttccataatctgcaggaagaaatgcatcatcttttagaacagtttgagcaagcaggccaagcccaggctgaactagagtctcggtatagtgctttggagcagaagcacaaagcagaaatggaagagaagacctctcatattttgagtcttcaaaagactggacaagagctgcagtctgcctgtgatgctctaaaggatcaaaattcaaagcttctccaagataagaatgagcaagcagttcagtcagcccagaccattcagcaactggaagatcagctccagcaaaaatccaaagaaattagccaatttctaaatagactgcccttgcaacaacatgaaacagcatctcagacttctttcccagatgtttataatgagggcacacaggcagtcactgaggagaatattgcttctttgcagaagagagtggtagaactagagaatgaaaagggagccttgctccttagttctatagagctggaggagctgaaagctgagaatgaaaaactgtcttctcagattactctcctagaggctcagaatagaactggggaggcagacagagaagtcagtgagatcagcattgttgatattgccaacaagaggagctcttctgctgaggaaagtggacaagatgttctagaaaacacattttctcagaaacataaagaattatcagttttattgttggaaatgaaagaagctcaagaggaaattgcatttcttaaattacagctccagggaaaaagggctgaggaagcagatcatgaggtccttgaccagaaagaaatgaaacagatggagggtgagggaatagctccaattaaaatgaaagtatttcttgaagatacagggcaagattttcccttaatgccaaatgaagagagcagtcttccagcagttgaaaaagaacaggcgagcactgaacatcaaagtagaacatctgaggaaatatctttaaatgatgctggagtagaattgaaatcaacaaagcaggatggtgataaatccctttctgctgtaccagatattggtcagtgtcatcaggatgagttggaaaggttaaaaagtcaaattttggagctcgagctaaactttcataaagcacaagaaatctatgagaaaaatttagatgagaaagctaaggaaattagcaacctaaaccagttgattgaggagtttaagaaaaatgctgacaacaacagcagtgcattcactgctttgtctgaagaaagagaccagcttctctctcaggtgaaggaacttagcatggtaacagaattgagggctcaggtaaagcaactggaaatgaaccttgcagaagcagaaaggcaaagaagacttgattatgaaagccaaactgcccatgacaacctgctcactgaacagatccatagtctcagcatagaagccaaatctaaagatgtgaaaattgaagttttacagaatgaactggatgatgtgcagcttcagttttctgagcagagtaccctgataagaagcctgcaaagccagctgcaaaataaggaaagtgaagtgcttgagggggcagaacgtgtaaggcatatctcaagtaaagtggaagaactgtcccaggctctttcacagaaggaacttgaaataacaaaaatggatcagctcttactagagaaaaagagagatgtggaaaccctccaacaaaccatcgaggagaaggatcaacaagtgacagaaatcagctttagtatgactgagaaaatggttcagcttaatgaagagaagttttctcttggggttgaaattaagactcttaaagaacagctaaatttattatccagagctgaggaagcaaaaaaagagcaggtggaagaagataatgaagtttcttctggccttaaacaaaattatgatgagatgagcccagcaggacaaataagtaaggaagaacttcagcatgaatttgaccttctgaagaaagaaaatgagcagagaaagagaaagctccaggcagctcttattaacagaaaggagcttctgcaaagagtcagtagattggaagaagaattagccaacttgaaagatgaatctaagaaagaaatcccactcagtgagactgagaggggagaagtggaagaagataaagaaaacaaagaatactcagaaaaatgtgtgacttctaagtgccaagaaatagaaatttatttaaaacagacaatatctgagaaagaagtggaactacagcatataaggaaggatttggaagaaaagctggcagctgaagagcaattccaggctctggtcaaacagatgaatcagaccttgcaagataaaacaaaccaaatagatttgctccaagcagaaatcagtgaaaaccaagcaattatccagaagttaatcacaagtaacacggatgcaagtgatggggactccgtagcacttgtaaaggaaacagtggtgataagtccaccttgtacaggtagtagtgaacactggaaaccagaactagaagaaaagatactggcccttg

SEQ ID NO: 287267 - DNA, 2919 bp, Artificial Sequence
  derived and/or modified sequence
atgaaggcccagggcggcaccgtgctgcccacagagccccagagcgaggagcagctgagcaagcatgacaagagcagcacagaggaggagatggagattgagaagatcaagcacaagctgcaggagaaggaggagctgatcagcaccctgcaggcccagctgacccaggcccaggccgagcagcctgcccagaagctgcgggtgctgcagaggaagctggaggagcacgaggagagcctggtgggccgggcccaggtggtggacctgctgcagcaggagctgacagctgctgagcagaggaaccagatcctgagccagcagctgcagcagatggaggccgagcacaacaccctgaggaacacagtggagacagagcgggaggagagcaagatcctgctggagaagatggagctggaggtggccgagaggaagctgtccttccacaacctgcaggaggagatgcaccacctgctggagcagtttgagcaggccggccaggcccaggccgagctggagagccgctacagcgccctggagcagaagcacaaggccgagatggaggagaagaccagccacatcctgagcctgcagaagacaggccaggagctgcagagcgcctgtgatgccctgaaggaccagaacagcaagctgctgcaggacaagaatgagcaggccgtgcagagcgcccagaccatccagcagctggaggaccagctgcagcagaagagcaaggagatcagccagttcctgaaccggctgcccctgcagcagcacgagacagccagccagaccagcttcccagatgtgtacaatgaaggcacccaggccgtgacagaggagaacatcgccagcctgcagaagagggtggtggagctggagaatgagaagggggccctgctgctgagcagcattgagctggaggagctgaaggccgagaatgagaagctgagcagccagatcaccctgctggaggcccagaacagaactggagaggccgaccgggaggtgtctgagatcagcatcgtggacatcgccaacaagaggagcagcagcgctgaggagagcggccaggatgtgctggagaacaccttcagccagaagcacaaggagctgtctgtgctgctgctggagatgaaggaggcccaggaggagatcgccttcctgaagctgcagctgcagggcaagagagctgaggaggccgaccacgaggtgctggaccagaaggagatgaagcagatggagggggagggcatcgcccccatcaagatgaaggtgttcctggaggacaccggccaggacttccccctgatgcccaatgaggagagcagcctgcctgctgtggagaaggagcaggccagcacagagcaccagagcaggaccagcgaggagatcagcctgaatgatgctggggtggagctgaagagcaccaagcaggatggagacaagagcctgtctgctgtgcctgacatcggccagtgccaccaggatgagctggagcggctgaagagccagatcctggagctggagctgaacttccacaaggcccaggagatctatgagaagaacctggatgagaaggccaaggagatcagcaacctgaaccagctgattgaggagttcaagaagaatgctgacaacaacagcagcgccttcaccgccctgtctgaggagcgggaccagctgctgagccaggtgaaggagctgtccatggtgacagagctgcgggcccaggtgaagcagctggagatgaacctggccgaggccgagcggcagaggcggctggactatgagagccagacagcccatgacaacctgctgacagagcagatccacagcctgagcattgaggccaagagcaaggatgtgaagattgaggtgctgcagaatgagctggatgatgtgcagctgcagttcagcgagcagagcaccctcatccgcagcctgcagagccagctgcagaacaaggagagcgaggtgctggagggcgctgagcgggtgcgccacatcagcagcaaggtggaggagctgagccaggccctgagccagaaggagctggagatcaccaagatggaccagctgctgctggagaagaagagagatgtggagaccctgcagcagaccatcgaggagaaggaccagcaggtgacagagatctccttctccatgacagagaagatggtgcagctgaatgaggagaagttcagcctgggcgtggagatcaagaccctgaaggagcagctgaacctgctgagcagagctgaggaggccaagaaggagcaggtggaggaggacaatgaggtgagcagcggcctgaagcagaactatgatgagatgagccctgctggccagatcagcaaggaggagctgcagcatgaatttgacctgctgaagaaggaaaatgagcagaggaagaggaagctgcaggccgccctgatcaacaggaaggagctgctgcagagggtgtcccggctggaggaggagctggccaacctgaaggatgagagcaagaaggagatccccctgtctgaaacagagcggggggaggtggaggaggacaaggagaacaaggagtacagcgagaagtgtgtgaccagcaagtgccaggagattgagatctacctgaagcagaccatcagcgagaaggaggtggagctgcagcacatcaggaaggacctggaggagaagctggccgctgaggagcagttccaggccctggtgaagcagatgaaccagaccctgcaggacaagaccaaccagattgacctgctgcaggccgagatcagcgagaaccaggccatcatccagaagctgatcaccagcaacacagatgccagtgatggagacagcgtggccctggtgaaggagaccgtggtgatcagccccccctgcaccggcagcagcgagcactggaagccctag

SEQ ID NO: 287268 - DNA, 2919 bp, Artificial Sequence
  derived and/or modified sequence
atgaaggcccagggcggcaccgtgctgcccaccgagccccagagcgaggagcagctgtcaaagcatgataagagcagtactgaggaggagatggaaatcgagaaaattaaacacaagctgcaagaaaaggaagaactgatatctacccttcaagcgcagctgacccaggcccaggctgaacagcctgcacagaagctgcgggttctgcagcgaaagctggaagagcatgaggagtccctggtgggacgcgcacaggtggtggacctccttcagcaagaactgaccgcagcagagcagcggaatcagatcctcagccagcagctccagcaaatggaagcagagcacaatactctgaggaatacagtagagacagaacgtgaggaatccaagatcctgctcgaaaaaatggagctggaggtggcggaacggaaacttagtttccacaatctgcaggaggagatgcatcatctgcttgagcaattcgaacaggcgggccaggcacaggccgaactggagagccgttatagcgccctcgaacagaagcacaaagccgagatggaagaaaaaacgagccatatcctgtcattgcagaagactggccaggaacttcagtccgcttgcgacgctcttaaagatcagaactccaaattgctgcaggacaagaatgagcaggctgtccaatccgcacagactatacagcaactcgaggaccagctgcagcaaaagtccaaagaaatttcacagtttcttaatcgcctccctcttcaacagcacgaaaccgcctcacaaaccagctttccagatgtgtacaatgagggtacgcaggctgtgaccgaggagaacattgctagcctgcagaagcgagtggtcgagttggaaaatgagaaaggagccctactcctttcatcaatcgaactggaagagctcaaggcggagaacgaaaaacttagcagccaaatcaccctcctcgaagcacaaaatagaactggtgaagccgaccgggaggtttcggagatctccattgtggatatcgccaacaagcgttcaagctctgcagaggagagtgggcaagatgtccttgaaaatactttttcccaaaaacataaggagctctcagtgcttttgcttgagatgaaagaggcccaggaagaaattgcatttctgaagttgcagttacagggcaaaagagctgaagaggccgaccatgaagtgttggaccaaaaggaaatgaaacagatggagggggaaggcatagcccccatcaaaatgaaggtgttcctagaggacactgggcaggacttcccattgatgcccaacgaagagtcctcattaccagcagtggaaaaggaacaggcctcaacggaacaccagagtaggacatccgaagagatctctctgaacgacgccggagtcgagctgaagagtacaaagcaagacggtgacaaatccctctccgctgtgcccgatatcggacagtgccatcaggacgaactggaaagactgaagtcccagattcttgagcttgagctgaattttcacaaggcacaagaaatttacgagaagaatctcgacgagaaagctaaagagatatcaaacctaaatcaactgatcgaagaatttaaaaaaaatgccgacaataatagcagtgcttttaccgctctttcagaggagagagatcagctcctgtcacaggtgaaagagctcagcatggtgaccgagctcagagcacaggtgaagcagctcgagatgaacctggctgaagccgagcgtcagagacgcctagactatgagtctcaaacggcccacgataatctcctgactgaacaaattcattccctcagcatcgaagccaaatctaaagatgtcaaaatcgaagttctgcaaaacgaacttgatgacgtgcaattgcaatttagtgagcagtcaaccctgattaggtcgctccagtcacaactccagaataaggagagcgaagtgcttgagggagctgagcgggtgcggcatattagctctaaggtcgaagaactatcacaggcactttcacagaaggagctcgagatcacgaagatggaccagcttttgttggagaaaaagagggacgtagagaccctgcagcagacaattgaggagaaagatcagcaggtaactgagatctctttttccatgacggaaaagatggtgcagctcaatgaagagaaattctccctgggcgtggaaatcaagaccctaaaagagcagcttaatctgctcagcagggccgaggaggccaaaaaggagcaggtcgaggaggataacgaggtgtcatccgggctaaaacagaattacgatgagatgagtcccgcgggtcagatatctaaagaagaacttcagcacgaattcgaccttcttaagaaggagaatgagcagaggaagcgaaaactccaagccgccctgatcaatagaaaggaactgctccagcgggtaagcaggctggaagaagagttagcaaaccttaaagacgagagtaagaaagaaattccattgtcagagaccgaacgaggcgaagtcgaggaggataaagagaataaagagtatagcgagaaatgtgtaaccagcaagtgtcaggaaatcgagatttacctaaagcagaccatctcagaaaaggaagtggaactgcagcacatcagaaaggatctggaagaaaaattggccgctgaggagcaatttcaggctctcgtcaagcagatgaaccagacgctgcaggacaagactaaccaaattgacctgctacaggctgagatatccgagaatcaggctataatccagaagctgatcacgagcaatactgatgccagcgacggcgattctgtggcactggtcaaggagaccgtggtaatttctccaccatgtaccgggagctcggaacactggaagccttag

SEQ ID NO: 287269 - DNA, 2919 bp, Artificial Sequence
  derived and/or modified sequence
atgaaggcacaggggggtacagtgctgccaacagagccccaaagtgaggaacaactctccaagcatgacaagtctagcacagaagaggaaatggaaatcgagaagataaaacataagctgcaggagaaggaggagctgatctctaccctccaggctcagctgacgcaggcccaggcggagcagcccgctcaaaagctgcgcgtgcttcagcgtaagctggaagagcatgaggagagcctcgttggtcgggctcaggtcgtggatctcctgcagcaggaactgacagcagcagagcaacgtaatcagatcctgtctcagcagctacagcagatggaggcagagcataacactctccggaacaccgtcgagaccgaaagggaggaaagcaagattctactggagaaaatggaactggaggtagccgaaaggaagctgtcgttccacaatctgcaggaagagatgcatcatttactcgagcagtttgaacaagctggccaggcccaagcagagctggaatcacgctacagcgctctcgaacagaaacataaggccgagatggaggaaaagaccagccatatcctgtctctgcagaaaacaggccaagagctccaaagcgcctgcgatgccttgaaagatcagaactctaaactcttgcaggacaaaaatgagcaagctgtgcagagtgcccaaaccattcagcagctggaggatcagctgcagcagaagtccaaggagatttcacagttcttgaaccgcctgccactgcaacagcatgagacagcttcacaaactagcttcccagatgtctacaatgagggcacacaggccgtcaccgaggaaaacattgcgagtctgcagaagagggttgtggagctggagaacgaaaagggagctctgctgctgtcaagtattgagcttgaggagttaaaggctgaaaacgagaaactttcgagtcagatcacacttctggaagcacaaaacaggactggcgaagccgatcgggaagtgagcgaaatttccatcgtggacatcgccaacaagcggagctcatctgcggaagagtctggccaagacgtcctcgaaaataccttttcccagaagcacaaggagctaagcgtcctcctcctggaaatgaaggaggcccaagaagagattgccttcttgaaactgcaacttcagggtaaacgcgctgaagaggcagaccacgaggtgctggaccaaaaagaaatgaaacagatggagggggaggggatagccccaattaagatgaaggtgttcctcgaggacaccggtcaggattttcccctgatgcccaacgaggagtcctcacttccagctgtcgaaaaggaacaggcaagtaccgaacatcagtcacgaactagtgaagagatcagcctgaacgatgctggagtcgagctcaaatcaaccaagcaggacggtgacaagagcttatctgcggtcccagatattgggcagtgccaccaggacgaactagagcgccttaagtcgcagatcctggaactcgaactgaactttcataaagcacaggagatttatgagaaaaacctggatgaaaaagcaaaggaaatctccaacttaaaccagctcatcgaagagtttaaaaagaacgctgacaataacagctctgcttttactgcgttgtccgaggaacgtgaccagttactatctcaggtgaaggagctctctatggtgaccgagcttcgggcacaggtcaaacaactggaaatgaatctcgcagaggcagagaggcagcggcgtcttgattatgagtcgcaaaccgcccatgacaatttacttactgaacagatacattctctttcaatcgaggctaagtcaaaagatgtcaagatcgaagtcctccagaatgagttggatgatgtgcagctccagtttagtgaacagtcaacactgatccggagcctccaaagtcagctccagaacaaggagtcagaggtgcttgagggtgccgaacgtgtgcggcacattagtagcaaagtggaagagttaagccaggccctatctcagaaggagctcgaaattaccaagatggatcagctgttgttagaaaagaaacgggatgttgaaaccttgcagcagactatcgaggagaaggaccaacaggtcacggagatatccttcagcatgacggagaagatggtccagctgaacgaggagaagttttcactgggagtggagatcaagacacttaaggagcaactcaacttgctcagccgtgccgaagaggcaaaaaaggaacaggttgaggaggacaacgaagtcagcagtggactaaagcagaactacgacgagatgtcacctgccggacaaatctcgaaggaggagttacagcatgaatttgacctcttaaaaaaggagaacgagcaaagaaaaagaaagctgcaggccgctcttattaatcgcaaagagttgctccaacgtgtgtcaaggctggaggaggagttggcaaatctcaaggatgagtcaaaaaaagagataccactgtctgaaacggagcggggtgaggttgaagaagacaaagagaataaagaatacagcgagaagtgcgtgacaagtaagtgccaggaaatcgagatttatctgaagcaaaccatttctgagaaagaagtcgagctgcagcatattcggaaggacttggaggagaagcttgcagcggaagaacaattccaagcgctcgtgaagcagatgaatcagaccctccaggacaaaacgaaccagattgatctactgcaggccgagataagcgagaaccaagctattattcagaagctgataacctcaaacacagacgcctctgatggcgacagtgtggccctggtgaaggagactgtggtgattagccctccttgcactggtagctcagagcattggaagccatag

SEQ ID NO: 287270 - DNA, 2919 bp, Artificial Sequence
  derived and/or modified sequence
atgaaggcccagggcggcaccgtgctgcccaccgagccccagagcgaggagcagctgagcaagcacgacaagagcagcaccgaggaggagatggagatcgagaagatcaagcacaagctgcaggagaaggaggagctgatcagcaccctgcaggcccagctgacccaggcccaggccgagcagcccgcccagaagctgagagtgctgcagagaaagctggaggagcacgaggagagcctggtgggcagagcccaggtggtggacctgctgcagcaggagctgaccgccgccgagcagagaaaccagatcctgagccagcagctgcagcagatggaggccgagcacaacaccctgagaaacaccgtggagaccgagagagaggagagcaagatcctgctggagaagatggagctggaggtggccgagagaaagctgagcttccacaacctgcaggaggagatgcaccacctgctggagcagttcgagcaggccggccaggcccaggccgagctggagagcagatacagcgccctggagcagaagcacaaggccgagatggaggagaagaccagccacatcctgagcctgcagaagaccggccaggagctgcagagcgcctgcgacgccctgaaggaccagaacagcaagctgctgcaggacaagaacgagcaggccgtgcagagcgcccagaccatccagcagctggaggaccagctgcagcagaagagcaaggagatcagccagttcctgaacagactgcccctgcagcagcacgagaccgccagccagaccagcttccccgacgtgtacaacgagggcacccaggccgtgaccgaggagaacatcgccagcctgcagaagagagtggtggagctggagaacgagaagggcgccctgctgctgagcagcatcgagctggaggagctgaaggccgagaacgagaagctgagcagccagatcaccctgctggaggcccagaacagaaccggcgaggccgacagagaggtgagcgagatcagcatcgtggacatcgccaacaagagaagcagcagcgccgaggagagcggccaggacgtgctggagaacaccttcagccagaagcacaaggagctgagcgtgctgctgctggagatgaaggaggcccaggaggagatcgccttcctgaagctgcagctgcagggcaagagagccgaggaggccgaccacgaggtgctggaccagaaggagatgaagcagatggagggcgagggcatcgcccccatcaagatgaaggtgttcctggaggacaccggccaggacttccccctgatgcccaacgaggagagcagcctgcccgccgtggagaaggagcaggccagcaccgagcaccagagcagaaccagcgaggagatcagcctgaacgacgccggcgtggagctgaagagcaccaagcaggacggcgacaagagcctgagcgccgtgcccgacatcggccagtgccaccaggacgagctggagagactgaagagccagatcctggagctggagctgaacttccacaaggcccaggagatctacgagaagaacctggacgagaaggccaaggagatcagcaacctgaaccagctgatcgaggagttcaagaagaacgccgacaacaacagcagcgccttcaccgccctgagcgaggagagagaccagctgctgagccaggtgaaggagctgagcatggtgaccgagctgagagcccaggtgaagcagctggagatgaacctggccgaggccgagagacagagaagactggactacgagagccagaccgcccacgacaacctgctgaccgagcagatccacagcctgagcatcgaggccaagagcaaggacgtgaagatcgaggtgctgcagaacgagctggacgacgtgcagctgcagttcagcgagcagagcaccctgatcagaagcctgcagagccagctgcagaacaaggagagcgaggtgctggagggcgccgagagagtgagacacatcagcagcaaggtggaggagctgagccaggccctgagccagaaggagctggagatcaccaagatggaccagctgctgctggagaagaagagagacgtggagaccctgcagcagaccatcgaggagaaggaccagcaggtgaccgagatcagcttcagcatgaccgagaagatggtgcagctgaacgaggagaagttcagcctgggcgtggagatcaagaccctgaaggagcagctgaacctgctgagcagagccgaggaggccaagaaggagcaggtggaggaggacaacgaggtgagcagcggcctgaagcagaactacgacgagatgagccccgccggccagatcagcaaggaggagctgcagcacgagttcgacctgctgaagaaggagaacgagcagagaaagagaaagctgcaggccgccctgatcaacagaaaggagctgctgcagagagtgagcagactggaggaggagctggccaacctgaaggacgagagcaagaaggagatccccctgagcgagaccgagagaggcgaggtggaggaggacaaggagaacaaggagtacagcgagaagtgcgtgaccagcaagtgccaggagatcgagatctacctgaagcagaccatcagcgagaaggaggtggagctgcagcacatcagaaaggacctggaggagaagctggccgccgaggagcagttccaggccctggtgaagcagatgaaccagaccctgcaggacaagaccaaccagatcgacctgctgcaggccgagatcagcgagaaccaggccatcatccagaagctgatcaccagcaacaccgacgccagcgacggcgacagcgtggccctggtgaaggagaccgtggtgatcagccccccctgcaccggcagcagcgagcactggaagccctag

SEQ ID NO: 287271 - DNA, 1144 bp, Artificial Sequence
  derived and/or modified sequence
tctgtcccccaggaacatgagcagctgacctactcttccacaaggtccaaagcccccagtgtcatcatcacaggtcttaagccagccaccaaatatgtatttcacatccgagtgagaactgcgacaggatacagtggctacagtcagaaatttgaatttgaaacaggagatgaaacttctgacatggcagcagaacaaggacagattctcgtgatagccaccgccgctgttggcggattcactctcctcgtcatcctcactttattcttcttgatcactgggagatgtcagtggtacataaaagccaagatgaagtcagaagagaagagaagaaaccacttacagaatgggcatttgcgcttcccgggaattaaaacttacattgatccagatacatatgaagacccatccctagcagtccatgaatttgcaaaggagattgatccctcaagaattcgtattgagagagtcattggggcaggtgaatttggagaagtctgtagtgggcgtttgaagacaccagggaaaagagagatcccagttgccattaaaactttgaaaggtggccacatggatcggcaaagaagagattttctaagagaagctagtatcatgggccagtttgaccatccaaacatcattcgcctagaaggggttgtcaccaaaagatccttcccggccattggggtggaggcgttttgccccagcttcctgagggcagggtttttaaatagcatccaggccccgcatccagtgccagggggaggatctttgccccccaggattcctgctggcagaccagtaatgattgtggtggaatatatggagaatggatccctagactcctttttgcggctgtatcctaaagcagaatataatggcaaacagtgtagcagatattcaatctaaattgctgctaaaaatggatcaaatgactaccacaagcaaataagaagcatgatggccacttcacagtcatccagttggtcggaatgctccgaggcattgcatcaggcatgaagtatctttctgatatgggttatgttcatcgagacctagcggctcggaatatactggtcaatagcaacttagtatgcaaagtttctgattttggtctctccagagtgctggaagatgatccaga

SEQ ID NO: 287272 - protein, 104 aa, Artificial Sequence
  derived and/or modified sequence
MNPNYTEFKFPQIKAHPWTKVFRPRTPPEAIALCSRLLEYTPTARLTPLEACAHSFFDELRDPNVKLPNGRDTPALFNFTTQDANTGDRGQTNNAASASASNST

SEQ ID NO: 287273 - DNA, 315 bp, Artificial Sequence
  derived and/or modified sequence
atgaaccccaactacaccgagttcaagttcccccagatcaaggcccacccctggaccaaggtgttcagacccagaaccccccccgaggccatcgccctgtgcagcagactgctggagtacacccccaccgccagactgacccccctggaggcctgcgcccacagcttcttcgacgagctgagagaccccaacgtgaagctgcccaacggcagagacacccccgccctgttcaacttcaccacccaggacgccaacaccggcgacagaggccagaccaacaacgccgccagcgccagcgccagcaacagcacctag

SEQ ID NO: 287274 - DNA, 315 bp, Artificial Sequence
  derived and/or modified sequence
atgaatcccaattatactgagttcaaatttccacagatcaaagcacatccttggaccaaggtcttcaggccacgtacccccccagaggctatcgccctatgctccagattgctggaatatactcctaccgccaggctcactccactcgaggcctgcgcccactccttcttcgacgaactgcgggacccaaacgtcaagctgcccaatggcagggacacccctgcgttgtttaactttactacacaggatgcaaatactggagacagggggcagacgaacaatgccgcctcagcttccgcgagcaatagtacctag

SEQ ID NO: 287275 - DNA, 1607 bp, Artificial Sequence
  derived and/or modified sequence
actcattttcaatcaagtatttgcccccgtttcacgtgatacatatttttttaggatttgccctctcttttctctcctcccaggaaagggaggggaaagaattgtattttttcccaagtcctaaatcatctatatgttaaatatccgtgccgatctgtcttgaaggagaaatatatcgcttgttttgttttttatagtatacaaaaggagtgaaaagccaagaggacgaagtctttttctttttcttctgtgggagaacttaatgctgcatttatcgttaacctaacaccccaacataaagacaaaaggaagaaaaggaggaaggaaggaaaaggtgattcgcgaagagagtgatcatgtcagggcggcccagaaccacctcctttgcggagagctgcaagccggtgcagcagccttcagcttttggcagcatgaaagttagcagagacaaggacggcagcaaggtgacaacagtggtggcaactcctgggcagggtccagacaggccacaagaagtcagctatacagacactaaagtgattggaaatggatcatttggtgtggtatatcaagccaaactttgtgattcaggagaactggtcgccatcaagaaagtattgcaggacaagagatttaagaatcgagagctccagatcatgagaaagctagatcactgtaacatagtccgattgcgttatttcttctactccagtggtgagaagaaagatgaggtctatcttaatctggtgctggactatgttccggaaacagtatacagagttgccagacactatagtcgagccaaacagacgctccctgtgatttatgtcaagttgtatatgtatcagctgttccgaagtttagcctatatccattcctttggaatctgccatcgggatattaaaccgcagaacctcttgttggatcctgatactgctgtattaaaactctgtgactttggaagtgcaaagcagctggtccgaggagaacccaatgtttcgtatatctgttctcggtactatagggcaccagagttgatctttggagccactgattatacctctagtatagatgtatggtctgctggctgtgtgttggctgagctgttactaggacaaccaatatttccaggggatagtggtgtggatcagttggtagaaataatcaaggtcctgggaactccaacaagggagcaaatcagagaaatgaacccaaactacacagaatttaaattccctcaaattaaggcacatccttggactaaggtcttccgaccccgaactccaccggaggcaattgcactgtgtagccgtctgctggagtatacaccaactgcccgactaacaccactggaagcttgtgcacattcattttttgatgaattacgggacccaaatgtcaaactaccaaatgggcgagacacacctgcactcttcaacttcaccactcaagatgctaatactggagaccgtggacagaccaataatgctgcttctgcatcagcttccaactccacctgaacagtcccgagcagccagctgcacaggaaaaaccaccagttacttgagtgtcactcagcaacactggtcacgtttggaaagaatatt

SEQ ID NO: 287276 - DNA, 315 bp, Artificial Sequence
  derived and/or modified sequence
atgaaccccaactacacagagttcaagttcccccagatcaaggcccacccctggaccaaggtgttccggcccaggaccccacctgaggccatcgccctgtgcagccggctgctggagtacacccccacagcccggctgacccccctggaggcctgtgcccacagcttctttgatgagctgcgggaccccaacgtgaagctgcccaacggccgggacaccccagccctcttcaacttcaccacccaggatgccaacacaggagaccggggccagaccaacaatgctgccagcgccagcgccagcaacagcacctag

SEQ ID NO: 287277 - DNA, 315 bp, Artificial Sequence
  derived and/or modified sequence
atgaaccccaactacaccgagttcaagttcccccagatcaaggcccatccgtggacaaaggtctttcgacctcgaacacctccagaggccatcgccctctgtagcaggctgctcgagtacacgcccaccgctagactgacacctcttgaagcctgcgcccactcattcttcgatgaactgagagatcccaatgtcaagctgcccaacggtcgcgacacacctgccctcttcaatttcacaactcaggatgccaataccggagacagaggccagactaacaacgctgcgtctgccagcgcatcaaatagcacttag

SEQ ID NO: 287278 - DNA, 315 bp, Artificial Sequence
  derived and/or modified sequence
atgaaccccaactacactgagtttaagtttccccagatcaaggcccacccatggaccaaagttttccggccacggactccgccagaggccatagcattgtgcagccggttattggaatatactcccacagcaagactgacccctctcgaagcctgtgctcattcttttttcgacgagcttagggacccaaacgttaagctccccaacggccgtgatacacctgctctttttaacttcactacccaagatgcaaacacaggcgaccgaggccagaccaataatgccgcttcagcctctgccagcaattccacctag

SEQ ID NO: 287279 - protein, 261 aa, Artificial Sequence
  derived and/or modified sequence
MGSRKKEIALQVNISTQELWEEMLSSKGLTVVDVYQGWCGPCKPVVSLFQKMRIEVGLDLLHFALIKDEALSDEDECVSHGKNNGEDEDMVSSERTCTLAIIKPDAVAHGKTDEIIMKIQEAGFEILTNEERTMTEAEVRLFYQHKAGEEAFEKLVHHMCSGPSHLLILTRTEGFEDVVTTWRTVMGPRDPNVARREQPESLRAQYGTEMPFNAVHGSRDREDADRELALLFPSLKFSDKDTEAPQGESSTQPRLKITDLD

SEQ ID NO: 287280 - DNA, 786 bp, Artificial Sequence
  derived and/or modified sequence
atgggcagcagaaagaaggagatcgccctgcaggtgaacatcagcacccaggagctgtgggaggagatgctgagcagcaagggcctgaccgtggtggacgtgtaccagggctggtgcggcccctgcaagcccgtggtgagcctgttccagaagatgagaatcgaggtgggcctggacctgctgcacttcgccctgatcaaggacgaggccctgagcgacgaggacgagtgcgtgagccacggcaagaacaacggcgaggacgaggacatggtgagcagcgagagaacctgcaccctggccatcatcaagcccgacgccgtggcccacggcaagaccgacgagatcatcatgaagatccaggaggccggcttcgagatcctgaccaacgaggagagaaccatgaccgaggccgaggtgagactgttctaccagcacaaggccggcgaggaggccttcgagaagctggtgcaccacatgtgcagcggccccagccacctgctgatcctgaccagaaccgagggcttcgaggacgtggtgaccacctggagaaccgtgatgggccccagagaccccaacgtggccagaagagagcagcccgagagcctgagagcccagtacggcaccgagatgcccttcaacgccgtgcacggcagcagagacagagaggacgccgacagagagctggccctgctgttccccagcctgaagttcagcgacaaggacaccgaggccccccagggcgagagcagcacccagcccagactgaagatcaccgacctggactag

SEQ ID NO: 287281 - DNA, 814 bp, Artificial Sequence
  derived and/or modified sequence
aacagggcttcgtcttctttgcagagccatgggcagcaggaagaaggaaattgccctgcaggtcaacatcagcacccaagagctttgggaggaaatgctcagttccaaaggactaactgttgttgatgtctatcaaggctggtgtggcccctgcaaacctgtggtgagcctcttccagaagatgaggatcgaggtcggcctggaccttctgcactttgcattaattaaagatgaggctctttctgatgaagatgaatgtgtttcccatggaaagaataatggtgaagatgaggacatggtttcatcagagaggacctgtaccttggccatcattaaaccagatgcagtggcccatggaaagactgatgagattatcatgaagattcaggaagctgggtttgaaattctaacaaatgaagagagaaccatgacagaggcagaagtgcgacttttctaccaacacaaagctggagaggaggcatttgagaagctggtacatcacatgtgcagtggaccaagccacctcctgatcctcaccaggactgagggcttcgaggacgtggtcactacctggcgaaccgtcatgggcccccgtgaccccaatgtggccaggagggagcagccagaaagtctccgagctcagtacggcacagaaatgcccttcaatgccgtccatggaagccgggacagagaagatgctgacagagaactggcattgctcttccccagtttgaaattttcagacaaagatacagaagcccctcagggtgagtccagtacacagccaaggttgaagatcactgacctagactaa

SEQ ID NO: 287282 - DNA, 786 bp, Artificial Sequence
  derived and/or modified sequence
atgggtagcagaaagaaggagatcgctctacaagtaaatatctcaactcaggagctttgggaagagatgttatcaagcaaaggcctcactgtggttgacgtctaccagggctggtgcggcccctgtaagcctgtcgtctctctgtttcaaaagatgcggatcgaagtgggactggaccttctgcatttcgccttgatcaaagatgaggccttgtcagatgaggacgaatgtgtgtcccacggtaaaaataatggggaagacgaggatatggtgtcatctgagcgcacttgtactttggcaatcatcaaacccgatgccgttgctcatggtaagacggacgagatcattatgaaaatccaggaagccggcttcgaaatcctgactaacgaagagcgcacaatgaccgaggctgaggtgcgacttttctaccagcacaaagctggagaggaggcgttcgaaaaactagtgcatcacatgtgtagtgggcctagccacctcctgattttgaccagaacagagggttttgaagatgttgtgaccacatggaggacagtcatgggtccccgtgatcctaacgtggcaaggcgtgagcagcccgaatcccttagagcccagtacgggacagaaatgcccttcaatgctgttcacggctccagggatcgcgaggatgccgaccgagaactcgccctgttgttcccaagcctcaagtttagtgataaggacaccgaagcaccccagggggagtctagtacacagcctcgcttgaagatcaccgatctcgactag

SEQ ID NO: 287283 - DNA, 786 bp, Artificial Sequence
  derived and/or modified sequence
atgggcagcagaaaaaaggagatcgcactgcaggttaatataagtacacaagaactctgggaggagatgctgtcttctaagggactgacagtcgtcgatgtttatcagggctggtgcgggccttgcaaaccagtcgtgagcctcttccagaagatgagaatcgaggtgggccttgatctcctccatttcgccctaataaaggatgaggctctctcagatgaggatgagtgcgtttctcacggaaagaacaatggagaggacgaagatatggtgagctccgagcggacatgtactctagcaataattaaacccgatgcggttgcccatgggaagaccgatgagatcatcatgaaaatccaagaggcgggtttcgaaattctaaccaatgaggaaaggactatgaccgaagcagaggtaagactgttttaccagcacaaggctggagaagaagctttcgaaaagctggttcaccatatgtgcagcgggccatctcatctgttgatattgacccggaccgaggggtttgaggatgtggttactacatggcgcactgtcatggggccccgcgatccaaacgtagccaggcgcgaacagccagagtcccttcgggcccaatacggtactgagatgcccttcaacgctgtccacgggagcagggaccgggaagatgccgatagagaacttgccctgctatttccctctctcaagttctccgacaaagacaccgaagccccacagggagagagctctactcagccccgcttgaagatcaccgacctcgactag

SEQ ID NO: 287284 - DNA, 786 bp, Artificial Sequence
  derived and/or modified sequence
atgggcagcaggaagaaggagatcgccctgcaggtgaacatcagcacccaggagctgtgggaggagatgctgagcagcaagggcctgactgtggtggatgtgtaccagggctggtgtggcccctgcaagcctgtggtgtccctcttccagaagatgagaattgaggtgggcctggacctgctgcactttgccctgatcaaggatgaggccctgagtgatgaagatgaatgtgtgagccacggcaagaacaacggggaggatgaggacatggtgtcctctgagaggacctgcaccctggccatcatcaagccagatgctgtggcccacggcaagacagatgagatcatcatgaagatccaggaggccggctttgagatcctgaccaatgaggagaggaccatgacagaagctgaggtgcggctcttctaccagcacaaggccggggaggaggcctttgagaagctggtgcaccacatgtgcagcggccccagccacctgctgatcctgaccaggacagagggctttgaagatgtggtgaccacctggaggacagtgatgggcccccgggaccccaacgtggcccggcgggagcagcctgagagcctgcgggcccagtatggaacagagatgcccttcaatgctgtgcacggcagccgggaccgggaggatgctgaccgggagctggccctgctcttccccagcctgaagttcagtgacaaggacacagaggccccccagggcgagagcagcacccagccccggctgaagatcacagacctggactag

SEQ ID NO: 287285 - DNA, 786 bp, Artificial Sequence
  derived and/or modified sequence
atgggcagccggaagaaggagatcgccctgcaggtgaacatcagcactcaggaactgtgggaggagatgctgagcagcaagggcttgaccgtggtggatgtgtaccagggctggtgtggtccatgtaaacctgtggtgtctctgttccagaagatgcgaatagaagtaggcttagacttactgcattttgccttaatcaaagatgaggctctgtcagatgaggacgagtgcgtgtctcatggcaaaaacaacggagaggacgaggatatggtgtcaagtgagaggacctgcaccctagccatcattaaaccagatgctgtcgcacacgggaagaccgatgaaattattatgaagattcaggaagcgggtttcgaaattctgaccaacgaagaacgcactatgacagaagctgaggtgagactgttctaccagcataaggcgggtgaggaggcattcgagaagctggtgcaccacatgtgttccggacctagccacttactcatcctgaccaggacagaggggttcgaggatgttgttactacatggagaaccgtgatggggccgcgggatccaaacgtcgcgcggcgagagcaacctgaatctctgcgagcccagtatggcacagaaatgccattcaatgcagtccatggtagccgtgatcgagaagatgccgatcgagaactcgctctgctgtttccctcactgaagttctctgataaagataccgaggcccctcagggtgaaagcagtacacaaccaagactaaagattacagacttagattag

SEQ ID NO: 287286 - DNA, 786 bp, Artificial Sequence
  derived and/or modified sequence
atgggcagccggaagaaggagatcgccctgcaggtgaacatcagcacccaagaactttgggaggagatgttatcttctaaagggcttaccgtggtcgatgtttaccagggatggtgtggaccctgtaagccggtcgtctccctgtttcaaaagatgcggattgaagtagggctcgatctgctgcactttgccctgattaaggatgaggccctctccgatgaggatgagtgcgtttcacacggtaagaacaacggcgaggacgaagacatggtgagttcggagcgcacctgtacccttgccattatcaaacccgacgccgtggcacacggaaagaccgatgaaataatcatgaagattcaggaagctggttttgaaatcctaaccaatgaagagaggactatgacagaagcagaggtccgcttgttttaccagcacaaagctggtgaagaggcattcgagaaactcgtgcatcacatgtgctcgggcccctctcaccttctgatcctgaccagaactgaaggcttcgaggatgtagtcacaacttggagaacggtaatggggccccgcgacccaaacgttgctcggagggagcagcccgagtctctgagggcacaatacgggaccgaaatgccctttaatgccgtgcacgggtctcgcgaccgagaggatgctgaccgcgaactggcacttctgttccccagtttgaaattctcagacaaagacactgaagccccccagggggagtcatcaacccaaccaaggcttaagatcaccgatctggattag

SEQ ID NO: 287287 - DNA, 786 bp, Artificial Sequence
  derived and/or modified sequence
atggggagcaggaagaaagaaatcgccctgcaggttaacatcagcacccaggagttatgggaagaaatgctttcttcaaaaggtctcacggtagtggacgtgtatcagggttggtgcggcccatgtaagcctgtcgtgtctctatttcaaaagatgcgaatagaggtgggacttgatctgttgcatttcgccctgatcaaggacgaggctctgagcgatgaagacgagtgcgtttctcacggaaaaaacaatggggaggacgaagacatggtgtcttcagagagaacttgcactctggcgattatcaaaccagatgctgttgcccacggaaaaactgacgaaatcataatgaagattcaggaggctggcttcgagatcctcaccaacgaggaaaggactatgacagaggcggaggtcagactgttctatcagcacaaagctggcgaggaagccttcgaaaaactggtccaccacatgtgctccggaccgagccatctactgattctcacaagaacagagggatttgaggacgtcgtgacaacctggaggacggtgatgggcccaagggacccaaacgttgctagacgagaacagccagaatctctcagagcacagtatggaacggagatgcctttcaacgctgtgcatgggtcaagggacagggaagacgctgatcgggagctggcgctactgtttcctagcctcaagttctccgataaagataccgaggcccctcagggagagtcttcaacacaacccagattaaaaatcactgacctcgactag

SEQ ID NO: 287288 - DNA, 786 bp, Artificial Sequence
  derived and/or modified sequence
atgggctcccggaagaaggaaattgcactgcaggtcaacatctccacccaggaactttgggaggagatgctcagctcgaagggcctgactgttgtcgatgtctaccaagggtggtgcggcccttgtaaaccggtggtgtcactgttccagaagatgcgaatagaagtgggcttggacctgctgcactttgctttaattaaggacgaggccctgagtgacgaagacgaatgtgttagtcatggcaaaaacaatggcgaagacgaggatatggtgtctagtgagcgcacctgcacactggctatcatcaaaccggacgctgtagcgcatggcaaaacagatgagataattatgaagattcaggaggccggtttcgagattcttacaaacgaagagcggactatgaccgaggctgaggtaagactgttttaccaacacaaggctggcgaagaggcatttgaaaaattagtccaccatatgtgttccggtcccagtcatttgctaatcctcaccagaactgagggcttcgaggacgtcgtgactacctggcgcactgtcatgggacccagagatccaaacgttgccaggcgggagcagccagaaagcctgagggcacaatacgggaccgagatgcctttcaacgcagtgcacggcagccgggatcgagaggatgcagaccgagaactcgcactgcttttcccctcgctgaaatttagcgacaaggatacagaagcaccccaaggggagtcctcaacacaacctaggcttaagatcactgatttggattag

SEQ ID NO: 287289 - DNA, 825 bp, Artificial Sequence
  derived and/or modified sequence
cttgtacctgtcgttcgcagtggctcactttcccaagccatgggcagcaggaagaaggaaattgccctgcaggtcaacatcagcacccaagagctttgggaggaaatgctcagttccaaaggactaactgttgttgatgtctatcaaggctggtgtggcccctgcaaacctgtggtgagcctcttccagaagatgaggatcgaggtcggcctggaccttctgcactttgcattaattaaagatgaggctctttctgatgaagatgaatgtgtttcccatggaaagaataatggtgaagatgaggacatggtttcatcagagaggacctgtaccttggccatcattaaaccagatgcagtggcccatggaaagactgatgagattatcatgaagattcaggaagctgggtttgaaattctaacaaatgaagagagaaccatgacagaggcagaagtgcgacttttctaccaacacaaagctggagaggaggcatttgagaagctggtacatcacatgtgcagtggaccaagccacctcctgatcctcaccaggactgagggcttcgaggacgtggtcactacctggcgaaccgtcatgggcccccgtgaccccaatgtggccaggagggagcagccagaaagtctccgagctcagtacggcacagaaatgcccttcaatgccgtccatggaagccgggacagagaagatgctgacagagaactggcattgctcttccccagtttgaaattttcagacaaagatacagaagcccctcagggtgagtccagtacacagccaaggttgaagatcactgacctagactaa

SEQ ID NO: 287290 - protein, 215 aa, Artificial Sequence
  derived and/or modified sequence
MYQVIQGIISPVNDTYGKKDLAASHHRVAMARLALQTSDWIRVDPWESEQAQWMETVKVLRHHHSKLLRSPPQMEGPDHGKALFSTPAAVPELKLLCGADVLKTFQTPNLWKDAHIQEIVEKFGLVCVGRVGHDPKGYIAESPILRMHQHNIHLAKEPVQNEISATYIRRALGQGQSVKYLIPDAVITYIKDHGLYTKGSTWKGKSTQSTEGKTS

SEQ ID NO: 287291 - protein, 142 aa, Artificial Sequence
  derived and/or modified sequence
MEGPDHGKALFSTPAAVPELKLLCGADVLKTFQTPNLWKDAHIQEIVEKFGLVCVGRVGHDPKGYIAESPILRMHQHNIHLAKEPVQNEISATYIRRALGQGQSVKYLIPDAVITYIKDHGLYTKGSTWKGKSTQSTEGKTS

SEQ ID NO: 287292 - protein, 252 aa, Artificial Sequence
  derived and/or modified sequence
MKSRIPVVLLACGSFNPITNMHLRMFEVARDHLHQTGMYQVIQGIISPVNDTYGKKDLAASHHRVAMARLALQTSDWIRVDPWESEQAQWMETVKVLRHHHSKLLRSPPQMEGPDHGKALFSTPAAVPELKLLCGADVLKTFQTPNLWKDAHIQEIVEKFGLVCVGRVGHDPKGYIAESPILRMHQHNIHLAKEPVQNEISATYIRRALGQGQSVKYLIPDAVITYIKDHGLYTKGSTWKGKSTQSTEGKTS

SEQ ID NO: 287293 - protein, 114 aa, Artificial Sequence
  derived and/or modified sequence
MKSRIPVVLLACGSFNPITNMHLRMFEVARDHLHQTGMYQVIQGIISPVNDTYGKKDLAASHHRVAMARLALQTSDWIRVDPWESEQAQWMETVKVLRHHHSKLLRSPPQMEGP

SEQ ID NO: 287294 - DNA, 759 bp, Artificial Sequence
  derived and/or modified sequence
atgaaatctcgcatccctgttgtcctgctcgcctgtggaagtttcaaccccatcactaatatgcatctaagaatgtttgaggtcgcccgcgaccatttgcaccagactggtatgtaccaggtgattcagggtatcatttcccctgtgaatgacacatacggaaaaaaggatctggctgcctcccaccatagggtagccatggcgagactcgccttgcagacctccgactggattagagtcgatccatgggaaagtgaacaggcccagtggatggagacagtgaaagtgttacggcaccaccactccaagctgttaaggagcccaccacagatggaaggtcctgatcacgggaaagcactgtttagcacaccagcggccgtgcctgagctgaaactgctgtgcggagccgacgttcttaaaacgttccagactccaaacctgtggaaggacgctcacatacaagagatagtggagaagtttggcttggtttgcgtgggacgtgtgggccacgatcctaaaggctatatcgccgaaagcccaattctgaggatgcaccaacacaatatccacttagcaaaggaacccgtgcagaatgaaattagcgctacctacatccgcagggcactcggccagggacagtctgtgaagtacctcatccccgacgccgtgataacttacatcaaggatcatggcctgtacacaaagggatccacctggaagggcaagtcaacgcagagcactgaggggaaaacgagctag

SEQ ID NO: 287295 - DNA, 345 bp, Artificial Sequence
  derived and/or modified sequence
atgaagagccgcatcccagtggtcttgctggcctgcggatcatttaatccaattactaacatgcacttacgcatgtttgaggtcgcccgtgaccatctgcaccagacagggatgtaccaagttatccagggaattatctcgcctgtgaacgatacatatgggaagaaggatcttgcggcttctcatcatcgtgtggccatggccagactggctctgcagacctcagactggatacgcgtggatccttgggagtccgagcaggcgcagtggatggaaacagtcaaggtcctacggcatcatcattctaagctgctgcggtccccccctcaaatggaagggccctag

SEQ ID NO: 287296 - DNA, 759 bp, Artificial Sequence
  derived and/or modified sequence
atgaagagccgcatccctgtggtgctgctggcctgtggcagcttcaaccccatcaccaacatgcacctgaggatgtttgaggtggcccgggaccacctgcaccagacaggcatgtaccaggtgatccagggcatcatcagccctgtgaatgacacctacggcaagaaggacctggccgccagccaccaccgggtggccatggcccggctggccctgcagaccagtgactggatccgggtggacccctgggagagcgagcaggcccagtggatggagaccgtgaaggtgctgcggcaccaccacagcaagctgctgcggagccccccccagatggagggccctgaccacggcaaggccctcttcagcaccccagctgctgtgcctgagctgaagctgctgtgtggggctgatgtgctgaagaccttccagacccccaacctgtggaaggatgcccacatccaggagatcgtggagaagtttggcctggtgtgtgtgggccgggtgggccatgaccccaagggctacatcgccgagagccccatcctgaggatgcaccagcacaacatccacctggccaaggagcctgtgcagaatgagatcagcgccacctacatccggcgggccctgggccagggccagagcgtgaagtacctgatcccagatgctgtgatcacctacatcaaggaccacggcctgtacaccaagggcagcacctggaagggcaagagcacccagagcacagagggcaagaccagctag

SEQ ID NO: 287297 - DNA, 345 bp, Artificial Sequence
  derived and/or modified sequence
atgaagagccgcatccctgtggtgctgctggcctgtggcagcttcaaccccatcaccaacatgcacctgaggatgtttgaggtggcccgggaccacctgcaccagacaggcatgtaccaggtgatccagggcatcatcagccctgtgaatgacacctacggcaagaaggacctggccgccagccaccaccgggtggccatggcccggctggccctgcagaccagtgactggatccgggtggacccctgggagagcgagcaggcccagtggatggagaccgtgaaggtgctgcggcaccaccacagcaagctgctgcggagccccccccagatggagggcccctag

SEQ ID NO: 287298 - DNA, 759 bp, Artificial Sequence
  derived and/or modified sequence
atgaagagccggatccccgtggtgctgctggcctgcggcagcttcaatcctattacaaatatgcatctgcgaatgtttgaagttgccagagaccacctccaccagacaggaatgtatcaagtgatccagggcattataagccccgtcaacgacacctacgggaagaaagatctcgccgctagtcatcaccgggtagccatggctcggttagctctccagacatctgactggatccgcgtcgacccctgggagtcagaacaagcccagtggatggagaccgttaaggtcttgagacaccatcatagcaagttgctgaggtcgccccctcagatggagggtccggatcatggcaaggccctgttttcaactcccgctgccgtgcccgaactcaagctcctctgtggtgccgatgtcctgaagacttttcagactcctaacctgtggaaggacgcgcatattcaggagatagtagagaagttcggtttagtttgcgtcggcagggtgggacatgaccccaagggctacattgccgaatcccccattttaaggatgcaccaacataatatccatctcgctaaagagcctgtgcagaatgaaatcagtgcaacatacatccggcgggcactggggcagggacaaagtgtgaaatacctcatccctgatgcagtaataacgtatattaaggaccatggactatatacaaagggctcaacatggaaaggaaagtccacacagagtaccgaaggcaagaccagctag

SEQ ID NO: 287299 - DNA, 345 bp, Artificial Sequence
  derived and/or modified sequence
atgaagagccggatccccgtggtgctgctggcctgcggcagcttcaacccaattactaatatgcacctccggatgtttgaggttgcccgcgatcatttgcaccaaaccggcatgtaccaggttatccaggggattatctctccagtcaacgatacctacggcaagaaggatctggcggcctctcaccacagggtcgccatggccagacttgctctccagactagcgattggatacgggtggatccttgggagtcagagcaagcccagtggatggaaacagtcaaagtcctcagacatcatcattccaagctgcttcgctccccacctcagatggaggggccctag

SEQ ID NO: 287300 - DNA, 1569 bp, Artificial Sequence
  derived and/or modified sequence
gggagcgcaaggtcaagttcgccttggccccgcctccagctcaggtactaggggatctagacctgaggctgcccgggccggaggcagccttgagtcccgagaccaaacgtcgtttccctctcggacctcgggcgccgggccgcgcgctgaccgacagcccctgctaggcccagcaggtcccctagtcccccgcagtcccccgagactcgccgagcgccgttgctgagccctgcaaatagcagctacctgcttcagcctagatcctgccatgaagcggactgctgctccctggctcccactctgatctgcttttcactcttgccttgtctcccaattaataagcagggtggccactgcaacaggtgtggatgtgcctgacaagatgaagagccgaatacctgtggtgctcctggcctgtggctcctttaaccccatcaccaacatgcacctgcgcatgtttgaggtggccagagatcacctacaccaaacaggaatgtaccaggtcatccagggtatcatctctcctgtcaacgacacctatgggaagaaagacctcgcagcttctcatcaccgagtggccatggcccggctggccctgcagacatccgactggatccgggtggacccttgggagagtgagcaggcacagtggatggagacagtgaaggtgctgaggcatcatcacagcaaactgctcagatctccaccccagatggaaggcccagaccatggcaaggcactcttctcgacccctgcagctgtgcctgagctgaagcttctctgtggggcagacgtcttgaagaccttccagacccccaacctctggaaggatgcgcacatccaggaaatagtggagaagtttggcttggtgtgcgtgggccgagtaggtcacgacccaaaaggttacatcgcagaatctcccatcctacggatgcaccagcacaacattcacctggccaaggagcctgtgcagaatgagatcagtgccacatacatcaggcgagccttgggccaagggcagagcgtaaagtacctgattcccgatgctgtcatcacgtacatcaaggaccatggcctctacaccaagggcagtacctggaaaggcaaaagcacccagagcactgagggcaagacaagctagggaggggggactcagcacccacacctcctccaacaagctcctgctggggagagggctgttaaggtttctgttttactttggtttttgcttctccatttttcatttgctttatttctacagtgattctacttctgaggagtcttctgtcccaggaagagataccttctttacaggagaggaaaggtctaaatcacaaggatagacatttatcaaagaagttaaaatggtgtggcaggtcattaggattaggcagaatctctcagagctgctggacaaggaggtctacttattttgtgtggatggtaattatggcatgcacgctgaatgcagttctgagcatggcagcggcccctgagggtcagatcagaattgcccacaatgtgttttttaactaggaccaggtgcagcatgctagtcttgattggaaa

SEQ ID NO: 287301 - DNA, 1863 bp, Artificial Sequence
  derived and/or modified sequence
gggcggggcgcagatctgtttccctcagactccatctgcccggggccgctaagggagcgcaaggtcaagttcgccttggccccgcctccagctcaggtactaggggatctagacctgaggctgcccgggccggaggcagccttgagtcccgagaccaaacgtcgtttccctctcggacctcgggcgccgggccgcgcgctgaccgacagcccctgctaggcccagcaggtcccctagtcccccgcagtcccccgagactcgccgagcgccgttgctgagccctgcaaatagcagctacctgcttcagcctagatcctgccatgaagcggactgctgctccctggctcccactctgatctgcttttcactcttgccttgtctcccaattaataaggaatgtaccaggtcatccagggtatcatctctcctgtcaacgacacctatgggaagaaagacctcgcagcttctcatcaccgagtggccatggcccggctggccctgcagacatccgactggatccgggtggacccttgggagagtgagcaggcacagtggatggagacagtgaaggtgctgaggcatcatcacagcaaactgctcagatctccaccccagatggaaggcccagaccatggcaaggcactcttctcgacccctgcagctgtgcctgagctgaagcttctctgtggggcagacgtcttgaagaccttccagacccccaacctctggaaggatgcgcacatccaggaaatagtggagaagtttggcttggtgtgcgtgggccgagtaggtcacgacccaaaaggttacatcgcagaatctcccatcctacggatgcaccagcacaacattcacctggccaaggagcctgtgcagaatgagatcagtgccacatacatcaggcgagccttgggccaagggcagagcgtaaagtacctgattcccgatgctgtcatcacgtacatcaaggaccatggcctctacaccaagggcagtacctggaaaggcaaaagcacccagagcactgagggcaagacaagctagggaggggggactcagcacccacacctcctccaacaagctcctgctggggagagggctgttaaggtttctgttttactttggtttttgcttctccatttttcatttgctttatttctacagtgattctacttctgaggagtcttctgtcccaggaagagataccttctttacaggagaggaaaggtctaaatcacaaggatagacatttatcaaagaagttaaaatggtgtggcaggtcattaggattaggcagaatctctcagagctgctggacaaggaggtctacttattttgtgtggatggtaattatggcatgcacgctgaatgcagttctgagcatggcagcggcccctgagggtcagatcagaattgcccacaatgtgttttttaactaggaccaggtgcagcatgctagtcttgattggaaagatttgacaggatgctaattactgaacagtgggttttgtcaacgccctggtttcagaatatgaactgaggagtcaaacagttggaaacagcacattgctgatttacactggatcttgccttagaaaccattgtctgcctgcctaaccagcttttcataaaatttaaacaaaactctttctacgtagtgatcctcaagcaatatttttgatacagcaagtgtcaaacttgctatagcataaaagccggggctcctgatttccaggtttctaaaaaggaactgaggtaaaacagatgcctgaccgttttaaaggatcttttttaatgttttatgactgcctgtctgtttgaatactggcaaagggataaataataaattgacatcaaaaagta

SEQ ID NO: 287302 - DNA, 2037 bp, Artificial Sequence
  derived and/or modified sequence
agggcccgccccagcgaaggggcggggcgcagatctgtttccctcagactccatctgcccggggccgctaagggagcgcaaggtcaagttcgccttggccccgcctccagctcaggtactaggggatctagacctgaggctgcccgggccggaggcagccttgagtcccgagaccaaacgtcgtttccctctcggacctcgggcgccgggccgcgcgctgaccgacagcccctgctaggcccagcaggtcccctagtcccccgcagtcccccgagactcgccgagcgccgttgctgagccctgcaaatagcagctacctgcttcagcctagatcctgccatgaagcggactgctgctccctggctcccactctgatctgcttttcactcttgccttgtctcccaattaataagcagggtggccactgcaacaggtgtggatgtgcctgacaagatgaagagccgaatacctgtggtgctcctggcctgtggctcctttaaccccatcaccaacatgcacctgcgcatgtttgaggtggccagagatcacctacaccaaacaggaatgtaccaggtcatccagggtatcatctctcctgtcaacgacacctatgggaagaaagacctcgcagcttctcatcaccgagtggccatggcccggctggccctgcagacatccgactggatccgggtggacccttgggagagtgagcaggcacagtggatggagacagtgaaggtgctgaggcatcatcacagcaaactgctcagatctccaccccagatggaaggcccagaccatggcaaggcactcttctcgacccctgcagctgtgcctgagctgaagcttctctgtggggcagacgtcttgaagaccttccagacccccaacctctggaaggatgcgcacatccaggaaatagtggagaagtttggcttggtgtgcgtgggccgagtaggtcacgacccaaaaggttacatcgcagaatctcccatcctacggatgcaccagcacaacattcacctggccaaggagcctgtgcagaatgagatcagtgccacatacatcaggcgagccttgggccaagggcagagcgtaaagtacctgattcccgatgctgtcatcacgtacatcaaggaccatggcctctacaccaagggcagtacctggaaaggcaaaagcacccagagcactgagggcaagacaagctagggaggggggactcagcacccacacctcctccaacaagctcctgctggggagagggctgttaaggtttctgttttactttggtttttgcttctccatttttcatttgctttatttctacagtgattctacttctgaggagtcttctgtcccaggaagagataccttctttacaggagaggaaaggtctaaatcacaaggatagacatttatcaaagaagttaaaatggtgtggcaggtcattaggattaggcagaatctctcagagctgctggacaaggaggtctacttattttgtgtggatggtaattatggcatgcacgctgaatgcagttctgagcatggcagcggcccctgagggtcagatcagaattgcccacaatgtgttttttaactaggaccaggtgcagcatgctagtcttgattggaaagatttgacaggatgctaattactgaacagtgggttttgtcaacgccctggtttcagaatatgaactgaggagtcaaacagttggaaacagcacattgctgatttacactggatcttgccttagaaaccattgtctgcctgcctaaccagcttttcataaaatttaaacaaaactctttctacgtagtgatcctcaagcaatatttttgatacagcaagtgtcaaacttgctatagcataaaagccggggctcctgatttccaggtttctaaaaaggaactgaggtaaaacagatgcctgaccgttttaaaggatcttttttaatgttttatgactgcctgtctgtttgaatactggcaaagggataaataataaattgacatcaaaaagtactaatg

SEQ ID NO: 287303 - DNA, 763 bp, Artificial Sequence
  derived and/or modified sequence
cgctaagggagcgcaaggtcaagttcgccttggccccgcctccagctcaggtactaggggatctagacctgaggctgcccgggccggaggcagccttgagtcccgagaccaaacgtcgtttccctctcggacctcgggcgccgggccgcgcgctgaccgacagcccctgctaggcccagcaggtcccctagtcccccgcagtcccccgagactcgccgagcgccgttgctgagccctgcaaatagcagctacctgcttcagcctagatcctgccatgaagcggactgctgctccctggctcccactctgatctgcttttcactcttgccttgtctcccaattaataaggggtggctggcagaggatccttacaccgacaaggaagggtggccactgcaacaggtgtggatgtgcctgacaagatgaagagccgaatacctgtggtgctcctggcctgtggctcctttaaccccatcaccaacatgcacctgcgcatgtttgaggtggccagagatcacctacaccaaacaggaatgtaccaggtcatccagggtatcatctctcctgtcaacgacacctatgggaagaaagacctcgcagcttctcatcaccgagtggccatggcccggctggccctgcagacatccgactggatccgggtggacccttgggagagtgagcaggcacagtggatggagacagtgaaggtgctgaggcatcatcacagcaaactgctcagatctccaccccagatggaaggccc

SEQ ID NO: 287304 - DNA, 759 bp, Artificial Sequence
  derived and/or modified sequence
atgaagtctagaatccccgttgtgttgctggcgtgcggttcatttaacccgatcacaaatatgcacttgcggatgttcgaagtggcacgggaccacctgcatcaaacaggaatgtatcaagtgatccagggaatcatctccccagtcaacgacacatatggaaaaaaagacctggccgcatctcaccaccgagtcgctatggcccgactcgctctccaaacgtccgattggatccgagtagatccatgggaatctgagcaggctcagtggatggagaccgtgaaagtgttgcgccatcaccattctaagcttctaaggagcccaccacagatggaagggcctgatcacggcaaggccctgttttctacccccgcagcggtaccggaactgaaacttttatgcggtgccgatgttctcaaaacattccaaacccctaacctgtggaaagacgcacatatccaggagattgtggagaagtttggtcttgtgtgcgtaggccgtgtcgggcatgacccaaagggctacatcgctgaatctcccattcttaggatgcatcagcacaatattcacctggcaaaggagcctgtccaaaacgagattagcgcgacttacatcagacgcgcattgggacagggccagtctgtgaagtacctcattccagatgccgtcataacttatattaaggaccacggtctgtatacaaagggaagcacatggaaagggaagagcacccagtccacggagggaaaaacgtcctag

SEQ ID NO: 287305 - DNA, 345 bp, Artificial Sequence
  derived and/or modified sequence
atgaagtcacgaattccagtcgtgctccttgcttgtgggtctttcaaccctatcaccaatatgcaccttcgcatgtttgaagtggctagagaccacctccatcagacaggcatgtaccaggtgattcaaggcataatctctcctgtcaacgacacctatggcaaaaaggacttagctgctagtcatcacagagtagccatggccagactggcactccagacatccgattggattagggtggatccctgggaatcagagcaggcgcaatggatggaaaccgtaaaggtgctccgccaccaccacagtaagctgctcaggagtcctcctcagatggaggggccttag

SEQ ID NO: 287306 - DNA, 759 bp, Artificial Sequence
  derived and/or modified sequence
atgaagagcagaatccccgtggtgctgctggcctgcggcagcttcaaccccatcaccaacatgcacctgagaatgttcgaggtggccagagaccacctgcaccagaccggcatgtaccaggtgatccagggcatcatcagccccgtgaacgacacctacggcaagaaggacctggccgccagccaccacagagtggccatggccagactggccctgcagaccagcgactggatcagagtggacccctgggagagcgagcaggcccagtggatggagaccgtgaaggtgctgagacaccaccacagcaagctgctgagaagccccccccagatggagggccccgaccacggcaaggccctgttcagcacccccgccgccgtgcccgagctgaagctgctgtgcggcgccgacgtgctgaagaccttccagacccccaacctgtggaaggacgcccacatccaggagatcgtggagaagttcggcctggtgtgcgtgggcagagtgggccacgaccccaagggctacatcgccgagagccccatcctgagaatgcaccagcacaacatccacctggccaaggagcccgtgcagaacgagatcagcgccacctacatcagaagagccctgggccagggccagagcgtgaagtacctgatccccgacgccgtgatcacctacatcaaggaccacggcctgtacaccaagggcagcacctggaagggcaagagcacccagagcaccgagggcaagaccagctag

SEQ ID NO: 287307 - DNA, 345 bp, Artificial Sequence
  derived and/or modified sequence
atgaagagcagaatccccgtggtgctgctggcctgcggcagcttcaaccccatcaccaacatgcacctgagaatgttcgaggtggccagagaccacctgcaccagaccggcatgtaccaggtgatccagggcatcatcagccccgtgaacgacacctacggcaagaaggacctggccgccagccaccacagagtggccatggccagactggccctgcagaccagcgactggatcagagtggacccctgggagagcgagcaggcccagtggatggagaccgtgaaggtgctgagacaccaccacagcaagctgctgagaagccccccccagatggagggcccctag

SEQ ID NO: 287308 - DNA, 2572 bp, Artificial Sequence
  derived and/or modified sequence
agccgactggcggcgcggtcgcccgggagaccgggaaagccgtttcacacccgtcctagtcgaagtcgagatttcctttggcttcaaagctctctcaccatattttgggaagttatggatcatcacattcccatgcatgcgttgcctgaagaaatccaaaagatgttgcctgaagaaaaagtttgtaagtactgtggagtcagctatctaattcttcatgaatttaaggctatggaagaaaaagtgaaagcaatggaaaaagagatgaaattttatcaaggaagtgtagatcgtgaaaagagacttcaagaaaagctgcattctcttagccaagaacttgaacagtacaaaattgacaacaaatccaaaacagaaagaatttacgatgtaggcatgcagttaaaaagtcaacaaaatgaatttcagaaagtaaagaaacaactgagtcatttgcaagatgagctaaaaattaaatatagacaatcatacatcttcagtcaaagattgtcagagtacaaatatttctggaataagactctttcattacttacttttactaaaagggaactaaccagtattaaaaatgaagtatatgataattaccaaaactggacttcattgaaaggagcagtttttctacaaattaaatctataagtgaaacagccttgacagaaatagacatactgaataaaagtttgacagtatcccagagaaataaagtatgccttgaaaaggaaatgaaaaatctgaaattgttgtcagatgcagccatattgagatctcagcagattcggacatctagacaacaggaagtaaacttgcaaaccagatgctatgatttgcaaaaagaagtactagatttacaatgtctagtagaggcacttggattaaaacttcagaaggcggtgacagagatggacaactataaagaaatgcttatgaataaatctaatgaagctgatgactgtcaaagagaacttaaaaaactgaagtttgaatccattatttctgagtcacagcatactatgctgcttaaggaaaaagaagactctttaatgacttgtcaacagatatataaagcattacaggaagagctgactgtgaaagaaaagcaagaagaagacataaagagaagaattaaccttgcagaaaatgaactggagataaccaaaactcttctgaatcagacaagggaagaggttttaacactgaaaaatgaaagggaattgatgctgatttcacatcagaaaagcatcgagcagctgcaagaaacccttagacagaagctgctgagtgatgataactggaaggagaagattgaagcagaacttgccaaggaaagggcccaacacttggttgaatttgaagagcaagctcttctctttaaggaagaaacaaaattgcaacttgatattgaaaaagaaaaacaccaagatgtaatccaaaagtataagaaagaacaagaggaactacaaatgaagatatctgacttaatcacaggcgctacaagagatctaaggcaggaagtgaccactcttaaagaaaaacttcacaaatcccatattcggtacactgaagaatctaattcaaaggaaaaagaaattgaaaatcttaaaaatttggttgcagaatttgaatctcgcttgaagaaggaaattgacagtaatgattcagtttcagaaaacttgaggaaggaaatggaacagaagtcggatgaactgaaaagagtaatgctggctcaaacacaactgatagagcaatttaaccagtcccaggaagagaatacttttcttcaggagacagtgcgtagagaatgtgaagaacgctttgaactgacagaggctttgagtcaagccagagaacagctcctggagctcagtaagcttcgtggaagtttaccattctcaccgtgttccctcagcaagggcagcctaacctcccctgctgcagcagtcagtaatcatggagagagaagccttgcaagactgaactctgaaaaaggaatccaaattcccaacctgcgcggggtgtcaaaacccaccactttcccaacctcagataagccgaagagggttagatcaggcgtgcccattctcccccagccacatcctcccaggggtggagcatcttcagcaaatgagactagacagagactggctgccattcttaggagaaggcggagtcagcaatgatccaaaatgaggagcaggaagctccctacagcgtgcacgctctttcagagagtgccaggaattcactgtaactgagaatgacaatgataaaattattttcacagatcaggaaggcatacctatagatgtatttaacaaaagactgtaaaaagctggaaaattgtgaagccttatttttcaagagggttttgatagagtaacagatcattaagttgttggtattccagaggtccgatttctatgtttatgttggaatgtgctctatgaatatagccttttagagatcacaggtaaaatttttcacccataacatcttttcaatttcttgcgccactacaagcagatatatttccacaaaaaaatagattgtttgagattt

SEQ ID NO: 287309 - DNA, 444 bp, Artificial Sequence
  derived and/or modified sequence
atgaagcacctgctgatgtggagccccgtgatcgcccccggcgagaccgtgtactacagcgtggagtaccagggcgagtacgagagcctgtacaccagccacatctggatccccagcagctggtgcagcctgaccgagggccccgagtgcgacgtgaccgacgacatcaccgccaccgtgccctacaacctgagagtgagagccaccctgggcagccagaccagcgcctggagcatcctgaagcaccccttcaacagaaacagcaccatcctgaccagacccggcatggagatcaccaaggacggcttccacctggtgatcgagctggaggacctgggcccccagttcgagttcctggtggcctactggagaagagagcccggcgccgaggagagacccttcccctggtactggccctgcctgcccctgctggccagctgctag

SEQ ID NO: 287310 - DNA, 444 bp, Artificial Sequence
  derived and/or modified sequence
atgaaacacctgctgatgtggtcaccggtgatcgcacccggcgagactgtgtattattccgtcgaataccagggcgaatacgaatcactctatacctcacacatttggattccttcctcatggtgctccctaaccgaggggcctgagtgcgatgtgacggatgatataactgccacggtgccctacaaccttagggtgcgcgccaccttggggtctcaaacaagtgcttggtccattttgaaacacccattcaaccgcaacagcacgattctgacacgtcccggcatggaaatcactaaggatgggtttcatctggtcatagagctggaggatttgggaccacaatttgaattcctggtcgcttactggaggagggagcctggcgccgaagaaagacctttcccatggtactggccgtgcctgcccctgctggcctcctgttag

SEQ ID NO: 287311 - DNA, 444 bp, Artificial Sequence
  derived and/or modified sequence
atgaagcacctgctgatgtggagccctgtgattgcccctggagagaccgtgtactacagcgtggagtaccagggcgagtatgagagcctgtacaccagccacatctggatccccagctcctggtgcagcctgacagagggcccagaatgtgatgtgacagatgacatcacagccaccgtgccctacaacctgcgggtgcgggccaccctgggcagccagaccagcgcctggagcatcctgaagcaccccttcaacagaaacagcaccatcctgacccggcccggcatggagatcaccaaggatggcttccacctggtgattgagctggaggacctgggcccccagtttgagttcctggtggcctactggaggcgggagcctggagctgaggagcggcccttcccctggtactggccctgcctgcccctgctggccagctgctag

SEQ ID NO: 287312 - DNA, 444 bp, Artificial Sequence
  derived and/or modified sequence
atgaagcacctgctgatgtggagccccgtgatcgcccccggcgagacagtgtattactctgttgaataccagggcgagtatgaatcgctctacacttcccatatttggattccttcatcctggtgttccttgaccgaaggcccagagtgcgacgttaccgacgacataacagccactgtgccttacaacctgagggtgagagcaaccttgggaagccagaccagcgcatggagcattctgaagcacccttttaacagaaattctactatcttgacaaggcctggtatggagatcacgaaggacggctttcacctcgtcattgaactagaggacctggggccacagtttgagtttcttgtggcctactggagaagagagccaggagccgaggagcgacccttcccatggtactggccatgtctgccactcctggcttcttgctag

SEQ ID NO: 287313 - DNA, 444 bp, Artificial Sequence
  derived and/or modified sequence
atgaagcacctcttaatgtggagccctgttatcgccccaggggagaccgtctactactccgtagagtaccagggggaatatgagagtctgtacactagccacatttggattccttcaagttggtgtagcttgaccgaaggccctgaatgcgatgtgacagacgatatcactgccacggtgccctataacctgagagtgcgcgctacactgggtagccaaaccagtgcttggtctatcctgaaacacccttttaatcgcaattctacaattttgactaggcccggaatggaaatcaccaaggatggctttcacctagtaattgaactggaggacctcggccctcagtttgagtttctcgttgcgtattggcgccgtgagcccggtgcagaagaacggccttttccttggtactggccatgtctaccattgctggcctcatgttag

SEQ ID NO: 287314 - DNA, 1848 bp, Artificial Sequence
  derived and/or modified sequence
atgtctatcacatttcgctccgacttttctaacgaggaacggttcactgggttcgacgcccactacatggccgtggatgtggacgagtgcaaagagcgtgaagacgaagaattatcctgtgatcactattgccacaactatattggtggatattactgtagctgcaggttcggctacattctccacacggataatcggacctgtcgtgtcgaatgtagcgataatcttttcacacagcgtactggagttataacatctccggatttccccaatccatatcctaagagcagcgagtgtctgtatactatcgagttggaggaaggctttatggtgaatctgcagttcgaggatatatttgacattgaggatcaccccgaggtgccttgcccatacgactacattaagattaaagtcggcccaaaagtgctgggccccttttgcggagagaaagctccagagcccatatccacacaaagccactccgtcttgattctgttccactccgacaattcaggcgaaaaccgaggttggcgactgtcttacagagcggctggaaatgaatgccccgagctgcagcccccagtgcatggtaagattgagccatcccaagctaagtacttcttcaaagaccaggtcttggtgtcttgcgataccgggtacaaggtcctgaaagacaatgtcgagatggacacatttcagatagaatgtctgaaggacggcacctggagcaataaaatcccgacctgcaaaatagtggactgcagagccccaggagaactagagcatggtcttatcacgttcagtacacggaataaccttactacatacaaatctgaaattaagtactcatgccaagagccctattacaagatgttgaataataatacaggcatatatacttgctccgcccagggcgtttggatgaacaaggtgctgggaaggtcactgcctacctgcctccccgagtgtgggcagcccagtcgatcgctgccgagtctcgttaaacggatcatcggcggccggaacgctgagcctggtctgttcccatggcaggcactcatagtggtggaagacacctcccgagtcccaaacgacaaatggttcggctccggcgccctgctttccgcttcctggatcctaacagccgctcatgtcctgagatcacaaaggagagataccacagtgatccctgtgagtaaggagcacgttaccgtgtatctggggctgcatgatgttagggataagtccggtgccgtaaattccagcgcagcccgcgtcgtgcttcaccccgacttcaatatccagaactacaaccatgacatagcccttgtgcaactccaggaacccgttcccctgggcccccacgtcatgcctgtgtgcttgccacgactggagcctgagggtccagctccgcatatgctgggactggtggctggatggggcataagtaacccaaacgtaacagtcgatgaaatcatctcctcaggcacgaggactctcagtgatgtgttgcaatatgtgaaactacctgttgtacctcacgcagaatgtaagacgtcctacgagtctaggtctgggaattatagtgtcacagagaatatgttttgcgccgggtactacgaaggaggtaaggatacatgcctgggagatagcggcggcgcatttgtgatttttgacgatctttcccagaggtgggtggtgcaggggctggtctcatggggcgggcctgaagaatgcggcagtaaacaggtgtatggggtttatacaaaggtgtcaaactacgtggactgggtgtgggagcaaatgggcttgcctcagagtgtggtggagccccaagtagaacggtag

SEQ ID NO: 287315 - DNA, 249 bp, Artificial Sequence
  derived and/or modified sequence
atgttctgtgccgggtattacgaaggcggaaaggatacatgcctcggggactccggaggagctttcgtcatcttcgacgacctgtctcagcgatgggtggtgcaggggctcgtgtcctggggaggccccgaagaatgtggcagcaaacaggtgtacggggtctacaccaaggtctcaaactacgtggattgggtgtgggagcagatgggtctgcctcagtctgtggtcgagcctcaagttgaaaggtag

SEQ ID NO: 287316 - DNA, 1443 bp, Artificial Sequence
  derived and/or modified sequence
atgagcattactttccggtctgatttttcgaatgaggaaaggttcacagggtttgatgcccactatatggctgtggatgtagacgaatgcaaggagcgcgaagacgaggagctcagctgtgatcattactgccacaactacatcgggggctactactgttcatgcagatttgggtacatcctgcataccgataataggacatgtagagtggagtgctctgataacctcttcactcagcgcacaggcgtgatcacatctcccgatttccccaatccttaccctaagtcgtctgaatgcctgtataccatcgagctggaagagggcttcatggttaacctgcaattcgaagacatattcgatatcgaggatcatcccgaagtcccgtgcccatacgattacattaaaatcaaggtgggccccaaggtgttaggtccattctgtggggagaaggcccctgaacccatctccactcagtcccattccgtcctgatcctcttccatagcgataattctggtgagaaccgtggatggaggctgtcttaccgagcggccgggaatgaatgtccagaactgcagcctcctgtgcacggcaaaatcgagccctctcaggcaaagtacttttttaaagaccaggttttagtcagctgtgacaccgggtataaagtcctgaaggataacgtagaaatggataccttccagatcgagtgtcttaaggacgggacttggtcgaataaaattcccacttgtaagatcgttgattgtcgcgcccccggggagctggaacacggtctgatcaccttcagcacccggaacaatctcacaacatataagtccgagatcaagtactcatgtcaggagccatactataagatgctcaataataatacaggtatttacacttgtagtgcacaaggagtttggatgaataaggttctcggtcgcagcctgcctacgtgcctgccggaatgcgggcagcccagtcgttctttaccttcactggtcaaacggatcattgggggccggaacgccgagccgggtctttttccctggcaggcccttatcgtggtggaagacacctctcgagtgccaaatgataaatggtttggttcaggggcactactctctgcatcctggattctcaccgccgcgcatgtgttaaggtctcagcgccgagacacgacagtaattcccgtgtccaaggaacacgtgacagtttatctcggactacacgacgtgcgggacaagtcaggcgccgttaatagctccgcagcacgggtggtcctacaccccgactttaatatccaaaattacaatcacgacatagccctggttcagctccaggagccagtacctctgggaccccatgttatgccagtttgcctgcctaggcttgagcctcccgggggccgcttagggcacctgcagtcccagtgcgacagctag

SEQ ID NO: 287317 - DNA, 1848 bp, Artificial Sequence
  derived and/or modified sequence
atgagcatcaccttcagaagtgacttcagcaatgaggagcgcttcaccggctttgatgcccactacatggctgtggatgtggatgagtgcaaggagcgggaggatgaggagctgagctgtgaccactactgccacaactacatcggcggctactactgcagctgccgcttcggctacatcctgcacacagacaacagaacctgccgggtggagtgcagcgacaacctcttcacccagaggactggagtcatcaccagcccagacttccccaacccctaccccaagagcagcgagtgcctgtacaccatcgagctggaggagggcttcatggtgaacctgcagtttgaggacatctttgatattgaggaccaccctgaggtgccctgcccctatgactacatcaagatcaaggtgggccccaaggtgctgggccccttctgtggggagaaggcccctgagcccatcagcacccagagccacagcgtgctgatcctcttccacagcgacaacagcggagaaaatagaggctggaggctgagctacagagctgctggaaatgaatgtcctgagctgcagccccctgtgcacggcaagattgagcccagccaggccaagtacttcttcaaggaccaggtgctggtgtcctgtgacaccggctacaaggtgctgaaggacaacgtggagatggacaccttccagattgaatgtctgaaggatggcacctggagcaacaagatccccacctgcaagatcgtggactgccgggcccctggagagctggagcacggcctcatcaccttcagcaccaggaacaacctgaccacctacaagtctgagatcaagtacagctgccaggagccctactacaagatgctgaacaacaacacaggcatctacacctgcagcgcccagggcgtgtggatgaacaaggtgctgggccgcagcctgcccacctgcctgcctgaatgtggccagcccagccgcagcctgcccagcctggtgaagaggatcatcggcggcagaaatgctgagcccggcctcttcccctggcaggccctgattgtggtggaggacaccagccgggtgcccaatgacaagtggtttggcagcggggccctgctgagcgcctcctggatcctgacagctgcccacgtgctgcggagccagaggcgggacaccaccgtcatccctgtgtccaaggagcacgtgacagtgtacctgggcctgcatgatgtgcgggacaagagcggggctgtgaacagcagcgctgcccgggtggtgctgcacccagacttcaacatccagaactacaaccacgacatcgccctggtgcagctgcaggagcctgtgcccctgggcccccacgtgatgcctgtgtgcctgccccggctggagcctgagggccctgccccccacatgctgggcctggtggccggctggggcatcagcaaccccaacgtgacagtggatgagatcatcagcagcggcaccaggaccctgagtgatgtgctgcagtatgtgaagctgcctgtggtgccccatgctgagtgcaagaccagctatgagagccgcagcggcaactacagcgtgacagagaacatgttctgtgccggctactatgagggcggcaaggacacctgcctgggggacagcggcggggcctttgtgatctttgatgacctgagccagcgctgggtggtgcagggcctggtgtcctggggcggccctgaggagtgtggcagcaagcaggtgtatggagtgtacaccaaggtgagcaactacgtggactgggtgtgggagcagatgggcctgccccagagcgtggtggagccccaggtggagaggtag

SEQ ID NO: 287318 - DNA, 249 bp, Artificial Sequence
  derived and/or modified sequence
atgttctgtgccggctactatgaaggaggcaaggacacctgcctgggggacagcggcggggccttcgtcatctttgatgacctgagccagcgctgggtggtgcagggcctggtgtcctggggcggcccagaagaatgtggcagcaagcaggtgtatggagtgtacaccaaggtgagcaactacgtggactgggtgtgggagcagatgggcctgccccagagcgtggtggagccccaggtggagaggtag

SEQ ID NO: 287319 - DNA, 1443 bp, Artificial Sequence
  derived and/or modified sequence
atgagcatcaccttcagaagtgacttcagcaatgaggagcgcttcaccggctttgatgcccactacatggctgtggatgtggatgagtgcaaggagcgggaggatgaggagctgagctgtgaccactactgccacaactacatcggcggctactactgcagctgccgcttcggctacatcctgcacacagacaacagaacctgccgggtggagtgcagcgacaacctcttcacccagaggactggagtcatcaccagcccagacttccccaacccctaccccaagagcagcgagtgcctgtacaccatcgagctggaggagggcttcatggtgaacctgcagtttgaggacatctttgatattgaggaccaccctgaggtgccctgcccctatgactacatcaagatcaaggtgggccccaaggtgctgggccccttctgtggggagaaggcccctgagcccatcagcacccagagccacagcgtgctgatcctcttccacagcgacaacagcggagaaaatagaggctggaggctgagctacagagctgctggaaatgaatgtcctgagctgcagccccctgtgcacggcaagattgagcccagccaggccaagtacttcttcaaggaccaggtgctggtgtcctgtgacaccggctacaaggtgctgaaggacaacgtggagatggacaccttccagattgaatgtctgaaggatggcacctggagcaacaagatccccacctgcaagatcgtggactgccgggcccctggagagctggagcacggcctcatcaccttcagcaccaggaacaacctgaccacctacaagtctgagatcaagtacagctgccaggagccctactacaagatgctgaacaacaacacaggcatctacacctgcagcgcccagggcgtgtggatgaacaaggtgctgggccgcagcctgcccacctgcctgcctgaatgtggccagcccagccgcagcctgcccagcctggtgaagaggatcatcggcggcagaaatgctgagcccggcctcttcccctggcaggccctgattgtggtggaggacaccagccgggtgcccaatgacaagtggtttggcagcggggccctgctgagcgcctcctggatcctgacagctgcccacgtgctgcggagccagaggcgggacaccaccgtcatccctgtgtccaaggagcacgtgacagtgtacctgggcctgcatgatgtgcgggacaagagcggggctgtgaacagcagcgctgcccgggtggtgctgcacccagacttcaacatccagaactacaaccacgacatcgccctggtgcagctgcaggagcctgtgcccctgggcccccacgtgatgcctgtgtgcctgccccggctggagcccccaggcggccgcctgggccacctgcagagccagtgtgacagctag

SEQ ID NO: 287320 - DNA, 3900 bp, Artificial Sequence
  derived and/or modified sequence
tctctcaagggctgaagtcagccacacaggataaaggagggaagggaaggagcagatcttttcggtaggaagacagattttgttgtcaggttcctgggagtgcaagagcaagtcaaaggagagagagaggagagaggaaaagccagagggagagagggggagaggggatctgttgcaggcaggggaaggcgtgacctgaatggagaatgccagccaattccagagacacacagggacctcagaacaaagataaggcatcacggacaccacaccgggcacgagctcacaggcaagtcaagctgggaggaccaaggccgggcagccgggagcacccaaggcaggaaaatgaggtagaaactgaggaccaggtgctggcaaccttctgtggcagggagaccacagacacagagcagactcccggccaggaggtggtcctctcccctggctccttcatgtccatcactttccggtcagatttctccaatgaggagcgtttcacaggctttgatgcccactacatggctgtggatgtggacgagtgcaaggagagggaggacgaggagctgtcctgtgaccactactgccacaactacattggcggctactactgctcctgccgcttcggctacatcctccacacagacaacaggacctgccgagtggagtgcagtgacaacctcttcactcaaaggactggggtgatcaccagccctgacttcccaaacccttaccccaagagctctgaatgcctgtataccatcgagctggaggagggtttcatggtcaacctgcagtttgaggacatatttgacattgaggaccatcctgaggtgccctgcccctatgactacatcaagatcaaagttggtccaaaagttttggggcctttctgtggagagaaagccccagaacccatcagcacccagagccacagtgtcctgatcctgttccatagtgacaactcgggagagaaccggggctggaggctctcatacagggctgcaggaaatgagtgcccagagctacagcctcctgtccatgggaaaatcgagccctcccaagccaagtatttcttcaaagaccaagtgctcgtcagctgtgacacaggctacaaagtgctgaaggataatgtggagatggacacattccagattgagtgtctgaaggatgggacgtggagtaacaagattcccacctgtaaaattgtagactgtagagccccaggagagctggaacacgggctgatcaccttctctacaaggaacaacctcaccacatacaagtctgagatcaaatactcctgtcaggagccctattacaagatgctcaacaataacacaggtatatatacctgttctgcccaaggagtctggatgaataaagtattggggagaagcctacccacctgccttccagagtgtggtcagccctcccgctccctgccaagcctggtcaagaggatcattgggggccgaaatgctgagcctggcctcttcccgtggcaggccctgatagtggtggaggacacttcgagagtgccaaatgacaagtggtttgggagtggggccctgctctctgcgtcctggatcctcacagcagctcatgtgctgcgctcccagcgtagagacaccacggtgataccagtctccaaggagcatgtcaccgtctacctgggcttgcatgatgtgcgagacaaatcgggggcagtcaacagctcagctgcccgagtggtgctccacccagacttcaacatccaaaactacaaccacgatatagctctggtgcagctgcaggagcctgtgcccctgggaccccacgttatgcctgtctgcctgccaaggcttgagcctgaaggcccggccccccacatgctgggcctggtggccggctggggcatctccaatcccaatgtgacagtggatgagatcatcagcagtggcacacggaccttgtcagatgtcctgcagtatgtcaagttacccgtggtgcctcacgctgagtgcaaaactagctatgagtcccgctcgggcaattacagcgtcacggagaacatgttctgtgctggctactacgagggcggcaaagacacgtgccttggagatagcggtggggcctttgtcatctttgatgacttgagccagcgctgggtggtgcaaggcctggtgtcctgggggggacctgaagaatgcggcagcaagcaggtctatggagtctacacaaaggtctccaattacgtggactgggtgtgggagcagatgggcttaccacaaagtgttgtggagccccaggtggaacggtgagctgacttacttcctcggggcctgcctcccctgagcgaagctacaccgcacttccgacagcacactccacattacttatcagaccatatggaatggaacacactgacctagcggtggcttctcctaccgagacagcccccaggaccctgagaggcagagtgtggtatagggaaaaggctccaggcaggagacctgtgttcctgagcttgtccaagtctctttccctgtctgggcctcactctaccgagtaatacaatgcaggagctcaaccaaggcctctgtgccaatcccagcactcctttccaggccatgcttcttaccccagtggcctttattcactcctgaccacttatcaaacccatcggtcctactgttggtataactgagcttggacctgactattagaaaatggtttctaacattgaactgaatgccgcatctgtatattttcctgctctgccttctgggactagccttggcctaatccttcctctaggagaagagcattcaggttttgggagatggctcatagccaagcccctctctcttagtgtgatcccttggagcaccttcatgcctggggtttctctcccaaaagcttcttgcagtctaagccttatcccttatgttccccattaaaggaatttcaaaagacatggagaaagttgggaaggtttgtgctgactgctgggagcagaatagccgtgggaggcccaccaagcccttaaattcccattgtcaactcagaacacatttgggcccatatgccaccctggaacaccagctgacaccatgggcgtccacacctgctgctccagacaagcacaaagcaatctttcagccttgaaatgtattatctgaaaggctacctgaagcccaggcccgaatatggggacttagtcgattacctggaaaaagaaaagacccacactgtgtcctgctgtgcttttgggcaggaaaatggaagaaagagtggggtgggcacattagaagtcacccaaatcctgccaggctgcctggcatccctggggcatgagctgggcggagaatccaccccgcaggatgttcagagggacccactccttcatttttcagagtcaaaggaatcagaggctcacccatggcaggcagtgaaaagagccaggagtcctgggttctagtccctgctctgcccccaactggctgtataacctttgaaaaatcattttctttgtctgagtctctggttctccgtcagcaacaggctggcataaggtcccctgcaggttccttctagctggagcactcagagcttccctgactgctagcagcctctctggccctcacagggctgattgttctccttctccctggagctctctctcctgaaaatctccatcagagcaaggcagccagagaagcccctgagagggaatgattgggaagtgtccactttctcaaccggctcatcaaacacactcctttgtctatgaatggcacatgtaaatgatgttatattttgtatcttttatatcatatgcttcaccattctgtaaagggcctctgcattgttgctcccatcaggggtctcaagtggaaataaaccctcgtggataaccaa

SEQ ID NO: 287321 - DNA, 2428 bp, Artificial Sequence
  derived and/or modified sequence
aaagataaggcatcacggacaccacaccgggcacgagctcacaggcaagtcaagctgggaggaccaaggccgggcagccgggagcacccaaggcaggaaaatgaggtagaaactgaggaccaggtgctggcaaccttctgtggcagggagaccacagacacagagcagactcccggccaggaggtggtcctctcccctggctccttcatgtccatcactttccggtcagatttctccaatgaggagcgtttcacaggctttgatgcccactacatggctgtggatgtggacgagtgcaaggagagggaggacgaggagctgtcctgtgaccactactgccacaactacattggcggctactactgctcctgccgcttcggctacatcctccacacagacaacaggacctgccgagtggagtgcagtgacaacctcttcactcaaaggactggggtgatcaccagccctgacttcccaaacccttaccccaagagctctgaatgcctgtataccatcgagctggaggagggtttcatggtcaacctgcagtttgaggacatatttgacattgaggaccatcctgaggtgccctgcccctatgactacatcaagatcaaagttggtccaaaagttttggggcctttctgtggagagaaagccccagaacccatcagcacccagagccacagtgtcctgatcctgttccatagtgacaactcgggagagaaccggggctggaggctctcatacagggctgcaggaaatgagtgcccagagctacagcctcctgtccatgggaaaatcgagccctcccaagccaagtatttcttcaaagaccaagtgctcgtcagctgtgacacaggctacaaagtgctgaaggataatgtggagatggacacattccagattgagtgtctgaaggatgggacgtggagtaacaagattcccacctgtaaaattgtagactgtagagccccaggagagctggaacacgggctgatcaccttctctacaaggaacaacctcaccacatacaagtctgagatcaaatactcctgtcaggagccctattacaagatgctcaacaataacacaggtatatatacctgttctgcccaaggagtctggatgaataaagtattggggagaagcctacccacctgccttccagagtgtggtcagccctcccgctccctgccaagcctggtcaagaggatcattgggggccgaaatgctgagcctggcctcttcccgtggcaggccctgatagtggtggaggacacttcgagagtgccaaatgacaagtggtttgggagtggggccctgctctctgcgtcctggatcctcacagcagctcatgtgctgcgctcccagcgtagagacaccacggtgataccagtctccaaggagcatgtcaccgtctacctgggcttgcatgatgtgcgagacaaatcgggggcagtcaacagctcagctgcccgagtggtgctccacccagacttcaacatccaaaactacaaccacgatatagctctggtgcagctgcaggagcctgtgcccctgggaccccacgttatgcctgtctgcctgccaaggcttgagcctgaaggcccggccccccacatgctgggcctggtggccggctggggcatctccaatcccaatgtgacagtggatgagatcatcagcagtggcacacggaccttgtcagatgtcctgcagtatgtcaagttacccgtggtgcctcacgctgagtgcaaaactagctatgagtcccgctcgggcaattacagcgtcacggagaacatgttctgtgctggctactacgagggcggcaaagacacgtgccttggagatagcggtggggcctttgtcatctttgatgacttgagccagcgctgggtggtgcaaggcctggtgtcctgggggggacctgaagaatgcggcagcaagcaggtctatggagtctacacaaaggtctccaattacgtggactgggtgtgggagcagatgggcttaccacaaagtgttgtggagccccaggtggaacggtgagctgacttacttcctcggggcctgcctcccctgagcgaagctacaccgcacttccgacagcacactccacattacttatcagaccatatggaatggaacacactgacctagcggtggcttctcctaccgagacagcccccaggaccctgagaggcagagtgtggtatagggaaaaggctccaggcaggagacctgtgttcctgagcttgtccaagtctctttccctgtctgggcctcactctaccgagtaatacaatgcaggagctcaaccaaggcctctgtgccaatcccagcactcctttccaggccatgcttcttaccccagtggcctttattcactcctgaccacttatcaaacccatcggtcctactg

SEQ ID NO: 287322 - DNA, 1848 bp, Artificial Sequence
  derived and/or modified sequence
atgagcatcaccttccggagcgacttcagcaacgaggagcggttcaccggattcgacgcccactatatggccgtggacgtcgatgagtgtaaagagagagaagacgaagagctaagctgtgaccattattgtcacaactacattggaggctactactgttcatgtcgattcgggtatattctccataccgataataggacctgtagggtggagtgtagcgacaatctcttcacacagcgaaccggagtgatcaccagccccgacttccccaacccctatcctaagtcaagcgaatgcctgtatacaattgaactggaagagggtttcatggttaatctgcagtttgaagacatcttcgacattgaggatcatcccgaagtcccgtgtccttacgattacatcaagattaaggtcggccctaaagtcctgggcccattctgcggagagaaagcaccagagccaatatctacacagtcccactctgtgctgattctgttccattccgataattctggtgaaaacagggggtggagactctcatacagggctgccggtaacgagtgtcctgaattgcagccccccgtgcatggcaaaatagaaccatcccaggcgaaatatttttttaaggatcaggttttagtgtcctgcgatactggctataaggtgctcaaggataatgtggaaatggacacatttcagatcgagtgtctgaaagacggcacctggtctaacaagatccccacctgcaagattgtggactgtcgggcaccgggtgagttggagcacgggctcattacattcagcacccgtaataacctgaccacatacaaatcagaaattaagtactcttgtcaggagccctactacaaaatgcttaataacaacacggggatatacacctgtagtgcacagggggtatggatgaacaaggtgttagggcggtccctcccaacttgtctccccgagtgtgggcagccctcaagatctctgcccagcttggtgaaaaggattatcggcgggagaaacgccgagccaggtctgttcccttggcaggccctcatcgtggtggaagacacctccagggttccaaacgataaatggtttggctccggtgctttactttccgcctcatggatccttacagcagcccacgtgctcaggagccaaaggcgcgacaccacagtcatccccgtctcaaaggaacacgtaaccgtctacctggggttgcatgatgtcagggacaagagcggagcggtcaactcttccgctgctcgagttgtccttcatccagatttcaatatccaaaactataaccacgatatcgccctggtccagctgcaggaacctgtgcctttgggtcctcacgtcatgccggtgtgtttgcccaggcttgagcccgaaggtcccgcaccccacatgcttggccttgttgcaggttggggtatctcaaatcccaacgtgactgtggatgagattatctcaagcggcaccagaactctgtccgatgtgctccagtacgtgaagcttccggtcgttccccatgctgaatgcaagacatcttatgagagccggtccggaaactattccgtgacagagaacatgttctgtgcagggtactatgagggtgggaaagatacatgtctcggcgattctggaggggcctttgtgatttttgatgatctttctcagcggtgggtggtgcaggggcttgtgagctggggcggcccagaagaatgtggttcaaagcaggtttacggggtctatactaaggtgtccaactatgttgattgggtctgggaacagatgggcctcccccagtcagttgttgaaccccaggtggagaggtag

SEQ ID NO: 287323 - DNA, 249 bp, Artificial Sequence
  derived and/or modified sequence
atgttctgcgccggctactacgagggcggcaaggacacctgcctgggcgattccggaggagcttttgtgatctttgacgacttgtcacagcggtgggtggtgcaggggctggtctcctggggcgggcccgaagagtgtggtagcaaacaggtgtacggagtgtataccaaagtgtcgaactacgttgattgggtgtgggagcagatggggcttcctcagagcgtggtggagccccaggtcgaacgctag

SEQ ID NO: 287324 - DNA, 1443 bp, Artificial Sequence
  derived and/or modified sequence
atgagcatcaccttccggagcgacttcagcaacgaggagcggttcactggttttgatgcacactatatggccgtggatgtggacgaatgtaaagagagagaagacgaggagctgtcttgcgaccactactgccataattacattggaggatactattgcagttgcaggtttgggtatatactgcacaccgacaacaggacctgtcgggttgaatgctctgataacctgttcacccagcggaccggtgtgattactagcccagattttcccaacccatatccaaagtcctccgaatgcttatacacaatcgagctggaggagggattcatggtcaacttacagttcgaagacatttttgatatcgaagatcaccctgaagtgccgtgtccctatgattatatcaaaatcaaagttggacccaaggtgttggggcctttctgcggtgaaaaggcccctgaacctatcagcactcagagtcactcggtcttaatcctcttccattctgacaacagcggtgagaatcgcggttggcgcttgagctatagagctgccggcaatgaatgtccagaactgcaaccaccggtgcatgggaaaatcgaacctagccaggccaagtactttttcaaggaccaggttttggtttcctgcgatactggttacaaagtgctgaaggacaacgtcgagatggacacattccaaatcgagtgtctgaaagatggaacctggtccaataagattcctacgtgcaaaatagtggactgtcgggcccctggagaattggaacacgggctcattaccttttcaacccggaataacctgaccacatacaaatctgaaatcaagtactcatgtcaagagccttattacaagatgctcaataataatacgggaatatacacatgtagtgcacagggcgtttggatgaacaaagtgttgggccggagcctgcctacgtgtctgccagaatgcggacagccctcccggtctctccccagtttagtaaaaaggatcatcgggggtagaaatgcagaacccggtctgttcccatggcaagccctcatcgtagtagaggatacctctcgcgtaccgaacgataagtggttcggcagcggtgctctcctgtcagcatcttggattcttacagctgcacacgtccttcgcagtcagcggagggatacaactgtcattccagtcagtaaggagcatgttactgtttacttgggccttcacgacgtgagagacaagtctggcgctgtcaactcatcagcagctcgggtcgtgctgcacccagatttcaatattcaaaactacaatcatgatatcgcactcgtccaattacaggagccggtgcctttaggcccccacgtgatgcccgtttgcttaccaagactggagccccccggagggcggcttggtcacctgcagagccaatgcgatagttag

SEQ ID NO: 287325 - DNA, 1848 bp, Artificial Sequence
  derived and/or modified sequence
atgtcaattacgttccgatctgacttcagcaacgaggaaagattcaccgggttcgacgcccattatatggctgtggatgttgatgagtgcaaagagagagaggatgaagaattgtcttgcgatcactattgtcataactacatcgggggatactactgcagttgtcgttttggatatatccttcacacagataaccggacgtgccgggtggagtgtagcgataacctgtttacccagagaaccggcgtgataacatcccctgacttcccgaacccataccctaaaagttcagaatgtctttataccattgaactggaggagggattcatggtgaacttgcagttcgaggatatattcgacatcgaggaccatccagaggtcccgtgtccttatgactacattaaaattaaggttggcccaaaagtgctagggcctttttgcggggaaaaggcaccagaacccattagcactcagtcgcatagcgtcctgatcctctttcactcagacaatagcggcgaaaaccggggatggagattgagctacagggcagctggtaatgaatgccctgagttgcagcccccagtgcacggaaagattgagccttcccaggcgaagtacttcttcaaggaccaggtgctcgtgtcctgcgacaccgggtacaaggtgctcaaagacaacgtagaaatggatactttccagatcgagtgtctgaaagacgggacctggtcgaataagatccctacctgcaagatagttgactgtcgtgcccctggtgaattagaacacggcctgattaccttctcaactcgcaacaacctgaccacctataagtcggagatcaaatatagctgccaagagccctattataaaatgttaaataacaacactggtatatacacctgttccgcgcaaggcgtttggatgaataaggttttgggcaggtcccttcccacctgcctgccagaatgcggccagccctcccggtccttgcccagcctggttaagcgaatcatcggcggaagaaacgccgagcctggattgttcccatggcaagctttgattgtggtggaagacaccagtcgggtgcctaatgacaaatggttcgggtccggagccctgctgtcagcgagctggatcctgacagccgcacacgtccttagatctcaacgtagagacacgacagttatcccagtatccaaggagcacgttaccgtttacctaggtctccatgacgtgcgggacaaaagcggcgctgtcaatagctcagccgcaagggtcgtcctgcatccagactttaacattcagaattacaatcatgatatcgcactagtccagctgcaggaacccgtcccactggggccacacgtgatgcccgtgtgtctccctcgactggagccagaaggacctgcaccacacatgttgggccttgtggctggatggggaattagcaaccccaatgtgaccgtggacgagattatttcatccggcacgcggactttgagtgatgtattacagtatgtaaagctgccagtcgtcccacacgccgaatgcaaaacctcctacgaatcccgatctggtaactatagtgtcactgaaaatatgttttgcgctggctactacgaggggggaaaagacacatgcttgggagacagcgggggagcattcgtcatctttgacgacctgagccagcgatgggtcgttcaaggcctggtctcatggggcggtcccgaagagtgtggctcaaaacaggtgtatggggtgtatacaaaggtttcaaactacgtagattgggtttgggagcaaatgggactgccgcagagcgtggtcgaaccacaggtagaaaggtag

SEQ ID NO: 287326 - DNA, 249 bp, Artificial Sequence
  derived and/or modified sequence
atgttctgcgccggatactacgaaggcggaaaggacacttgtctaggggatagtggaggcgcatttgtgatctttgacgatctctcccagcgatgggtggttcaggggctggtctcatgggggggtcccgaagaatgtgggagcaagcaggtgtatggagtctacaccaaagtgtctaactacgtggattgggtctgggaacagatggggctccctcagtccgtcgtagaacctcaggtagagaggtag

SEQ ID NO: 287327 - DNA, 1443 bp, Artificial Sequence
  derived and/or modified sequence
atgtctatcacattccgaagtgacttcagtaacgaggagcgattcactggcttcgatgctcattacatggccgtcgacgtggacgagtgtaaggaaagggaggatgaggaattaagctgcgaccactactgccataactacatcggcggttattactgctcatgccggttcggttatatcttacacaccgacaatagaacctgccgagttgagtgttctgacaacctatttacacagcgcacaggcgtaattacaagccccgacttccccaatccatatcccaagtctagcgagtgtctatacaccatcgaacttgaagagggtttcatggttaacctgcaattcgaggacatctttgatatcgaggatcatccagaagtcccgtgtccctatgactatattaaaattaaggtgggaccaaaggtccttggaccattttgtggagagaaggcccctgagccaatcagcacacagtcccacagcgtgcttatcttatttcacagcgataacagtggcgaaaacagaggatggcggcttagttaccgggctgccggtaacgagtgcccggaactgcaacctcctgtgcacgggaaaatcgagccctctcaggcaaagtacttcttcaaagatcaagttcttgtgagctgcgataccggatacaaagtcctgaaggacaacgtggagatggacaccttccagattgagtgcctcaaggacggcacctggtccaataaaatcccaacgtgcaaaattgtcgactgtcgtgcgccaggtgaattggagcacggtctgatcactttctccaccaggaacaatctcactacatataagtccgaaatcaagtactcctgtcaggagccctattacaagatgctgaacaataacactggtatatatacatgttcagcccagggcgtgtggatgaacaaggttctgggaaggtccctgcctacatgcttgcccgagtgcggtcagccttctcgctctcttccttcccttgtgaagcgcataataggaggccgtaatgccgagccgggactgttcccttggcaggccctgatcgtcgtggaggacactagcagggtccccaatgacaagtggtttggcagtggcgctctgcttagcgcatcatggattctcacagcagctcacgtgctccgatcccagcgccgagacactacagtcattccagtttctaaagaacatgtgaccgtctatctgggtttacacgatgtcagagacaaatcaggagccgttaattccagtgctgcacgagtggtgttgcacccggactttaacatacaaaattacaatcatgacattgcactcgtgcagttgcaggagccggttccgctgggtcctcacgtgatgcccgtgtgcctccctaggctggaaccacctgggggtcggctcggccacctgcagtcccagtgcgacagttag

SEQ ID NO: 287328 - DNA, 1848 bp, Artificial Sequence
  derived and/or modified sequence
atgtcaattacatttagaagcgacttcagcaacgaggaaaggtttactggcttcgacgcccactatatggccgtggatgtcgatgagtgcaaagagcgggaggatgaagagctctcatgcgaccactactgccataattatatcggggggtactattgcagctgccgctttggatatatattgcatacggacaaccgtacctgcagggtagaatgcagcgataatctgtttacccagaggactggagtaattaccagccccgacttccccaacccctacccaaagagttcagagtgtctgtatactatcgagttagaagaaggtttcatggtgaatctccagtttgaggacatcttcgacatcgaagatcatcctgaagttccttgcccttacgactacatcaaaatcaaagttggaccgaaagtcctcgggcccttttgcggagaaaaagcgcccgagcctatttccacgcaatctcactctgttttaatattgtttcattccgacaactcaggagaaaatagaggatggagacttagctatagagcggctggcaacgagtgcccggaactgcagccaccagtccacggcaagattgaaccttcacaagcgaagtatttctttaaagaccaagtcctggtaagctgtgataccggttataaagttctcaaagacaatgtggagatggatacattccagatcgagtgcctgaaggatggaacttggtccaacaaaattccaacgtgtaagattgttgattgtcgagccccaggcgaactggaacacggcctaattacattttctactcggaacaatctgacgacatataaaagcgagatcaaatatagctgccaggaaccctattacaaaatgttaaacaataataccggaatctacacttgtagcgcccagggtgtgtggatgaataaagttctcgggagatcactccccacatgtcttccagagtgcggccagccaagccggagcctgccctccctcgtaaagcggattatcggcggtcgtaatgcagagcctggtctgtttccttggcaggcgcttattgtggtggaagacacttcccgcgtacctaatgataaatggttcggcagcggagctttgctgagcgcctcctggatccttacagctgcccacgtgttaagaagtcagcggagagacacaaccgtgatcccagtatccaaggaacacgttactgtctatctgggtctgcatgatgttagagacaaaagcggcgcagtcaacagcagcgccgcccgcgttgtgctgcaccccgatttcaatatccagaattacaatcatgatatcgctttggtgcagctacaggaaccagtgcctcttggacctcatgtgatgcctgtgtgcttgccaaggttggaacctgagggtccagctccacacatgctcgggctcgttgccgggtggggtatttctaaccctaatgttaccgtggacgagattataagttcaggtacaaggacactgtccgatgtactgcaatatgttaagctcccagtcgttccccacgcagagtgcaagacatcctatgagtcaagaagtggtaattactccgtgacagagaatatgttctgtgcagggtattatgagggaggcaaggatacgtgcttgggagatagcggaggggctttcgtgatattcgacgatctgagccagcgctgggttgtgcaaggactagtttcctggggagggcccgaggaatgcgggtcaaaacaagtctatggcgtttatacgaaggtctccaattatgtggattgggtctgggaacagatgggtctaccacagagtgtggtcgaaccccaagtggaacgctag

SEQ ID NO: 287329 - DNA, 249 bp, Artificial Sequence
  derived and/or modified sequence
atgttttgtgcagggtattacgaaggtggcaaagacacttgcctgggggattccggtggcgcgtttgtcatatttgatgatctgagtcaacgatgggtagtgcaaggactcgtgagctggggcggacccgaagaatgcggcagtaaacaggtatatggtgtttataccaaggtgtctaattatgtcgattgggtgtgggagcagatgggattacctcaatcggtcgtggagccccaggtggaaagatag

SEQ ID NO: 287330 - DNA, 1443 bp, Artificial Sequence
  derived and/or modified sequence
atgagcataaccttccgatcagacttcagcaatgaggagaggtttactggtttcgacgcccactatatggcagtggatgtcgacgaatgcaaggagcgagaggacgaagaactcagttgcgatcattattgtcacaattatataggcgggtattattgctcctgtcgctttggatacatcctgcacacagataatcgaacctgccgggtcgaatgtagtgataatctcttcacccagcgaaccggtgtgattacctcccccgactttccaaacccctatccaaagtcatctgaatgcttatatacaatcgaacttgaggagggcttcatggtcaacctgcaatttgaggacatctttgatattgaggaccatcctgaagtgccatgcccttacgactacattaagattaaggtcggtcctaaggtcctcggccccttttgcggcgaaaaagcgcctgaaccaatctcaacacaatcccattcagtgcttattctgtttcactcagacaattctggagaaaatcggggctggagactgtcttatcgggccgccggaaatgagtgtcctgaattgcagcctccagttcatggcaagatcgagccatctcaagccaaatacttcttcaaagatcaggtcctggtaagctgtgacaccgggtataaagtcttaaaggataacgtggagatggacacctttcagatcgaatgtctcaaggatggcacatggagtaacaagatccctacctgtaagatagtggactgcagagctcccggagagctggaacatggcctcattaccttcagcactcggaacaatcttacaacatataagtctgaaatcaagtattcatgtcaggagccttactataagatgctgaataacaataccggaatctacacctgctcagctcagggcgtttggatgaataaggtcttgggcagaagcctccccacatgcctgcccgagtgtggacaaccttcacggtctctgccatctttggtgaagcggataattggcgggcgcaacgctgagcccggcttatttccctggcaggccctaatagtggtggaagacactagtcgcgttcctaacgacaagtggttcggatcaggcgctcttctgagcgcaagttggattctcacagccgctcatgtgctacgaagtcaaagaagagacacgaccgtgatccctgtctctaaggaacacgtgaccgtctacctgggtctgcatgatgtgagagacaaatccggcgcagtgaacagctcagccgcaagagtagtgctgcaccctgacttcaacatccagaattataatcacgacatagccctagtccagctgcaagagcctgtgcctctgggcccacatgtaatgcccgtctgcctgcccaggttagaacctcccgggggaaggctgggacatctccaaagtcagtgcgactcctag

SEQ ID NO: 287331 - DNA, 1848 bp, Artificial Sequence
  derived and/or modified sequence
atgtccatcaccttcagatccgacttctccaatgaggaacgcttcaccggattcgacgctcattacatggccgtagacgtggacgaatgtaaagagagagaagacgaggaactgtcatgcgaccactattgtcacaactatattggcggctattattgcagttgtcggttcggctacatattgcacactgataatcgcacgtgcagagttgagtgttctgataatctgttcacacagaggaccggcgtcattacatcacctgactttcccaacccttatcccaaatccagcgaatgcctgtatactatcgagttagaagaaggtttcatggtgaatctccagtttgaggacatcttcgacatcgaagatcatcctgaagttccttgcccttacgactacatcaaaatcaaagttggaccgaaagtcctcgggcccttttgcggagaaaaagcgcccgagcctatttccacgcaatctcactctgttttaatattgtttcattccgacaactcaggagaaaatagaggatggagacttagctatagagcggctggcaacgagtgcccggaactgcagccaccagtccacggcaagattgaaccttcacaagcgaagtatttctttaaagaccaagtcctggtaagctgtgataccggttataaagttctcaaagacaatgtggagatggatacattccagatcgagtgcctgaaggatggaacttggtccaacaaaattccaacgtgtaagattgttgattgtcgagccccaggcgaactggaacacggcctaattacattttctactcggaacaatctgacgacatataaaagcgagatcaaatatagctgccaggaaccctattacaaaatgttaaacaataataccggaatctacacttgctcagcccaaggtgtgtggatgaacaaagttctcgggcgaagtctcccaacctgcctcccagagtgcggacaaccttcccgaagcctgccttctttggtcaaacggatcattggcggaaggaatgcagagcctggactgttcccttggcaagccctcatagttgtagaggatacttcgagagtccccaacgacaaatggttcggttccggggctttactcagcgcctcctggatattgacagcagcgcacgtcttacggagccagcgccgcgatactacagtgattccggtaagtaaggagcacgtgacagtttatctcggcttgcatgatgttagggacaagtctggagccgtcaacagtagtgcagctcgcgtcgtacttcatcctgattttaacattcaaaattataaccacgatatcgctcttgtacaacttcaggaacctgtgcctttaggccctcacgtgatgccagtgtgtctcccgcgactggaaccggagggccccgcccctcacatgctcggactagttgcgggctggggcataagtaatcccaatgtgactgttgatgaaatcataagttccggaacaagaaccttgagtgacgtgttgcagtatgtcaaactgcctgtggtgcctcatgctgaatgtaagacaagctacgaatctcgatctggaaactatagtgtgacagaaaacatgttctgtgcaggctactatgaaggcggtaaggacacttgcttaggcgatagcggaggggcctttgtgatatttgatgaccttagtcaaagatgggtggttcaaggcctggtgagctggggagggcccgaagaatgtggatcaaagcaagtgtatggagtatatacaaaagtctcgaactatgtggactgggtgtgggaacaaatgggcctccctcagtctgttgtagagcctcaagtagagcgttag

SEQ ID NO: 287332 - DNA, 1443 bp, Artificial Sequence
  derived and/or modified sequence
atgagcataaccttcagatcagacttttcgaacgaggaacgattcactggattcgacgctcattacatggccgtagacgtagatgaatgtaaagaaagagaggacgaagagctgtcttgtgaccactactgccacaattacatcggcggttactactgcagctgtagatttggatatattctccacactgacaaccgaacatgtagagtcgagtgctccgataatcttttcacccagcgcaccggagttattacctctcctgactttccaaatccctatcccaaatcttccgagtgcctttatacgatcgaactggaggaagggttcatggtcaacttacagtttgaagacatcttcgacatagaagaccaccccgaagtcccttgtccttacgactacataaaaatcaaggtcggccccaaagtgttgggtcccttctgtggagaaaaagctcccgagccaattagcacacagtctcacagcgtgcttatcctctttcattcagacaacagcggcgaaaacagaggttggcggttatcttacagagcagccggaaacgagtgtcccgagctccagcccccagtgcatggtaaaattgaaccatctcaggcaaagtacttcttcaaggaccaggttttagtcagctgcgacacagggtataaggtgttaaaagataatgtggaaatggacacctttcagatagagtgtctgaaggatgggacctggagtaataaaattcccacctgcaagattgtggactgtagggcccctggagagctggaacacggattaataaccttctctactcgcaacaatttaactacctataaaagtgaaattaaatattcatgtcaagagccctattacaagatgttgaataacaataccggcatttacacctgcagcgcccaaggagtgtggatgaacaaggtcttaggacgctcactcccgacctgcctgcctgagtgcggtcagccttccagatccttgccttccctcgtcaagaggatcatcggtgggcgcaacgctgaacctggcttgttcccctggcaggcactcatcgtagtcgaagatacctctcgggtccccaatgataaatggtttggatcaggggccttactgtccgcatcctggatcttgacagctgcccacgtactcagaagccagagaagagacaccaccgttattcccgtttctaaggagcacgtcaccgtttacctcggcctccatgatgtacgagataaaagtggcgcagtcaactcttcagccgccagggtggttttgcaccccgactttaatatccagaattacaatcacgatatagctctggttcagctgcaggaacctgtacccttgggtcctcacgtcatgcccgtatgcttgcctcgactagagccccccggaggaaggttgggtcatctccagtctcagtgtgattcttag

SEQ ID NO: 287333 - DNA, 1848 bp, Artificial Sequence
  derived and/or modified sequence
atgagcatcaccttcagaagcgacttcagcaacgaggagagattcaccggcttcgacgcccactacatggccgtggacgtggacgagtgcaaggagagagaggacgaggagctgagctgcgaccactactgccacaactacatcggcggctactactgcagctgcagattcggctacatcctgcacaccgacaacagaacctgcagagtggagtgcagcgacaacctgttcacccagagaaccggcgtgatcaccagccccgacttccccaacccctaccccaagagcagcgagtgcctgtacaccatcgagctggaggagggcttcatggtgaacctgcagttcgaggacatcttcgacatcgaggaccaccccgaggtgccctgcccctacgactacatcaagatcaaggtgggccccaaggtgctgggccccttctgcggcgagaaggcccccgagcccatcagcacccagagccacagcgtgctgatcctgttccacagcgacaacagcggcgagaacagaggctggagactgagctacagagccgccggcaacgagtgccccgagctgcagccccccgtgcacggcaagatcgagcccagccaggccaagtacttcttcaaggaccaggtgctggtgagctgcgacaccggctacaaggtgctgaaggacaacgtggagatggacaccttccagatcgagtgcctgaaggacggcacctggagcaacaagatccccacctgcaagatcgtggactgcagagcccccggcgagctggagcacggcctgatcaccttcagcaccagaaacaacctgaccacctacaagagcgagatcaagtacagctgccaggagccctactacaagatgctgaacaacaacaccggcatctacacctgcagcgcccagggcgtgtggatgaacaaggtgctgggcagaagcctgcccacctgcctgcccgagtgcggccagcccagcagaagcctgcccagcctggtgaagagaatcatcggcggcagaaacgccgagcccggcctgttcccctggcaggccctgatcgtggtggaggacaccagcagagtgcccaacgacaagtggttcggcagcggcgccctgctgagcgccagctggatcctgaccgccgcccacgtgctgagaagccagagaagagacaccaccgtgatccccgtgagcaaggagcacgtgaccgtgtacctgggcctgcacgacgtgagagacaagagcggcgccgtgaacagcagcgccgccagagtggtgctgcaccccgacttcaacatccagaactacaaccacgacatcgccctggtgcagctgcaggagcccgtgcccctgggcccccacgtgatgcccgtgtgcctgcccagactggagcccgagggccccgccccccacatgctgggcctggtggccggctggggcatcagcaaccccaacgtgaccgtggacgagatcatcagcagcggcaccagaaccctgagcgacgtgctgcagtacgtgaagctgcccgtggtgccccacgccgagtgcaagaccagctacgagagcagaagcggcaactacagcgtgaccgagaacatgttctgcgccggctactacgagggcggcaaggacacctgcctgggcgacagcggcggcgccttcgtgatcttcgacgacctgagccagagatgggtggtgcagggcctggtgagctggggcggccccgaggagtgcggcagcaagcaggtgtacggcgtgtacaccaaggtgagcaactacgtggactgggtgtgggagcagatgggcctgccccagagcgtggtggagccccaggtggagagatag

SEQ ID NO: 287334 - DNA, 249 bp, Artificial Sequence
  derived and/or modified sequence
atgttctgcgccggctactacgagggcggcaaggacacctgcctgggcgacagcggcggcgccttcgtgatcttcgacgacctgagccagagatgggtggtgcagggcctggtgagctggggcggccccgaggagtgcggcagcaagcaggtgtacggcgtgtacaccaaggtgagcaactacgtggactgggtgtgggagcagatgggcctgccccagagcgtggtggagccccaggtggagagatag

SEQ ID NO: 287335 - DNA, 1443 bp, Artificial Sequence
  derived and/or modified sequence
atgagcatcaccttcagaagcgacttcagcaacgaggagagattcaccggcttcgacgcccactacatggccgtggacgtggacgagtgcaaggagagagaggacgaggagctgagctgcgaccactactgccacaactacatcggcggctactactgcagctgcagattcggctacatcctgcacaccgacaacagaacctgcagagtggagtgcagcgacaacctgttcacccagagaaccggcgtgatcaccagccccgacttccccaacccctaccccaagagcagcgagtgcctgtacaccatcgagctggaggagggcttcatggtgaacctgcagttcgaggacatcttcgacatcgaggaccaccccgaggtgccctgcccctacgactacatcaagatcaaggtgggccccaaggtgctgggccccttctgcggcgagaaggcccccgagcccatcagcacccagagccacagcgtgctgatcctgttccacagcgacaacagcggcgagaacagaggctggagactgagctacagagccgccggcaacgagtgccccgagctgcagccccccgtgcacggcaagatcgagcccagccaggccaagtacttcttcaaggaccaggtgctggtgagctgcgacaccggctacaaggtgctgaaggacaacgtggagatggacaccttccagatcgagtgcctgaaggacggcacctggagcaacaagatccccacctgcaagatcgtggactgcagagcccccggcgagctggagcacggcctgatcaccttcagcaccagaaacaacctgaccacctacaagagcgagatcaagtacagctgccaggagccctactacaagatgctgaacaacaacaccggcatctacacctgcagcgcccagggcgtgtggatgaacaaggtgctgggcagaagcctgcccacctgcctgcccgagtgcggccagcccagcagaagcctgcccagcctggtgaagagaatcatcggcggcagaaacgccgagcccggcctgttcccctggcaggccctgatcgtggtggaggacaccagcagagtgcccaacgacaagtggttcggcagcggcgccctgctgagcgccagctggatcctgaccgccgcccacgtgctgagaagccagagaagagacaccaccgtgatccccgtgagcaaggagcacgtgaccgtgtacctgggcctgcacgacgtgagagacaagagcggcgccgtgaacagcagcgccgccagagtggtgctgcaccccgacttcaacatccagaactacaaccacgacatcgccctggtgcagctgcaggagcccgtgcccctgggcccccacgtgatgcccgtgtgcctgcccagactggagccccccggcggcagactgggccacctgcagagccagtgcgacagctag

SEQ ID NO: 287336 - RNA, 249 nt, Artificial Sequence
  derived and/or modified sequence
auguuuugugcaggguauuacgaagguggcaaagacacuugccugggggauuccgguggcgcguuugucauauuugaugaucugagucaacgauggguagugcaaggacucgugagcuggggcggacccgaagaaugcggcaguaaacagguauaugguguuuauaccaaggugucuaauuaugucgauugggugugggagcagaugggauuaccucaaucggucguggagccccagguggaaagauag

SEQ ID NO: 287337 - DNA, 1728 bp, Artificial Sequence
  derived and/or modified sequence
atggagaagatcatacaagttgctaaaacttcggcagctcagcatattcagagtatcatggccgccgctggtgtccctgtagttgagggttatcatggggaggatcagagcgaccagtgccttaaggaacacgcacgtcggattgggtaccccgtgatgatcaaagcagtccgggggggagggggaaaaggcatgcggatcgtccgctctgagcaggaatttcaggagcagctggagtccgcccgccgggaggcaaaaaagtccttcaacgacgacgctatgctgattgaaaagttcgtcgacactcccagacatgtcgaagtccaggtgtttggtgaccaccatggaaacgcggtctacctgttcgaaagggattgctcagttcagcggagacatcagaagattatcgaggaggcacccgcacccggtatcaaatctgaggtgaggaaaaagcttggcgaggctgccgtacgcgcagcaaaagcagtgaactatgtaggcgctggcaccgttgagttcattatggacagtaagcataacttctgtttcatggaaatgaatactcggttgcaggttgagcacccagttacagaaatgattactggcacagacttggttgaatggcagcttaggatcgccgcgggggagaagatcccactgtcacaggaggaaatcacccttcaaggacacgcctttgaggcgaggatctacgcagaggaccccagcaacaactttatgcctgtcgcaggacccctggtgcacctttccactcccagggcggacccctctacccgcatcgaaactggagttagacagggtgacgaggtgtcagtccattacgatcctatgatcgctaaactcgtggtttgggctgcagacaggcaagctgcactcaccaaactgcggtatagcttgcggcagtacaatatcgtgggcctgcacactaacatcgactttctgctgaaccttagcggccatcctgaatttgaagctggtaacgtccacactgactttatcccacaacaccataagcagctgctcctgtctcgaaaggcagccgccaaggagagcctgtgccaggcggcccttggcctgatcttaaaggaaaaagcgatgacagacacttttaccttgcaggctcacgaccagtttagccccttctcttcctctagtggccgacggctcaacatctcatatacacgaaatatgactctgaaagatggcaagaataacgtggcaatagctgtcacatacaaccacgacggatcatactctatgcagatagaggataagactttccaagtactgggaaatctctattcggagggagactgcacctatcttaaatgctcggtcaatggtgtggcaagtaaggctaagctcataatccttgagaacaccatttacctgttttccaaggaaggcagtatcgagattgatatccctgtccctaaatacctctcctcagtgagttcacaggaaactcaggggggcccactggcgcctatgacgggaaccatcgaaaaggtattcgtgaaagcgggcgataaggtcaaagcaggtgattcactaatggtgatgattgccatgaaaatggaacataccatcaagtcacctaaagacggaacggtgaagaaagttttctaccgagagggcgcacaggctaacagacataccccacttgttgaatttgaggaggaagagtccgataagagggagagcgagtag

SEQ ID NO: 287338 - DNA, 1281 bp, Artificial Sequence
  derived and/or modified sequence
atggaatttgctgagctctgtaaacaggagggaatcatattcatcgggccccctcccagtgctattcgagatatgggtattaaatcaacatcaaagtctattatggccgcagctggggtcccagttgtggaagggtatcatggcgaggatcaaagcgaccagtgcctcaaggagcacgcccggcggatcggatatcccgtgatgatcaaggccgttcgaggagggggaggcaaaggtatgaggattgtgcgctccgaacaggagttccaggagcagctggaatccgccaggagagaggcaaaaaaaagcttcaatgatgacgccatgttgattgagaagtttgtagatacccctcgccacgtggaggttcaggttttcggagatcaccatggtaacgcagtctacctatttgaaagagactgctcggtccaacgtcgtcaccagaagatcatcgaggaagcaccagccccaggcataaagagcgaagtgcggaagaaactgggcgaagcggcggtgagagccgccaaagctgtgaactacgtgggggcaggcactgtcgaattcatcatggactccaaacataacttttgttttatggagatgaacacccgcctgcaggtagaacaccctgtaactgaaatgatcaccggcaccgatctcgtcgagtggcagctacggatcgctgccggagaaaaaatccccctgtctcaggaagaaataaccctgcagggtcacgctttcgaggcccgcatctatgccgaggacccgagtaataatttcatgcccgttgccgggccactggttcacctgtcgacaccaagggcggatccaagcactcgtatagagacgggggtgcgccagggggatgaggtttctgtgcattatgatccaatgattgctaagctggttgtctgggccgccgacaggcaggccgcgctgacgaaactgagatactccctgaggcagtataacatcgtggggctccatacaaacattgattttctcctaaatctctctggccaccccgagtttgaggccggaaacgtgcataccgattttattccacagcaccacaagcagctgctgctgtcacggaaggccgccgctaaggagtctctctgtcaggcagctctcggtctaatcctgaaggagaaggccatgactgacacgttcactctgcaggcacatgaccagtttagcccattcagttcctcttccggtcgccgcctaaacatttcgtacactaggaacatgactctcaaagatggaaagaacaactag

SEQ ID NO: 287339 - DNA, 1728 bp, Artificial Sequence
  derived and/or modified sequence
atggagaagatcatccaggtggccaagaccagcgctgcccagcacatccagagcatcatggctgctgctggggtgcctgtggtggagggctaccacggggaggaccagagcgaccagtgcctgaaggagcacgcccggcgcatcggctaccctgtgatgatcaaggctgtgcggggcggcggcggcaagggcatgagaattgtgcgctctgagcaggagttccaggagcagctggagagcgcccggcgggaggccaagaagagcttcaatgatgatgccatgctgattgagaagtttgtggacacccccaggcatgtggaggtgcaggtgtttggagaccaccacggcaatgctgtgtacctgtttgagcgggactgcagcgtgcagaggaggcaccagaagatcatcgaggaggccccagcccctggcatcaagtctgaggtgaggaagaagctgggggaggccgctgtgcgggccgccaaggctgtgaactacgtgggcgccggcaccgtggagttcatcatggacagcaagcacaacttctgcttcatggagatgaacacccggctgcaggtggagcaccctgtgacagagatgatcactggaacagacctggtggagtggcagctgagaattgctgctggggagaagatccccctgagccaggaggagatcaccctgcagggccacgcctttgaggcccgcatctatgcagaggaccccagcaacaacttcatgcctgtggccggccccctggtgcacctgagcacccccagggctgaccccagcacccgcatcgagaccggggtgcggcagggagatgaggtgtctgtgcactatgaccccatgattgccaagctggtggtgtgggccgctgaccggcaggccgccctgaccaagctgcgctacagcctgcggcagtacaacatcgtgggcctgcacaccaacatcgacttcctgctgaacctgagcggccaccctgagtttgaagctggaaatgtgcacacagacttcatcccccagcaccacaagcagctgctgctgagcaggaaggctgctgccaaggagagcctgtgccaggccgccctgggcctcatcctgaaggagaaggccatgacagacaccttcaccctgcaggcccatgaccagttcagccccttcagcagcagcagtggaagaaggctgaacatctcctacaccaggaacatgaccctgaaggatggcaagaacaacgtggccatcgctgtgacctacaaccatgatggcagctacagcatgcagatcgaggacaagaccttccaggtgctgggcaacctgtacagcgagggggactgcacctacctgaagtgcagcgtgaatggagtggccagcaaggccaagctgatcatcctggagaacaccatctacctgttcagcaaggagggcagcattgaaattgacatccctgtgcccaagtacctgagctctgtgagcagccaggagacccagggcggccccctggcccccatgacaggcaccatcgagaaggtgtttgtgaaggccggggacaaggtgaaggccggggacagcctgatggtgatgattgccatgaagatggagcacaccatcaagagccccaaggatggcaccgtgaagaaggtgttctaccgggagggcgcccaggccaacagacacacccccctggtggagtttgaggaggaggagagtgacaagcgggagagcgagtag

SEQ ID NO: 287340 - DNA, 1281 bp, Artificial Sequence
  derived and/or modified sequence
atggagtttgctgagctgtgcaagcaggagggcatcatcttcatcggccccccacccagcgccatccgggacatgggcatcaagagcaccagcaagagcatcatggctgctgctggggtgcctgtggtggagggctaccatggagaggaccagagcgaccagtgcctgaaggagcacgccaggagaattggctaccctgtgatgatcaaggctgtgcggggcggcggcggcaagggcatgagaattgtgcgctctgagcaggagttccaggagcagctggagagcgcccggcgggaggccaagaagagcttcaatgatgatgccatgctgattgagaagtttgtggacacccccaggcatgtggaggtgcaggtgtttggagaccaccacggcaatgctgtgtacctgtttgagcgggactgcagcgtgcagaggaggcaccagaagatcatcgaggaggccccagcccctggcatcaagtctgaggtgaggaagaagctgggggaggccgctgtgcgggccgccaaggctgtgaactacgtgggcgccggcaccgtggagttcatcatggacagcaagcacaacttctgcttcatggagatgaacacccggctgcaggtggagcaccctgtgacagagatgatcaccggcacagacctggtggagtggcagctgagaattgctgctggggagaagatccccctgagccaggaggagatcaccctgcagggccacgcctttgaggcccgcatctatgcagaggaccccagcaacaacttcatgcctgtggccggccccctggtgcacctgagcacccccagggctgaccccagcaccagaattgaaacaggagtgcggcagggagatgaggtgtctgtgcactatgaccccatgattgccaagctggtggtgtgggccgctgaccggcaggccgccctgaccaagctgcgctacagcctgcggcagtacaacatcgtgggcctgcacaccaacatcgacttcctgctgaacctgagcggccaccctgagtttgaggccggaaatgtgcacacagacttcatcccccagcaccacaagcagctgctgctgagcaggaaggccgccgccaaggagagcctgtgccaggccgccctgggcctcatcctgaaggagaaggccatgacagacaccttcaccctgcaggcccatgaccagttcagccccttcagcagcagcagcggccggcggctgaacatctcctacaccaggaacatgaccctgaaggatggcaagaacaactag

SEQ ID NO: 287341 - DNA, 1860 bp, Artificial Sequence
  derived and/or modified sequence
agtggaggaacgggtttggcgtgtgggacgcagctgcctctgtactggggagtcacggagtggccgggctccagggacatggcggcggcctctgcggtgtcggtgctgctggtggcggcggagaggaaccggtggcatcgtctcccgagcctgctcctgccgccgaggacatgggtgtggaggcaaagaaccatgaagtacacaacagccacaggctatccatccaggatgcggttttctctcagaaaacatggaatttgctgaactttgtaagcaagaaggaattatttttataggccctcctccatctgcaattagagacatgggtataaagagcacatccaaatccataatggctgctgctggagtacctgttgtggagggttatcatggtgaggaccaatcagaccagtgcctgaaggaacacgccaggagaattggctatcctgtcatgattaaagccgtccggggtggaggaggaaaaggaatgaggattgttagatcagaacaagaatttcaagaacagttagagtcagcacggagagaagctaagaagtctttcaatgatgatgctatgctgatcgagaagtttgtagacacaccgaggcatgtagaagtccaggtgtttggtgatcaccatggcaatgctgtgtacttgtttgaaagagactgtagtgtgcagaggcgacatcagaagatcattgaggaggccccagcgcctggtattaaatctgaagtaagaaaaaagctgggagaagctgcagtcagagctgctaaagctgtaaattatgttggagcagggactgtggagtttattatggactcaaaacataatttctgtttcatggagatgaatacaaggctgcaagtggaacatcctgttactgagatgatcacaggaactgacttggtggagtggcagcttagaattgcagcaggagagaagattcctttgagccaggaagaaataactctgcagggccatgccttcgaagctagaatatatgcagaagatcctagcaataacttcatgcctgtggcaggcccattagtgcacctctctactcctcgagcagacccttccaccaggattgaaactggagtacggcaaggagacgaagtttccgtgcattatgaccccatgattgcgaagctggtcgtgtgggcagcagatcgccaggcggcattgacaaaactgaggtacagccttcgtcagtacaatattgttggactgcacaccaacattgacttcttactcaacctgtctggccacccagagtttgaagctgggaacgtgcacactgatttcatccctcaacaccacaaacagttgttgctcagtcggaaggctgcagccaaagagtctttatgccaggcagccctgggtctcatcctcaaggagaaagccatgaccgacactttcactcttcaggcacatgatcaattctctccattttcgtctagcagtggaagaagactgaatatctcgtataccagaaacatgactcttaaagatggtaaaaacaattgaagataaaactttccaagtccttggtaatctttacagcgagggagactgcacttacctgaaatgttctgttaatggagttgctagtaaagcgaagctgattatcctggaaaacactatttacctattttccaaggaaggaagtattgagattgacattccagtccccaaatacttatcttctgtgagctcacaagaaactcagggcggccccttagctcctatgactggaaccattgaaaaggtgtttgtcaaagctggagacaaagtgaaagcgggagattccctcatggttatgatcgccatgaagatggagcataccataaagtctc

SEQ ID NO: 287342 - DNA, 1728 bp, Artificial Sequence
  derived and/or modified sequence
atggagaagatcatccaggtggccaagaccagcgccgcccagcacattcagtcaatcatggctgctgccggtgtgccagtagtagaaggatatcatggcgaggatcagtccgaccagtgcttaaaagaacatgcaagaaggatcggttatcccgtgatgattaaagccgttaggggcggaggagggaagggcatgaggatcgtgcggtccgagcaggaatttcaagaacaacttgagtccgcccgccgtgaggccaaaaaatcctttaatgacgacgcgatgctcatcgaaaagtttgtggacacacccagacacgtggaggttcaggtctttggcgatcatcatgggaacgctgtatacttattcgaacgggattgttccgtccagcgtcgtcaccagaaaataatcgaggaggcacctgccccaggaatcaaaagtgaggtgagaaagaagctcggagaggcagctgtgcgggcggctaaggctgtgaactacgttggggcaggcaccgtggagtttatcatggacagcaagcataacttctgtttcatggagatgaacacccgacttcaggtcgagcaccctgttactgagatgatcacgggaaccgacctggtggagtggcagttgcggattgccgccggcgagaagatacccctcagccaggaagaaattacattgcagggtcatgccttcgaggcgaggatctatgccgaagacccatcaaacaacttcatgcccgttgcgggccccttggttcatctgtccaccccacgcgcagaccccagtactaggatagagacaggagttcgccagggggacgaagtctctgtgcattacgaccccatgattgccaaactggttgtgtgggctgcagacaggcaggcggcgctgactaaactcagatatagcctgcgacagtataacatcgtgggtcttcacacgaacatcgattttttgttgaaccttagcggacaccccgaattcgaggctggcaatgtacacactgactttattccccagcaccacaaacagttgttgctgagccgaaaagctgctgcaaaggaatccctttgccaggccgcactaggcctcattctaaaagaaaaagcaatgactgatactttcaccctgcaggctcacgaccagtttagcccattttcctcatcctccggccgccgattaaatatcagctatacaagaaacatgacccttaaagacggtaagaacaatgtggcgattgctgtcacctacaatcatgacggctcctactccatgcagattgaagataagactttccaggtgcttggtaatttgtactcggaaggagattgcacctatctcaaatgtagcgtaaacggagttgcttcaaaagcgaagttgatcattctggaaaatactatttacctcttcagcaaagagggaagcatagaaattgatattccagttcctaaatacctctcctcggttagttcacaggagacacaggggggacccctcgcacctatgactggcacaattgagaaagtgttcgtcaaggccggcgacaaagttaaagccggcgattcgctgatggtcatgatcgccatgaagatggaacatactattaaatcaccgaaagacgggactgttaaaaaggtgttttaccgcgagggggcccaagcgaacagacacacgcccctggtggaattcgaagaagaagaaagcgacaagcgtgagtccgagtag

SEQ ID NO: 287343 - DNA, 1281 bp, Artificial Sequence
  derived and/or modified sequence
atggagttcgccgagctgtgcaagcaggagggcatcatcttcatcggccctccaccttctgccatcagagacatgggcattaagtctactagcaagagtatcatggctgcggccggcgtacccgtcgtcgagggttaccacggagaggaccagtccgatcagtgcttaaaggagcacgctagaaggattggttacccagtgatgattaaggcggttcgtgggggcggaggcaaagggatgagaattgtcagaagtgaacaggagttccaggagcagctggagtcggcacgccgcgaggctaagaaaagctttaatgacgacgccatgctgatagagaagttcgttgacaccccaaggcacgtggaggttcaagtattcggcgatcaccacggaaatgctgtctatctttttgaaagggactgttctgtgcagcggcgccatcaaaagatcatcgaggaagccccggcgcctggaattaagtcagaggttagaaagaaactgggggaggccgcggtgcgggccgctaaggcagtcaactacgttggtgctggcactgttgagttcataatggactccaaacataatttctgttttatggaaatgaatacaaggctgcaggttgagcaccctgtcacagagatgattacagggacggacctcgtcgagtggcaactgcggatagccgcaggcgagaaaattcccctcagccaggaagagatcacactccagggacacgcttttgaagcccgtatttacgctgaagacccgtccaataattttatgccagttgcgggccccttagtacatctctctaccccgagggccgaccccagcaccaggatcgaaaccggtgtccgccagggtgacgaagtgagcgtccattacgacccgatgattgcaaaactggtcgtgtgggctgccgaccgacaagccgcgctcacaaaacttagatatagtctccggcaatataacattgttggactgcacactaacattgatttcctgcttaacctgtccggccaccctgagttcgaagccggtaatgtccacaccgacttcattcctcaacatcataagcaactgctgctgagtcggaaagccgcggccaaggagagcttgtgccaggcggccctggggctcatcttgaaagagaaagcaatgacggatacttttactctgcaagcccacgaccagttctctcctttctccagcagttcgggcaggcgccttaacatttcctacacccgaaatatgacccttaaggacggaaagaataattag

SEQ ID NO: 287344 - DNA, 1728 bp, Artificial Sequence
  derived and/or modified sequence
atggagaagatcattcaggtcgccaagacttcggctgcgcaacacattcagtccattatggcagccgctggagtgcctgttgtcgaaggctatcacggcgaagatcagtctgatcagtgtctgaaagagcacgccaggagaataggctatcctgtgatgattaaggcagtcaggggcggagggggtaaaggaatgagaatcgtgcgaagtgaacaggagtttcaggaacagttggaatcggcacggcgtgaggcaaagaagtcttttaacgatgacgcaatgctcatcgagaagttcgtggacactcccagacatgtggaggtgcaagtgtttggggaccaccacggcaatgccgtttatctttttgaaagagactgctctgttcaaagacggcatcagaagataattgaggaggcgccagctcctggaatcaaaagcgaggtgaggaaaaaactgggagaggccgcagtgcgagccgctaaggcagttaattacgtgggggctggcaccgtggaatttataatggactctaagcataatttttgcttcatggagatgaacactagactgcaagttgaacaccctgtcactgaaatgatcacaggcacggacctcgttgaatggcaactccgcatcgcagccggtgagaagattcctctgtcccaggaggaaatcactttacagggccacgctttcgaggctaggatttacgcagaagatccatcgaacaactttatgcctgtggcgggaccgcttgtccacttgtccacacctcgggcagatccttccaccagaattgaaaccggtgtgaggcaaggggacgaagtgagcgtgcactatgatcccatgatagctaagctcgtggtctgggccgctgacaggcaggccgctttaaccaaactgcgatactctctgcgacaatacaatattgtgggtttgcacactaacatagattttcttcttaatctcagtggccatcctgagtttgaggccggaaacgtgcatactgactttatcccccagcaccacaagcagctgctcctgtctcgcaaagcggctgcaaaggagagcctgtgtcaggcggctctgggcctgatcttaaaggagaaggccatgacagatacctttacactgcaggcccacgatcaatttagcccattcagctcgagtagtggcagacgactgaacatcagctatactagaaacatgaccctgaaggacggtaaaaataacgtggccattgctgtgacgtacaatcatgatgggagttacagcatgcagatcgaggataaaaccttccaggtgcttggcaacctgtactctgaaggcgattgcacgtacctgaaatgttctgttaatggtgtggcaagcaaggccaaactgattatcctcgagaacacaatataccttttttctaaagagggatctatcgagattgatattcctgtacctaagtacctaagctccgtatcatcccaggagactcaggggggtccactggcccctatgactggtacaatagagaaagtgttcgtcaaggctggggataaagtgaaggccggagatagtttgatggttatgattgcaatgaaaatggagcataccatcaagagtcccaaggatggaactgtcaagaaggttttttaccgggagggagcccaggccaataggcacacaccactggtcgagttcgaagaggaggaaagcgataaaagagagagcgaatag

SEQ ID NO: 287345 - DNA, 1281 bp, Artificial Sequence
  derived and/or modified sequence
atggagtttgctgagctctgcaaacaagagggcataatcttcatcgggcctccaccctccgccatccgagatatggggattaagtccacatcaaagagtatcatggcagctgccggtgtgccagtggttgaaggctatcacggcgaggaccagtctgaccagtgcttgaaagaacatgcccgtagaatcggctaccccgttatgatcaaagctgtcagaggaggcggagggaaggggatgaggatagtgagatccgagcaggaattccaggagcagctcgaatccgcaagacgggaagcaaaaaaaagcttcaacgatgatgcgatgctgatagagaagttcgtggatacacctcggcatgttgaggtccaggtgttcggcgaccaccacggcaacgccgtgtacctctttgaacgggactgttccgtacaacggagacatcagaaaatcattgaggaagcgcctgctcctgggatcaagagcgaggtgaggaagaagctgggcgaggcagctgttcgggctgccaaggctgtgaattatgtaggagccggaacagtggaatttatcatggatagcaaacacaacttctgttttatggagatgaatacgcgcttgcaggtggaacatcctgtgactgagatgattacaggaacagaccttgtggagtggcagttgcgaattgcggctggagagaaaattccgttaagtcaagaagaaatcactctccaggggcacgctttcgaggcacggatttacgccgaagatccctctaacaacttcatgcccgtggcaggacctctggtccatttgtctacgcccagggcggatccgtccacccgcattgaaaccggggttaggcagggggatgaggtttccgtgcattacgacccaatgattgccaagctggtagtgtgggccgcagaccgccaagccgctttgacaaagttacggtacagcctgcggcagtacaatatcgtaggattacacactaacatcgatttcctgctgaacttgagtggtcatcccgagttcgaggccggaaatgtgcacacggacttcattcctcagcaccacaagcagctcctcttatctagaaaggcggctgccaaggagagcctgtgccaggccgctctcggactcatacttaaggaaaaagccatgacggacacattcactctgcaggcacacgaccagttttcccccttctcgtcctctagcggtcgcaggctgaacatctcatacacaagaaacatgaccctgaaagatggaaagaataattag

SEQ ID NO: 287346 - DNA, 1728 bp, Artificial Sequence
  derived and/or modified sequence
atggagaagatcatccaggtggccaagaccagcgccgcccagcacatccagagcatcatggccgccgccggcgtgcccgtggtggagggctaccacggcgaggaccagagcgaccagtgcctgaaggagcacgccagaagaatcggctaccccgtgatgatcaaggccgtgagaggcggcggcggcaagggcatgagaatcgtgagaagcgagcaggagttccaggagcagctggagagcgccagaagagaggccaagaagagcttcaacgacgacgccatgctgatcgagaagttcgtggacacccccagacacgtggaggtgcaggtgttcggcgaccaccacggcaacgccgtgtacctgttcgagagagactgcagcgtgcagagaagacaccagaagatcatcgaggaggcccccgcccccggcatcaagagcgaggtgagaaagaagctgggcgaggccgccgtgagagccgccaaggccgtgaactacgtgggcgccggcaccgtggagttcatcatggacagcaagcacaacttctgcttcatggagatgaacaccagactgcaggtggagcaccccgtgaccgagatgatcaccggcaccgacctggtggagtggcagctgagaatcgccgccggcgagaagatccccctgagccaggaggagatcaccctgcagggccacgccttcgaggccagaatctacgccgaggaccccagcaacaacttcatgcccgtggccggccccctggtgcacctgagcacccccagagccgaccccagcaccagaatcgagaccggcgtgagacagggcgacgaggtgagcgtgcactacgaccccatgatcgccaagctggtggtgtgggccgccgacagacaggccgccctgaccaagctgagatacagcctgagacagtacaacatcgtgggcctgcacaccaacatcgacttcctgctgaacctgagcggccaccccgagttcgaggccggcaacgtgcacaccgacttcatcccccagcaccacaagcagctgctgctgagcagaaaggccgccgccaaggagagcctgtgccaggccgccctgggcctgatcctgaaggagaaggccatgaccgacaccttcaccctgcaggcccacgaccagttcagccccttcagcagcagcagcggcagaagactgaacatcagctacaccagaaacatgaccctgaaggacggcaagaacaacgtggccatcgccgtgacctacaaccacgacggcagctacagcatgcagatcgaggacaagaccttccaggtgctgggcaacctgtacagcgagggcgactgcacctacctgaagtgcagcgtgaacggcgtggccagcaaggccaagctgatcatcctggagaacaccatctacctgttcagcaaggagggcagcatcgagatcgacatccccgtgcccaagtacctgagcagcgtgagcagccaggagacccagggcggccccctggcccccatgaccggcaccatcgagaaggtgttcgtgaaggccggcgacaaggtgaaggccggcgacagcctgatggtgatgatcgccatgaagatggagcacaccatcaagagccccaaggacggcaccgtgaagaaggtgttctacagagagggcgcccaggccaacagacacacccccctggtggagttcgaggaggaggagagcgacaagagagagagcgagtag

SEQ ID NO: 287347 - DNA, 1281 bp, Artificial Sequence
  derived and/or modified sequence
atggagttcgccgagctgtgcaagcaggagggcatcatcttcatcggccccccccccagcgccatcagagacatgggcatcaagagcaccagcaagagcatcatggccgccgccggcgtgcccgtggtggagggctaccacggcgaggaccagagcgaccagtgcctgaaggagcacgccagaagaatcggctaccccgtgatgatcaaggccgtgagaggcggcggcggcaagggcatgagaatcgtgagaagcgagcaggagttccaggagcagctggagagcgccagaagagaggccaagaagagcttcaacgacgacgccatgctgatcgagaagttcgtggacacccccagacacgtggaggtgcaggtgttcggcgaccaccacggcaacgccgtgtacctgttcgagagagactgcagcgtgcagagaagacaccagaagatcatcgaggaggcccccgcccccggcatcaagagcgaggtgagaaagaagctgggcgaggccgccgtgagagccgccaaggccgtgaactacgtgggcgccggcaccgtggagttcatcatggacagcaagcacaacttctgcttcatggagatgaacaccagactgcaggtggagcaccccgtgaccgagatgatcaccggcaccgacctggtggagtggcagctgagaatcgccgccggcgagaagatccccctgagccaggaggagatcaccctgcagggccacgccttcgaggccagaatctacgccgaggaccccagcaacaacttcatgcccgtggccggccccctggtgcacctgagcacccccagagccgaccccagcaccagaatcgagaccggcgtgagacagggcgacgaggtgagcgtgcactacgaccccatgatcgccaagctggtggtgtgggccgccgacagacaggccgccctgaccaagctgagatacagcctgagacagtacaacatcgtgggcctgcacaccaacatcgacttcctgctgaacctgagcggccaccccgagttcgaggccggcaacgtgcacaccgacttcatcccccagcaccacaagcagctgctgctgagcagaaaggccgccgccaaggagagcctgtgccaggccgccctgggcctgatcctgaaggagaaggccatgaccgacaccttcaccctgcaggcccacgaccagttcagccccttcagcagcagcagcggcagaagactgaacatcagctacaccagaaacatgaccctgaaggacggcaagaacaactag

SEQ ID NO: 287348 - protein, 340 aa, Artificial Sequence
  derived and/or modified sequence
MSELEQLRQEAEQLRNQIQDARKACNDATLVQITSNMDSVGRIQMRTRRTLRGHLAKIYAMHWGYDSRLLVSASQDGKLIIWDSYTTNKMHAIPLRSSWVMTCAYAPSGNYVACGGLDNICSIYNLKTREGNVRVSRELPGHTGYLSCCRFLDDSQIVTSSGDTTCALWDIETAQQTTTFTGHSGDVMSLSLSPDMRTFVSGACDASSKLWDIRDGMCRQSFTGHVSDINAVSFFPNGYAFATGSDDATCRLFDLRADQELLLYSHDNIICGITSVAFSKSGRLLLAGYDDFNCNVWDTLKGDRAGVLAGHDNRVSCLGVTDDGMAVATGSWDSFLRIWN

SEQ ID NO: 287349 - protein, 79 aa, Artificial Sequence
  derived and/or modified sequence
MSELEQLRQEAEQLRNQIQDARKACNDATLVQITSNMDSVGRIQMRTRRTLRGHLAKIYAMHWGYDSRLLVSASQDGKL

SEQ ID NO: 287350 - DNA, 1023 bp, Artificial Sequence
  derived and/or modified sequence
atgagtgagctagaacagctgaggcaggaggctgagcagctgcggaaccagattcaggacgccagaaaggcctgtaatgacgccacactggtccagattacgtcaaacatggactccgtgggccgcattcagatgcggacccgtcgtacacttagaggccacctcgcaaagatctatgccatgcattggggatacgactccaggctccttgtctcagcttctcaggacggcaaactgatcatctgggattcttacaccacaaataaaatgcacgcgattccactgcgcagttcctgggtgatgacctgcgcttacgccccttcggggaactacgtggcctgtggtggtctggataacatttgttccatctataaccttaaaactagagaaggtaatgtgcgcgtttcacgggaactgcccggccacacgggatatctaagctgttgccgcttcctcgatgactctcagattgttacatcttctggtgacaccacatgcgctctgtgggatattgagaccgcgcagcagaccactacctttacgggccacagcggggacgtgatgtccctgtcactgagtccagatatgaggacattcgtatcgggagcgtgcgatgcctcgtccaaattgtgggacatccgcgacgggatgtgtcggcaaagctttacagggcacgtatctgatattaacgccgtttcattcttccctaacggatatgccttcgccactgggagtgacgatgctacatgccggctcttcgacctgcgtgccgaccaggaattgctgctgtatagccacgacaatatcatttgcgggattaccagcgtggcattcagcaaatctggacgactcctcctagctggctacgacgattttaactgtaatgtatgggacacactgaagggagatcgcgcaggtgtcctcgccggacacgacaaccgggttagttgcctcggggtaaccgacgacggaatggccgtggccacgggaagctgggattcctttcttaggatctggaattag

SEQ ID NO: 287351 - DNA, 1023 bp, Artificial Sequence
  derived and/or modified sequence
atgtccgagctggaacagctccggcaggaggcagagcaacttcgcaatcagatccaggatgcaaggaaggcctgtaacgacgcaacactggtacagatcacctcgaacatggacagtgtggggagaatacaaatgagaacaaggagaaccctcaggggtcacctggccaagatttatgccatgcactggggctacgacagtcgtctgctcgtgtcggcaagccaggacggcaaactcattatctgggattcctacaccacaaacaagatgcacgccatcccactacgttcttcatgggttatgacgtgtgcctatgccccttctggcaactatgtggcctgtgggggactggacaacatttgttctatatataatctgaaaactcgagagggcaacgtgcgagtgtcccgcgagctaccggggcacacagggtacctctcctgttgccggtttctggacgattcgcagatcgtgaccagttcaggtgacacaacctgcgccctctgggatatcgagacagctcagcaaaccaccaccttcaccgggcacagtggagacgtgatgagcctctcattgagccccgacatgcgaacatttgtgtctggcgcttgcgacgctagttcaaagctctgggacattagagacggtatgtgtcggcagtccttcacgggtcacgtgtcagatatcaacgccgtatcattcttccccaacggatacgcattcgcgactggatctgatgatgcgacatgtcgcctctttgacctgcgcgccgaccaggaactgctgctgtattcacatgataatattatttgcggtattaccagcgtggccttcagtaaatctgggagactcttactggctggttatgatgatttcaattgcaacgtgtgggatactctcaaaggggaccgagccggcgtcctcgctggtcacgacaatcgggtatcatgtctgggggtcaccgacgatggcatggctgttgctaccggaagctgggattcattccttagaatctggaactag

SEQ ID NO: 287352 - DNA, 3321 bp, Artificial Sequence
  derived and/or modified sequence
ccccggcacgtccccgccgggcccgcgcgcctcgtgcctcgcgcctcgcgcctccagccacgtccccgccccggctccggcgcgccgcggagttggctgctgggaggtgcgggactgggtgtggccggcggctctggtctcggctgtgagctgcgctctccacgccggctccgcgctccaggggctgctgagcgcccagcggacaccggcagcgcgcggtcgacgcgggcctgagctccctccagctgttttcactcattagctcctgaggtaaacaaattgaaaaaatgagcgaactggaacagttgaggcaagaagcagaacaactgcggaatcagattcaggatgctcggaaagcatgtaatgatgcaacgcttgttcagattacatcaaatatggactctgtgggtcgaatacaaatgcgaacaagacgtacactgaggggccacctagctaaaatctatgctatgcattggggatacgattccaggctgctagtcagtgcttctcaagatggaaaattaattatttgggatagctatacaacaaataagatgcatgctattcctttgaggtcctcctgggtgatgacctgtgcttatgctccctctggtaattatgttgcctgtggaggcttggacaacatctgctctatatataacttaaagaccagagagggaaatgtgagagtaagccgagagttgccaggtcacacagggtacttgtcctgctgtcgttttttagatgacagccaaattgttacaagttcaggagatacaacttgtgctttatgggacatcgaaactgcccagcagaccaccacattcactgggcattctggagatgtgatgagtctttctttgagtcctgacatgaggacttttgtttctggtgcttgtgatgcctcttccaaattatgggatattcgagatggaatgtgtagacagtctttcacgggacatgtctcagatatcaatgctgtcagttttttcccaaatggatatgccttcgccactggctctgatgatgccacttgccggctctttgaccttcgtgcagatcaagagttattattgtattctcatgacaatatcatctgtggaatcacttctgtagccttctcaaaaagtgggcgtctcttgttggctggttacgatgactttaattgtaatgtatgggacacgctaaaaggagatcgtgcaggtgtccttgctggtcatgacaaccgtgtgagctgcttaggtgtaactgatgatggcatggctgtggcaacaggctcttgggacagttttcttagaatctggaattaacagtgtcatacatatttgttctccattgatatatctggagaaatcaatgctacagcctatagctgtgaaaaaattctaccttatatttgcaggtgaagatttttctattagattatctacaaaaacaagctttcagtaaactaccaaaaaaaaagtgggggtggaggaaaaaaggcaaaggcgccttctgagatcaaaaggaccagtgtattaatttgaggggttgggttattttaaccttggtgaattgttgtgtgtactcagagtgtattttctttgtgtagaacagaatgtacacattatagcagctcgccattgtgtttgcattttttaagaagtacatttttaactttgtatacacaagaaatgtcatatttttgagttttgtaatggaagaaccaggcacagaaacagacagaaatgatactgtatgtgtgtgtatttatgtctgaagaaagtccccttgaattctgatatctctttgaatctaagagatcctgatagcttcatgtttaagagcattgacaggtggggcacctctgaggggagttcattgtttctcatgcatcatttgccatatactattaatcaaagtgcttgctttcagtcctttgaggggacagataatctgaaggccagagattagagatttcactgatattttggacatacataagaaacatcattataattaataaaaagtaggtaatagcatataaatggttcttgacattttaaaagcctggttatgatcagttgacactttgagtacccccctaaatagctggactttccttttcatttcatatttggaactaagtttgtagcgtatactcatctttcagaagtttggtaaacattgggattgtccctgcatctgaacatctttcccagtgctatcagtatacatctagagaggaaatgcaatgtgacagtgttacatttggagagaagtgtgaaatctaaccaatcgctagcacatatttgttgtaatacggtggtttatttcatgtttgcatactataaaatctgaattgatgtgaaatatctgtgcctttaaatttcttaaacctttaagctttttgttctgttttgcaacattttgtagtatttcttcccttccttagcacaaaatactggtttctaagtggttttgcttcaaaggatgtctagatgtaagtgattccacttaaagccaaaataaaaattcctaaagcagttcttaaaggagttagagagctatattaaacagtttttctgtggtataataatgtgtctcttactagaagtcccccacgaccaagttaaagatacttttcctgttggattctcttttacaaataagtctaaatgactgataatagaagattgttagtcttgcttgatggtaaagtcttggattattctgatatatagacgtgcattgttttgtaacttagttacttttcagataggtctgtgttaacttttgaacatgtgtaacttaacctaaatactcccaaactttacctctaaatttttgtttttatgttgtgaatgtgctaatatgtgcatcaactgtaaagatgtatcagttttattaaaatcagttgacaattagaataataaagtggataaaggcaaattaagatataggaccaaaacagaatattgtagatggcagttatgaatgtatatttatattttgattaagatttctattaactttttggctgggcagagtggcttacacctataatcccagcaatttgggaggccaaggtgggcagatcacttgaggtcaggagttcgcgaccagcctacccaacatggtgaaaccccatctcttctaaaaatacaaacattagccgggcgtggtggcacattcctgtaatcccagctactcgggaggctgaggcaggagattcgcctgaacccgggaggcagaggttgcagtgagccgagattgtgccactgcactccagcctaggcgacagagtgagactccatctcaaattggaaaaaaaaaaaa

SEQ ID NO: 287353 - DNA, 1360 bp, Artificial Sequence
  derived and/or modified sequence
agctgccacgcgggaactggccccacgaccgccggcgcaggcacttcccgggcggtccagaccgctcgccccggggagcgaggaacggtcggcggtccaagtcctgcagacccccctggtttctcgtcactccccgaggcctccttccaggaactcagagcacgagcccctgttttcactcattagctcctgaggtaaacaaattgaaaaaatgagcgaactggaacagttgaggcaagaagcagaacaactgcggaatcagattcaggatgctcggaaagcatgtaatgatgcaacgcttgttcagattacatcaaatatggactctgtgggtcgaatacaaatgcgaacaagacgtacactgaggggccacctagctaaaatctatgctatgcattggggatacgattccaggctgctagtcagtgcttctcaagatggaaaattaattatttgggatagctatacaacaaataagatgcatgctattcctttgaggtcctcctgggtgatgacctgtgcttatgctccctctggtaattatgttgcctgtggaggcttggacaacatctgctctatatataacttaaagaccagagagggaaatgtgagagtaagccgagagttgccaggtcacacagggtacttgtcctgctgtcgttttttagatgacagccaaattgttacaagttcaggagatacaacttgtgctttatgggacatcgaaactgcccagcagaccaccacattcactgggcattctggagatgtgatgagtctttctttgagtcctgacatgaggacttttgtttctggtgcttgtgatgcctcttccaaattatgggatattcgagatggaatgtgtagacagtctttcacgggacatgtctcagatatcaatgctgtcagttttttcccaaatggatatgccttcgccactggctctgatgatgccacttgccggctctttgaccttcgtgcagatcaagagttattattgtattctcatgacaatatcatctgtggaatcacttctgtagccttctcaaaaagtgggcgtctcttgttggctggttacgatgactttaattgtaatgtatgggacacgctaaaaggagatcgtgcaggtgtccttgctggtcatgacaaccgtgtgagctgcttaggtgtaactgatgatggcatggctgtggcaacaggctcttgggacagttttcttagaatctggaattaacagtgtcatacatatttgttctccattgatatatctggagaaatcaatgctacagcctatagctgtgaaaaaattctaccttatatttgcaggtgaagatttttctattagattatctacaaaaac

SEQ ID NO: 287354 - DNA, 1023 bp, Artificial Sequence
  derived and/or modified sequence
atgtctgagctggagcagctgcggcaggaggccgagcagctgaggaaccagatccaggatgccaggaaggcctgcaatgatgccaccctggtgcagatcaccagcaacatggattctgtgggccgcatccagatgaggaccaggaggaccctgcggggccacctggccaagatctatgccatgcactggggctatgacagccggctgctggtgtctgccagccaggacggcaagctgatcatctgggacagctacaccaccaacaagatgcacgccatccccctgcggagctcctgggtgatgacctgtgcctatgcccccagcggcaactacgtggcctgtggcggcctggacaacatctgcagcatctacaacctgaagacccgggagggcaatgtgcgggtgtcccgggagctgcccggccacacaggctacctgagctgctgccgcttcctggatgacagccagatcgtgaccagcagcggggacaccacctgtgccctgtgggacattgaaacagcccagcagaccaccaccttcaccggccacagcggagatgtgatgagcctgagcctgagcccagacatgaggacctttgtgtctggggcctgtgatgccagcagcaagctgtgggacatcagagatggcatgtgccggcagagcttcaccggccacgtgtctgacatcaatgctgtgtccttcttccccaacggctacgcctttgccactggaagtgatgatgccacctgccgcctgtttgacctgcgggctgaccaggagctgctgctgtacagccatgacaacatcatctgtggcatcacctctgtggccttcagcaagagcggccgcctgctgctggccggctatgatgacttcaactgcaatgtgtgggacaccctgaagggggacagagctggggtgctggccggccatgacaacagagtgtcctgcctgggcgtgacagatgatggcatggctgtggccaccggctcctgggacagcttcctgcgcatctggaactag

SEQ ID NO: 287355 - DNA, 1023 bp, Artificial Sequence
  derived and/or modified sequence
atgagcgagctggagcagctgcggcaggaggccgagcagctgcggaaccagattcaggacgcacgaaaagcttgcaacgacgcaactctggtgcaaattacaagcaatatggactccgtcggcagaattcagatgcgaactcgtaggactctgcgtggacatctggcgaaaatctacgctatgcattggggatatgatagccggctgctggtgtccgcttcacaggacgggaagctgattatctgggattcttacaccactaacaaaatgcacgcaatcccactacggtcttcttgggtcatgacctgtgcatacgctccctcaggcaattacgttgcctgtggcggcctggacaatatctgttccatttacaatctcaagacacgggaaggcaacgtacgagtctccagagaactgcccggccacacagggtacctcagctgctgccggttcctggacgattcacagattgttacttcaagcggagacacaacctgtgccctctgggacatagaaactgcccagcagactactacttttaccgggcactccggcgacgtcatgtcactgtccctgtcaccggacatgagaactttcgtcagcggagcatgtgatgcttcttcgaaactttgggacataagggacggcatgtgccgccagagctttaccggccacgtgagcgacataaatgccgtctcattcttccccaatggatacgcattcgctacagggtccgacgacgctacctgcagactattcgacttgagagctgatcaagaactgctgttatacagccacgacaacatcatctgcggcatcacctccgtggccttttccaagagcgggcgtctgcttttagcaggttacgatgattttaattgcaacgtctgggacacgctcaagggcgaccgggcaggtgtgttggctggccatgataacagggtctcttgcctgggtgtgactgacgatggcatggccgtggctacgggctcctgggactctttcctcaggatatggaattag

SEQ ID NO: 287356 - DNA, 1023 bp, Artificial Sequence
  derived and/or modified sequence
atgagcgagctggagcagctgcggcaggaggccgagcagctgcggaatcagatccaggatgctagaaaagcttgtaacgacgccacgctggttcagatcacctccaacatggattctgtgggccggattcagatgcgaacacgacgtaccttgaggggtcatctggcaaaaatatatgctatgcattgggggtatgatagccgtcttttggtgtcagcatcccaggacggaaagctcattatctgggacagttacaccaccaacaagatgcatgcgattccgctgaggagcagctgggtgatgacatgtgcctacgccccttccggcaactatgtagcgtgcggcggactggacaacatctgctccatctataacctcaagacccgagagggaaacgtgcgagtcagcagggagctccccggccacacagggtacctttcatgctgccggttcttggatgacagccagattgttacaagcagtggagacacaacctgcgctttgtgggacatcgaaacagctcagcaaacaaccacttttacaggccattctggagacgtgatgtcactgtcactgtcccctgacatgcgcactttcgtgtccggcgcctgcgatgcctccagcaagctgtgggatatccgggacggaatgtgtagacagagcttcaccggccacgtgtccgatatcaatgccgtctctttcttccccaatggctacgcttttgctacaggtagcgacgatgccacctgccgcctcttcgacctgcgggccgatcaggaactgttactttactcccacgataacataatctgcggaataacgtccgtagctttctctaagagcggccgccttctactagctggatacgatgacttcaattgcaatgtttgggacacactgaagggagaccgtgcgggtgtactcgcggggcacgacaatcgcgtaagctgtctcggcgtaaccgatgatggaatggccgtcgcgaccggatcatgggacagtttcctgcgcatttggaattag

SEQ ID NO: 287357 - DNA, 1023 bp, Artificial Sequence
  derived and/or modified sequence
atgtccgaactcgagcagttgcgccaggaggcagagcagctgcgcaatcagatccaggatgcgaggaaggcctgtaacgacgcaaccctggtgcagatcacgtcaaatatggattccgtgggtcgcatacagatgcgcactcggcgtacactcagaggccatctggccaaaatctatgccatgcattggggctacgattctcgtctgctcgtcagtgcctcacaggatgggaagctcattatctgggacagttatacaaccaacaaaatgcacgcaattcctttgcggagcagctgggtgatgacctgcgcctacgctccctcagggaattacgtggcatgtggaggattggataacatttgttctatttacaacttaaagacccgggagggcaacgtccgggtgagtcgcgaattgccaggccacaccggctatctgtcttgctgtaggttcctggacgacagccaaatagtcacatccagtggggatactacttgcgcattgtgggatatcgagactgcccagcagactacgactttcaccggccacagtggggatgttatgagcctgtctctctcacccgatatgagaacgttcgtcagcggggcttgtgatgcctctagtaagctttgggatatccgcgacggtatgtgtcggcagtcctttaccggccatgtatccgatattaatgcagtgagcttttttccgaacggttatgcctttgctactggatccgatgacgccacttgtcggctctttgacttgcgtgcagatcaggagctattgctgtattcgcacgataatataatctgtggcataacctcggtggccttctccaaatccgggaggctgctactggccggatatgacgacttcaactgcaatgtctgggatactctgaagggagacagggcaggtgttctcgctggccatgataaccgggtgtcatgtctcggtgtcacagatgatggtatggccgtggctaccgggagctgggacagttttctcaggatttggaattag

SEQ ID NO: 287358 - DNA, 1023 bp, Artificial Sequence
  derived and/or modified sequence
atgagcgaactagagcagctgcgccaagaagccgaacagctccgcaaccaaatccaggacgccaggaaggcctgtaatgacgctaccttggtgcagatcaccagcaacatggattcggtcggaagaatccagatgaggactagacggactctgagagggcacctagccaagatttatgcgatgcactggggctatgactccaggcttcttgtgagcgccagccaggacggaaagttaatcatttgggactcatacacaacaaacaagatgcacgccatcccccttagaagctcctgggtcatgacgtgtgcttacgccccttctggaaactacgttgcatgcggtgggctagacaatatatgcagtatttataatctgaaaacacgcgagggcaacgtgcgcgtttctcgcgagctcccaggacacacggggtacctgtcatgctgccgctttctggacgactcacagattgtaacttcaagtggcgacacgacatgtgccctctgggacatagaaacagcacagcaaaccactacatttacagggcactctggagatgtaatgagtctgtccctgtcgccagacatgcgtaccttcgtgtcaggtgcctgcgacgcctctagcaagctatgggacatcagagatggcatgtgtcgtcaaagcttcactggtcatgtaagtgacatcaacgccgtatccttttttccgaatggctatgctttcgccactggttctgacgacgccacctgccggctgtttgatctcagagccgatcaggagctcctgctttatagccacgacaatataatttgtggaataacttcagttgcatttagtaagtcagggcgacttcttttggccggttatgatgactttaactgcaatgtgtgggatactctcaaaggcgatcgggcaggagtgctggccggacatgacaatcgggtctcatgtcttggagtgacggatgatggaatggctgtggcaacaggctcatgggactcatttcttcgcatctggaattag

SEQ ID NO: 287359 - DNA, 1023 bp, Artificial Sequence
  derived and/or modified sequence
atgagcgagctggagcagctgagacaggaggccgagcagctgagaaaccagatccaggacgccagaaaggcctgcaacgacgccaccctggtgcagatcaccagcaacatggacagcgtgggcagaatccagatgagaaccagaagaaccctgagaggccacctggccaagatctacgccatgcactggggctacgacagcagactgctggtgagcgccagccaggacggcaagctgatcatctgggacagctacaccaccaacaagatgcacgccatccccctgagaagcagctgggtgatgacctgcgcctacgcccccagcggcaactacgtggcctgcggcggcctggacaacatctgcagcatctacaacctgaagaccagagagggcaacgtgagagtgagcagagagctgcccggccacaccggctacctgagctgctgcagattcctggacgacagccagatcgtgaccagcagcggcgacaccacctgcgccctgtgggacatcgagaccgcccagcagaccaccaccttcaccggccacagcggcgacgtgatgagcctgagcctgagccccgacatgagaaccttcgtgagcggcgcctgcgacgccagcagcaagctgtgggacatcagagacggcatgtgcagacagagcttcaccggccacgtgagcgacatcaacgccgtgagcttcttccccaacggctacgccttcgccaccggcagcgacgacgccacctgcagactgttcgacctgagagccgaccaggagctgctgctgtacagccacgacaacatcatctgcggcatcaccagcgtggccttcagcaagagcggcagactgctgctggccggctacgacgacttcaactgcaacgtgtgggacaccctgaagggcgacagagccggcgtgctggccggccacgacaacagagtgagctgcctgggcgtgaccgacgacggcatggccgtggccaccggcagctgggacagcttcctgagaatctggaactag

SEQ ID NO: 287360 - DNA, 1171 bp, Artificial Sequence
  derived and/or modified sequence
cctcctccctctcctcccccacctcctgtcccattgatgtgttattattgggggggctggagcagtaaaaaaagaagaaggaaaaaaagagcggggctctgctggcagaggttgagcgccgggctgacgtgcggcggcgatggaagaacttacggcgttcgtctccaagtcttttgaccagaaagtgaaggagaagaaggaggcgatcacgtaccgggaggtgctggagagcgggccgctgcgcggggccaaggagccgaccggctgcaccgaggcgggccgcgacgaccgcagcagcccggcagtccgggcggccggcggaggcggcggcggaggaggcggaggcggcggcggaggaggcggaggaggtgtaggaggaggaggagcaggcggaggagctggaggagggcgctctcccgtccgggagctggacatgggcgccgccgagagaagcagggagccgggcagcccgcgactgacggagggtagaaggaagccaacgaaagctgaggtccaggctacgctgcttctcccgggcgaggcgtttcggtttcttgtgtccccggagctgaaagatcgcaaagaggatgcgaaagggatggaggacgaaggccagaccaaaatcaagcagaggcgaagtcggaccaatttcaccctggaacaactcaatgagctggagaggctttttgacgagacccactatcccgacgccttcatgcgagaggaactgagccagcgactgggcctgtcggaggcccgagtgcaggtttggtttcaaaatcgaagagctaaatgtagaaaacaagaaaatcaactccataaaggtgttctcataggggccgccagccagtttgaagcttgtagagtcgcaccttatgtcaacgtaggtgctttaaggatgccatttcagcaggttcaggcgcagctgcagctggacagcgctgtggcgcacgcgcaccaccacctgcatccgcacctggccgcgcacgcgccctacatgatgttcccagcaccgcccttcggactgccgctcgccacgctggccgcggattcggcttccgccgcctcggtagtggcggccgcagcagccgccaagaccaccagcaagaactccagcatcgccgatctcagactgaaagccaaaaagcacgccgcagccctgggtctgtga

SEQ ID NO: 287361 - DNA, 573 bp, Artificial Sequence
  derived and/or modified sequence
atggaagatgagggccagaccaagatcaagcagagacggtccagaactaacttcactctagagcagcttaatgaattggaacggctctttgacgaaacccactatcccgacgcttttatgcgggaggagctttctcagcgcctagggctgtccgaggcacgcgtgcaagtgtggtttcagaatcggcgcgccaagtgtaggaagcaggaaaaccagctgcacaagggagttttgatcggcgctgcatcccagttcgaagcctgtagggtggcaccttacgtgaacgttggcgccctgcggatgccctttcaacaggtgcaggcacagctgcagctggatagtgccgttgcccacgcccatcatcatcttcatccacatttggctgctcacgccccttacatgatgtttcctgcccccccgttcggactgcccctggcaactctggctgccgattctgcttcagctgccagcgtcgttgctgctgccgccgcagccaagactacatccaagaatagttccatcgcagatctacggctgaaggcaaaaaaacacgctgcggcattggggctgtag

SEQ ID NO: 287362 - DNA, 573 bp, Artificial Sequence
  derived and/or modified sequence
atggaggacgaaggccagactaaaattaagcagcgacgctcacgtactaacttcaccctggagcaactaaatgagctggagagactgtttgatgaaactcattatccagatgcttttatgcgagaggaactatctcagcgcttggggctcagcgaagctcgagtgcaggtgtggttccaaaacagacgagccaagtgtagaaagcaggaaaaccagctgcataaaggtgtgttgatcggcgcagccagtcagttcgaggcctgtcgcgtggccccttacgtgaacgtcggtgctctgcggatgcccttccaacaagttcaggctcagctgcagctcgactctgccgtggcacatgcccaccatcatcttcaccctcatctggctgctcatgcaccatacatgatgtttcctgctcccccattcggactgcccctcgccaccctggcggccgactccgccagcgcagcatctgtagtagcagctgctgcagccgctaaaaccacctcaaagaacagctcaattgccgatctgaggctgaaggccaaaaagcacgccgccgctctcgggctttag

SEQ ID NO: 287363 - DNA, 573 bp, Artificial Sequence
  derived and/or modified sequence
atggaggatgaaggtcagactaagattaaacagagaagaagccgcaccaacttcactctggagcagttgaatgaactcgaacgcctcttcgatgagactcattaccctgatgccttcatgagagaggaactgtcacagcgcctagggctgtctgaggcgagggtgcaggtttggttccaaaacagacgcgcaaagtgtagaaagcaggaaaatcagcttcacaaaggagtgctcatcggcgctgcctcccagtttgaggcatgcagggtggctccttatgtcaacgtgggtgccctcaggatgccattccagcaggttcaggctcagctccaactggatagtgccgttgcacacgctcaccatcacctgcatccccatctcgcagctcatgctccctacatgatgtttcccgctcctccctttggtctacctctcgctacccttgctgccgattccgcctcggctgcatccgtggttgctgccgctgccgctgctaagactaccagtaagaacagctccattgccgacctcaggctgaaagcaaagaagcatgccgcagcacttggcctatag

SEQ ID NO: 287364 - DNA, 573 bp, Artificial Sequence
  derived and/or modified sequence
atggaggatgagggccagaccaagatcaagcagaggaggagcaggaccaacttcaccctggagcagctgaatgagctggagcggctgtttgatgagacccactacccagatgccttcatgagggaggagctgagccagaggctgggcctgtctgaggcccgggtgcaggtgtggttccagaacagaagagccaagtgcaggaagcaggagaaccagctgcacaagggcgtgctgattggagctgccagccagtttgaggcctgccgggtggccccctacgtgaatgtgggcgccctgaggatgcccttccagcaggtgcaggcccagctgcagctggacagcgctgtggcccacgcccaccaccacctgcacccccacctggccgcccacgccccctacatgatgtttcctgcccccccatttggcctgcccctggccaccctggccgctgacagcgccagcgctgcctctgtggtggccgctgctgctgctgccaagaccaccagcaagaacagcagcattgctgacctgcggctgaaggccaagaagcatgctgctgccctgggcctgtag

SEQ ID NO: 287365 - DNA, 573 bp, Artificial Sequence
  derived and/or modified sequence
atggaggacgagggccagaccaagatcaagcagcggcggagccggactaatttcactctcgagcaattgaatgaactagaacggcttttcgatgaaacacactacccagacgcctttatgagggaagagctctctcagcgtttaggtctgtctgaggcgcgcgtgcaggtatggttccagaataggagggccaagtgccggaagcaggaaaatcagctccacaaaggggtgcttattggtgccgcctcacagttcgaagcctgccgcgtggctccatacgtgaatgtgggagctttgcgcatgccattccaacaggtgcaggcccaactgcagcttgattccgcagtggctcatgcgcaccatcatttacatccacatttagctgcccacgcaccctatatgatgttcccggcaccgccttttgggctgcctctggccacgttggccgctgactcagcaagtgccgccagtgtcgttgccgcagccgctgctgcaaagactactagcaagaactccagtattgcagacctgagactgaaagcaaaaaagcacgccgccgcgctggggctctag

SEQ ID NO: 287366 - DNA, 573 bp, Artificial Sequence
  derived and/or modified sequence
atggaggacgagggccagaccaagatcaagcagcggcggagccggactaactttacactcgagcagttaaatgaactggagcgactgtttgatgaaacacattaccctgacgcttttatgcgagaagaactgagccagaggctgggcctgagtgaggcacgcgtgcaagtgtggttccagaaccgtagggctaagtgtcggaaacaggagaatcagcttcataagggcgtgctgatcggcgcagcctcacagttcgaggcttgtcgggtcgcaccttatgtgaatgtcggagcactccggatgccttttcagcaggttcaggcacaactccagctagactctgccgtggcccacgcgcaccaccacctgcatcctcacctcgcggcccacgctccctatatgatgttcccagcacccccgtttggcttgccactagctacccttgcagctgatagtgccagcgccgcctcagtggtggctgccgccgcggcggccaagacaacgtctaagaactctagtatagcggatctcagattaaaggccaagaagcatgccgccgccctggggctctag

SEQ ID NO: 287367 - DNA, 573 bp, Artificial Sequence
  derived and/or modified sequence
atggaggacgagggccagaccaagatcaagcagcggcggagccggactaactttaccctcgagcagctgaacgagcttgagcgtctgttcgacgagacacactatccagacgcttttatgagagaagaactgtcgcaacgcctcggcttaagcgaggctcgagttcaggtttggtttcagaaccggcgagcaaagtgtagaaaacaggaaaaccagctccacaagggcgttctaatcggcgcagcctctcagtttgaggcatgcagagtcgctccctacgtgaatgtcggcgcactgagaatgccttttcagcaagtccaagctcagctgcagctcgattcagctgtggcccacgctcatcaccacctgcacccacatcttgccgcgcatgctccatatatgatgttcccggcccccccattcggattgcccctggccaccctggcggcggatagcgctagcgccgcgtctgtggtggctgccgctgcagcagctaagactacaagcaaaaatagctctatcgcggatttgcggctgaaggcaaagaaacacgctgcagcattgggactgtag

SEQ ID NO: 287368 - DNA, 573 bp, Artificial Sequence
  derived and/or modified sequence
atggaggacgaagggcaaactaagatcaaacagaggcggtcacgaacaaatttcacattggagcagctgaacgagctcgagagactgttcgatgagacacattacccagatgcattcatgcgggaggagctgtcccagaggctggggctaagcgaggcacgcgtacaggtgtggtttcagaatcgcagagcaaagtgtcgcaagcaagaaaatcagcttcacaaaggagtgctgattggcgctgcctctcagtttgaagcatgtagggtggctccatatgtaaacgtgggcgcactgaggatgcctttccagcaggtccaggcacagttacagcttgattcagccgttgcacacgcacatcatcatctccacccgcacttagcagctcatgctccatatatgatgtttcctgcccctccctttggtctcccactcgccaccctagccgctgactctgcttccgctgcatccgtggtggccgctgccgctgctgccaaaaccacatctaaaaattccagtattgccgatctgaggttaaaggccaaaaagcacgccgcagccttggggctgtag

SEQ ID NO: 287369 - DNA, 573 bp, Artificial Sequence
  derived and/or modified sequence
atggaagacgaaggccaaacaaaaatcaaacaacgacgaagccgaacgaacttcactctggaacagctaaatgaattggaacgactttttgacgagacacattaccccgacgctttcatgagggaggagctgagccaaagactgggcctttccgaggcccgagttcaggtttggtttcagaataggcgggcaaaatgcaggaagcaggaaaatcaactccacaaaggggttctgatcggggctgcgtctcaattcgaagcatgtagggtggctccttatgtgaacgtgggggctctgcgcatgccctttcagcaggtgcaggctcagcttcagctggacagtgccgtggcacacgctcaccatcacctgcacccccacctggccgctcatgccccatacatgatgtttcctgccccaccttttgggctgcccttggccacactagccgcagacagtgcgagtgctgcgagtgtggttgccgctgctgctgccgcaaagaccacgagcaagaactcaagcatcgctgacctgagactcaaagccaaaaagcatgcggcagctctcggcctctag

SEQ ID NO: 287370 - DNA, 573 bp, Artificial Sequence
  derived and/or modified sequence
atggaagacgaaggccagaccaagattaaacagaggagaagcaggaccaactttaccctggaacaactgaatgaactggagcggctttttgatgagacgcattaccccgacgcgttcatgcgggaagaactaagtcagaggctgggcctgtccgaggcaagagtgcaggtgtggtttcagaacaggcgggctaaatgcagaaagcaggagaatcagctgcataagggtgttctcattggagcagcctcgcagtttgaagcctgtagggtggccccttacgttaacgtgggggctctccggatgcctttccagcaagtgcaggcacagctgcagcttgattcagctgtggctcatgcccaccaccaccttcacccacatctcgcggcacacgcaccttatatgatgttcccagccccaccattcggtctgccgctggccaccctcgctgcagacagcgcatccgccgctagcgttgttgccgcagcagcggctgcgaagacaaccagtaaaaattctagcattgctgacctccggctgaaggcaaagaaacatgctgctgcgttaggcctctag

SEQ ID NO: 287371 - DNA, 573 bp, Artificial Sequence
  derived and/or modified sequence
atggaggacgagggccagaccaagatcaagcagagaagaagcagaaccaacttcaccctggagcagctgaacgagctggagagactgttcgacgagacccactaccccgacgccttcatgagagaggagctgagccagagactgggcctgagcgaggccagagtgcaggtgtggttccagaacagaagagccaagtgcagaaagcaggagaaccagctgcacaagggcgtgctgatcggcgccgccagccagttcgaggcctgcagagtggccccctacgtgaacgtgggcgccctgagaatgcccttccagcaggtgcaggcccagctgcagctggacagcgccgtggcccacgcccaccaccacctgcacccccacctggccgcccacgccccctacatgatgttccccgccccccccttcggcctgcccctggccaccctggccgccgacagcgccagcgccgccagcgtggtggccgccgccgccgccgccaagaccaccagcaagaacagcagcatcgccgacctgagactgaaggccaagaagcacgccgccgccctgggcctgtag

SEQ ID NO: 287372 - protein, 253 aa, Artificial Sequence
  derived and/or modified sequence
MEEEDEEARALLAGGPDEADRGAPAAPGALPALCDPSRLAHRLLVLLLMCFLGFGSYFCYDNPAALQTQVKRDMQVNTTKFMLLYAWYSWPNVVLCFFGGFLIDRVFGSTVNMNLMGWLYSKIEALLGSAGHTTLGITLMIGGITCILSLICALALAYLDQRAERILHKEQGKTGEVIKLTDVKDFSLPLWLIFIICVCYYVAVFPFIGLGKVFFTEKFGFSSQAASAINSVVYVISAPMSPVFGLLVDKTGK

SEQ ID NO: 287373 - protein, 475 aa, Artificial Sequence
  derived and/or modified sequence
MGVALRDLPGRHVSSRSHVTAVLTVFHGRCFLPGFGVVTTFPSPSPAGAMEEEDEEARALLAGGPDEADRGAPAAPGALPALCDPSRLAHRLLVLLLMCFLGFAIFAMIILLPFRLKLNEWGTIIFSCFVCIGQVVFALGGIFNAFWLMEFGRFVFGIGGESLAVAQNTYAVSWFKGKELNLVFGLQLSMARIGSTVNMNLMGWLYSKIEALLGSAGHTTLGITLMIGGITCILSLICALALAYLDQRAERILHKEQGKTGEVIKLTDVKDFSLPLWLIFIICVCYYVAVFPFIGLGKVFFTEKFGFSSQAASAINSVVYVISAPMSPVFGLLVDKTGKNIIWVLCAVAATLVSHMMLAFTMWNPWIAMCLLGLSYSLLACALWPMVAFVVPEHQLGTAYGFMQSIQNLGLAIISIIAGMILDSRGYLFLEVFFIACVSLSLLSVVLLYLVNRAQGGNLNYSARQREEIKFSHTE

SEQ ID NO: 287374 - DNA, 762 bp, Artificial Sequence
  derived and/or modified sequence
atggaggaggaggacgaggaggccagagccctgctggccggcggccccgacgaggccgacagaggcgcccccgccgcccccggcgccctgcccgccctgtgcgaccccagcagactggcccacagactgctggtgctgctgctgatgtgcttcctgggcttcggcagctacttctgctacgacaaccccgccgccctgcagacccaggtgaagagagacatgcaggtgaacaccaccaagttcatgctgctgtacgcctggtacagctggcccaacgtggtgctgtgcttcttcggcggcttcctgatcgacagagtgttcggcagcaccgtgaacatgaacctgatgggctggctgtacagcaagatcgaggccctgctgggcagcgccggccacaccaccctgggcatcaccctgatgatcggcggcatcacctgcatcctgagcctgatctgcgccctggccctggcctacctggaccagagagccgagagaatcctgcacaaggagcagggcaagaccggcgaggtgatcaagctgaccgacgtgaaggacttcagcctgcccctgtggctgatcttcatcatctgcgtgtgctactacgtggccgtgttccccttcatcggcctgggcaaggtgttcttcaccgagaagttcggcttcagcagccaggccgccagcgccatcaacagcgtggtgtacgtgatcagcgcccccatgagccccgtgttcggcctgctggtggacaagaccggcaagtag

SEQ ID NO: 287375 - DNA, 1428 bp, Artificial Sequence
  derived and/or modified sequence
atgggcgtggccctgagagacctgcccggcagacacgtgagcagcagaagccacgtgaccgccgtgctgaccgtgttccacggcagatgcttcctgcccggcttcggcgtggtgaccaccttccccagccccagccccgccggcgccatggaggaggaggacgaggaggccagagccctgctggccggcggccccgacgaggccgacagaggcgcccccgccgcccccggcgccctgcccgccctgtgcgaccccagcagactggcccacagactgctggtgctgctgctgatgtgcttcctgggcttcgccatcttcgccatgatcatcctgctgcccttcagactgaagctgaacgagtggggcaccatcatcttcagctgcttcgtgtgcatcggccaggtggtgttcgccctgggcggcatcttcaacgccttctggctgatggagttcggcagattcgtgttcggcatcggcggcgagagcctggccgtggcccagaacacctacgccgtgagctggttcaagggcaaggagctgaacctggtgttcggcctgcagctgagcatggccagaatcggcagcaccgtgaacatgaacctgatgggctggctgtacagcaagatcgaggccctgctgggcagcgccggccacaccaccctgggcatcaccctgatgatcggcggcatcacctgcatcctgagcctgatctgcgccctggccctggcctacctggaccagagagccgagagaatcctgcacaaggagcagggcaagaccggcgaggtgatcaagctgaccgacgtgaaggacttcagcctgcccctgtggctgatcttcatcatctgcgtgtgctactacgtggccgtgttccccttcatcggcctgggcaaggtgttcttcaccgagaagttcggcttcagcagccaggccgccagcgccatcaacagcgtggtgtacgtgatcagcgcccccatgagccccgtgttcggcctgctggtggacaagaccggcaagaacatcatctgggtgctgtgcgccgtggccgccaccctggtgagccacatgatgctggccttcaccatgtggaacccctggatcgccatgtgcctgctgggcctgagctacagcctgctggcctgcgccctgtggcccatggtggccttcgtggtgcccgagcaccagctgggcaccgcctacggcttcatgcagagcatccagaacctgggcctggccatcatcagcatcatcgccggcatgatcctggacagcagaggctacctgttcctggaggtgttcttcatcgcctgcgtgagcctgagcctgctgagcgtggtgctgctgtacctggtgaacagagcccagggcggcaacctgaactacagcgccagacagagagaggagatcaagttcagccacaccgagtag

SEQ ID NO: 287376 - DNA, 762 bp, Artificial Sequence
  derived and/or modified sequence
atggaggaggaggacgaggaagcccgtgccctgttggctggcggccctgacgaggccgaccggggggcgcctgccgcgcccggcgcgctgcctgcgctttgtgaccctagccggctggcacatcggctgctggtccttttgctgatgtgttttttagggtttggatcttatttctgttacgataacccagctgccctccagacccaggtgaaaagggatatgcaggtgaacacaactaagtttatgctgctgtacgcttggtatagctggccaaatgtggttttgtgttttttcggaggcttcttaattgaccgagtgttcgggagcaccgtgaacatgaacctgatggggtggctctattctaaaatcgaagcactcctgggaagtgccggccatacaacactggggattacattgatgatcggcggcatcacgtgtatcctgtccctcatttgtgccttagcgctggcttatctggatcaacgagcagaacgcatactgcataaggagcagggaaaaacaggagaagtaatcaagctcacagatgtcaaggatttctctctgcctctgtggctgatattcatcatctgcgtgtgttattacgtggccgtatttccattcatcggcctgggcaaagtgttttttaccgaaaaattcggcttctctagtcaggcggcgagcgccattaactccgtagtgtacgtgatttccgcccccatgtcccctgtgttcggcctcctggttgataagacaggcaaatag

SEQ ID NO: 287377 - DNA, 1428 bp, Artificial Sequence
  derived and/or modified sequence
atgggtgtcgcgttgagagacctgcctggacgacacgtttcatcccggtcccacgtgaccgccgtgctaaccgtgttccatggacgttgcttcctcccaggctttggggtggtgaccactttcccttcgccctcgcccgccggagccatggaggaggaagatgaagaagcacgcgctcttttagccggaggacccgacgaagcggataggggcgcacctgccgccccgggggcactgcccgccctgtgtgacccatccagattagcccatcggttgctggtgctcttacttatgtgttttctcggttttgcgatttttgcgatgattatactgctccccttccgactaaaactcaacgaatggggtaccatcatattcagttgcttcgtttgtattggtcaagtggtcttcgccctgggtggcatttttaatgccttctggctgatggagttcggcagatttgtgttcggaatcgggggtgagagtctcgccgtggcacagaacacctacgcagtgagctggttcaaaggaaaggagctgaacctggtattcggtctccagttgtctatggcgcggattggcagcaccgtgaacatgaatttgatgggctggctgtatagcaaaatagaagccctgctggggagcgcagggcacaccacccttggtattactctgatgattggcggaatcacctgtatcctgtctttgatctgtgccttggcattagcatacctggatcagagagcagagcgcatcttgcataaagagcagggcaaaactggcgaagtaatcaaactgacggacgtcaaggatttcagcttacctctgtggctaatctttatcatttgtgtctgctattacgtggcagtatttcccttcatcggtttggggaaagtctttttcaccgaaaagttcggcttcagtagccaggcagcaagcgcaatcaactcagtcgtgtacgtgatttctgcccctatgagtcccgtgttcggcctgctcgtggataagacaggtaaaaatatcatttgggtcctttgcgccgtggcagccacattagtctcacatatgatgctcgctttcacaatgtggaacccctggattgctatgtgtctcctgggtctttcatactcactacttgcatgcgccctgtggcccatggtagcattcgtcgtccccgaacatcagcttggtacggcctatggctttatgcaaagcattcaaaacctggggctggcaataatctctatcatcgccggaatgatactggactccaggggctacttgtttctcgaagtatttttcattgcgtgcgtctcactatcacttctttcagtggtccttctgtatctcgtaaaccgggcccagggcggcaatctgaattacagcgcgcggcagagggaggaaattaaattcagccatacggagtag

SEQ ID NO: 287378 - DNA, 805 bp, Artificial Sequence
  derived and/or modified sequence
gtttggagttgtcaccactttcccctctccgtctcctgcgggcgcaatggaggaggaggatgaggaagcgcgggcgctcctggcaggcggccctgacgaggccgacagaggtgccccggccgcccctggagccctgccggccctctgcgaccccagtcgcctggcgcaccggcttttggtgctgttactgatgtgcttccttggctttggcagctatttttgctatgataatcctgctgcccttcagactcaagttaaacgagatatgcaagtgaataccacgaaattcatgctgctgtatgcctggtattcttggcccaatgtagttttgtgtttctttggtggctttttgatagaccgagtatttggaagtacagtaaacatgaacctcatgggatggctgtattctaagattgaagctttgttaggttctgctggtcacacaaccctcgggatcacacttatgattgggggtataacgtgtattctttcactaatctgtgccttggctcttgcctacttggatcagagagcagagagaatccttcataaagaacaaggaaaaacaggtgaagttattaaattaactgatgtaaaggacttctccttacccctgtggcttatatttatcatctgtgtctgctattatgttgctgtgttcccttttattggacttgggaaagttttctttacagagaaatttggattttcttcccaggcagcaagtgcaattaacagtgttgtatatgtcatatcagctcccatgtccccggtgtttgggctcctggtggataaaacagggaag

SEQ ID NO: 287379 - DNA, 2244 bp, Artificial Sequence
  derived and/or modified sequence
agtcacccaggaaaagcgaaccgcgccaggccctgtcatcgaccgctgggtccgtcctcccagcgctcgcggccgctcacatgggcgtggccctgcgtgacctgccggggcgtcacgtgagctcccggagtcatgtgaccgccgtcttgacagtgttccacgggcgctgcttcctgcctgggtttggagttgtcaccactttcccctctccgtctcctgcgggcgcaatggaggaggaggatgaggaagcgcgggcgctcctggcaggcggccctgacgaggccgacagaggtgccccggccgcccctggagccctgccggccctctgcgaccccagtcgcctggcgcaccggcttttggtgctgttactgatgtgcttccttggctttgctatttttgctatgataatcctgctgcccttcagactcaagttaaacgaatggggcacaatcatttttagctgctttgtttgcattggacaggttgtttttgccctgggtggaatatttaatgctttttggctgatggaatttggaagatttgtatttgggattggtggcgagtccttagcagttgcccagaatacatatgctgtgagctggtttaaaggcaaagaattaaacctggtgtttggacttcaacttagcatggctagaattggaagtacagtaaacatgaacctcatgggatggctgtattctaagattgaagctttgttaggttctgctggtcacacaaccctcgggatcacacttatgattgggggtataacgtgtattctttcactaatctgtgccttggctcttgcctacttggatcagagagcagagagaatccttcataaagaacaaggaaaaacaggtgaagttattaaattaactgatgtaaaggacttctccttacccctgtggcttatatttatcatctgtgtctgctattatgttgctgtgttcccttttattggacttgggaaagttttctttacagagaaatttggattttcttcccaggcagcaagtgcaattaacagtgttgtatatgtcatatcagctcccatgtccccggtgtttgggctcctggtggataaaacagggaagaacatcatctgggttctttgcgcagtagcagccactcttgtgtcccacatgatgctggcctttacgatgtggaacccttggattgctatgtgtcttctgggactctcctactcattgcttgcctgtgcattgtggccaatggtggcatttgtagttcctgaacatcagctgggaactgcatatggcttcatgcagtccattcagaatcttgggttggccatcatttccatcattgctggtatgatactggattctcgggggtatttgtttttggaagtgttcttcattgcctgtgtttctttgtcacttttatctgtggtcttactctatttggtgaatcgtgcccagggtgggaacctaaattattctgcaagacaaagggaagaaataaaattttcccatactgaatgagaagttaaaatgaatgtgtcatgagaatgggcttaacacatcgttggtttgaaaacttccatttttaaaaatttagagtttagtcattagaaaaaataatggactggaaagttatatttatatccaaatatacctatttcaaagtgtatttgtgaggcctgttttagcctgtgtcttttgtattgtgtgttgctaaagaattctacttttagtaggctaatcaacaatgaaagggttagaaaattgctgtggaacatccaggtgaacttcaggaaagacagtgaaaaatggaaaacgttggagcttctgttgagataatcttcattaggtatatatcttagggatacagccttttctttatcttatagcaggaaaaaaaaacttttgagggaaatagaagggctgcgttacacaaaataaacaatggcattgtcataggccttccttttactagtagggcataatgctagggaatatgtgaagatgtttttatgaagtctctttctgatcacgaacaatagcttgcgctctactctgtagttatgtggattgccgagcaatgacccttttcaatttcttatttctgtgttactgaggaccctaatcacttagggatgtaattttatagtataaactttctgtacagtttttcttatagtctaataagtaaaaagtgtccttcaaattatgataattgcctatgtacatggataaattaaaacactgcacacggagt

SEQ ID NO: 287380 - DNA, 762 bp, Artificial Sequence
  derived and/or modified sequence
atggaggaggaggatgaggaggcccgggccctgctggccggcggcccagatgaagctgacagaggagccccagctgcccctggggccctgcctgccctgtgtgaccccagccggctggcccaccggctgctggtgctgctgctgatgtgcttcctgggcttcggcagctacttctgctatgacaacccagctgccctgcagacccaggtgaagagggacatgcaggtgaacaccaccaagttcatgctgctgtatgcctggtacagctggcccaacgtggtgctgtgcttcttcggcggcttcctgattgacagagtgtttggcagcacagtgaacatgaacctgatgggctggctgtacagcaagattgaggccctgctgggcagcgctggccacaccaccctgggcatcaccctgatgattggaggcatcacctgcatcctgagcctcatctgtgccctggccctggcctacctggaccagagagctgagcgcatcctgcacaaggagcagggcaagacaggagaggtgatcaagctgacagatgtgaaggacttcagcctgcccctgtggctgatcttcatcatctgtgtgtgctactacgtggccgtgttccccttcatcggcctgggcaaggtgttcttcacagagaagtttggcttcagcagccaggccgccagcgccatcaacagcgtggtgtatgtgatcagcgcccccatgagccctgtgtttggcctgctggtggacaagacaggcaagtag

SEQ ID NO: 287381 - DNA, 1428 bp, Artificial Sequence
  derived and/or modified sequence
atgggcgtggccctgcgggacctgcccggccgccacgtgagcagccgcagccacgtgacagctgtgctgaccgtcttccacggccgctgcttcctgcccggctttggagtggtgaccaccttccccagccccagccctgctggggccatggaggaggaggatgaggaggcccgggccctgctggccggcggcccagatgaggccgacagaggagccccagctgcccctggggccctgcctgccctgtgtgaccccagccggctggcccaccggctgctggtgctgctgctgatgtgcttcctgggctttgccatctttgccatgatcatcctgctgcccttccggctgaagctgaatgagtggggcaccatcatcttcagctgctttgtgtgcatcggccaggtggtgtttgccctgggcggcatcttcaatgccttctggctgatggagtttggccgctttgtgtttggcatcggcggggagagcctggccgtggcccagaacacctatgctgtgtcctggttcaagggcaaggagctgaacctggtgtttggcctgcagctgtccatggccagaattggcagcacagtgaacatgaacctgatgggctggctgtacagcaagattgaggccctgctgggcagcgctggccacaccaccctgggcatcaccctgatgattggaggcatcacctgcatcctgagcctcatctgtgccctggccctggcctacctggaccagagagctgagcgcatcctgcacaaggagcagggcaagacaggagaggtgatcaagctgacagatgtgaaggacttcagcctgcccctgtggctgatcttcatcatctgtgtgtgctactacgtggccgtgttccccttcatcggcctgggcaaggtgttcttcacagagaagtttggcttcagcagccaggccgccagcgccatcaacagcgtggtgtatgtgatcagcgcccccatgagccctgtgtttggcctgctggtggacaagacaggcaagaacatcatctgggtgctgtgtgctgtggccgccaccctggtgagccacatgatgctggccttcaccatgtggaacccctggatcgccatgtgcctgctgggcctgagctacagcctgctggcctgtgccctgtggcccatggtggcctttgtggtgcctgagcaccagctgggcacagcctacggcttcatgcagagcatccagaacctgggcctggccatcatcagcatcatcgccggcatgatcctggacagccggggctacctgttcctggaggtgttcttcatcgcctgtgtgtccctgagcctgctgtctgtggtgctgctgtacctggtgaacagagcccagggcggcaacctgaactacagcgcccggcagcgggaggagatcaagttcagccacacagaatag

SEQ ID NO: 287382 - DNA, 762 bp, Artificial Sequence
  derived and/or modified sequence
atggaggaggaggacgaggaggcccgggccctgctggccggcggcccggatgaggccgaccgcggtgctcctgctgcaccgggtgctcttccggcactctgcgatccctcacgccttgcacaccgactcctggtacttctcctgatgtgcttcctcggtttcgggtcttatttttgttacgataatcccgccgccctgcagacgcaggtcaagagggatatgcaagtgaacacaacaaaattcatgctcctgtatgcgtggtatagctggccaaatgtcgtcctttgcttctttggaggatttctgatcgaccgggtgttcggctccacagtaaatatgaaccttatgggatggctctattccaagatcgaagccctcctgggtagcgccgggcacacgaccctggggattacgctgatgattgggggcattacttgtatattgagcctgatttgcgcccttgcactggcctacctggatcaacgagcagagagaattctgcataaggagcagggcaagacaggggaggtaatcaaattaacagatgttaaggacttttccctgcctctctggctgatcttcatcatctgcgtttgctactacgtagcagtgttccctttcatcgggttgggcaaggtctttttcacagagaagttcgggttcagcagccaggctgcttccgcaattaactcagttgtttatgtcatcagtgcaccgatgagcccagttttcgggctcttggttgataaaacgggcaaatag

SEQ ID NO: 287383 - DNA, 1428 bp, Artificial Sequence
  derived and/or modified sequence
atgggcgtggccctgcgggacctgcccggccggcacgtgagcagccgcagccatgttacagccgtgctcactgtgtttcacggacggtgctttctgcccggattcggtgttgtcacaacatttccatctccctcccccgctggcgcgatggaagaggaagacgaggaggccagagctttactggctggaggtcctgatgaggccgacaggggagccccagccgcaccaggcgcgttacccgccctctgtgacccgagccgtctggcacatcgcctgttagtcctgctgctaatgtgctttctggggttcgcaatttttgctatgatcatcttgttgccgttccggctgaagcttaacgaatgggggactatcatattctcttgttttgtatgcattggccaagttgttttcgcccttggaggaattttcaatgctttttggcttatggagttcgggagattcgtgtttggtatcggaggcgaaagtctagccgttgctcaaaatacttacgcggtgagctggtttaagggtaaggaactgaaccttgtgttcggcctgcagctgtcaatggcaaggatcggctccactgttaacatgaatctcatgggctggctttactccaaaatcgaggcccttcttggcagtgctggccacactacactgggcattacactgatgatcggcggcatcacatgtatattgtctctgatctgtgcgttggcactggcttaccttgaccaacgagccgaacggatactgcataaggaacagggcaagaccggagaagtgatcaagctgacagacgtgaaggacttctctctcccactgtggctcattttcattatatgcgtatgttactacgtcgcagtgttcccattcatcggtctgggcaaagtattcttcaccgagaagtttgggttttcttcccaagccgcttccgccataaattctgtggtgtatgtgattagcgcacccatgagcccagtgttcgggctcctggtcgataagaccggtaaaaatataatctgggtgctctgtgcagtggcagcgacgctcgtgagtcatatgatgctcgcgtttactatgtggaatccctggatagcaatgtgtctccttgggctgtcgtactcccttctggcttgtgctctttggcccatggttgcttttgtcgtgcccgagcaccagctaggcacggcgtacggttttatgcaatcaatccagaacttgggcctcgcaatcatctccatcatcgccggcatgatcctggatagccgggggtacctatttctcgaagtgttcttcatcgcctgcgtgtcactcagcctgttatcagttgtgcttttatatttagtgaatagggcccagggcgggaatcttaactattctgctagacaaagagaagagataaagttctcccatacagaatag

SEQ ID NO: 287384 - DNA, 762 bp, Artificial Sequence
  derived and/or modified sequence
atggaagaggaagacgaagaggctcgggcattgcttgccggtggaccggacgaggctgataggggcgcacccgctgctccgggagcactccctgctctatgtgatccaagccggttagcacatcgtcttctggtgctccttctgatgtgttttctcggatttggaagctacttctgctacgataaccctgccgctctgcagacacaagtaaaaagagatatgcaggtaaatactacgaagttcatgctgctttacgcctggtacagttggcccaatgttgtcttgtgtttcttcggcggatttctgattgatcgcgtttttggctcaactgtcaacatgaacctcatgggatggctgtattccaagattgaggctttgctgggcagcgccggtcataccactctcggaatcaccctcatgattggaggtattacctgcatcctaagcctcatttgtgcgctggcactagcttacctggatcaacgtgccgagaggatcttgcataaggagcagggcaagactggagaagtaataaagttgactgacgtcaaggatttcagcctccctctgtggcttatcttcataatctgcgtctgctactatgtcgcagttttcccattcataggtctcgggaaggtcttttttaccgagaaattcggcttctccagtcaagccgcttcagcaattaactctgtggtctacgtaattagcgctccaatgtccccagtgttcggactgctcgtcgataagaccggcaaatag

SEQ ID NO: 287385 - DNA, 1428 bp, Artificial Sequence
  derived and/or modified sequence
atgggggtcgcattgcgtgatttgcccggacgccacgtatcttctagatcgcacgtcacggccgtgctcactgtattccacggtcggtgctttttaccaggattcggggtcgttacaaccttcccttccccctctccagctggagccatggaagaggaggacgaggaagccagggcattactcgcaggcggaccagatgaagccgaccggggagcccctgcagcacctggggcattacccgcactctgtgacccaagcaggctggctcataggctcttggtgctcctgctgatgtgtttcctcgggtttgccatctttgctatgattatcctgctgccattccgactaaagttgaatgagtggggcactataattttttcctgctttgtctgcattggacaggtggtgttcgccctgggcggaatctttaatgctttctggctcatggagtttgggcgatttgtcttcggaatcggtggcgaatctttagctgtcgctcagaacacttacgctgtgagttggtttaagggaaaggagctcaatctagtctttgggttgcagctctctatggcacgaattggctctaccgtgaacatgaatttgatgggatggctctattctaagattgaggcgttactggggagtgcagggcatacaaccctgggtattactttaatgatcgggggaatcacatgcatattgagtctgatctgcgcactggcactcgcatatttagatcagcgggcagagagaatcctgcacaaggagcagggcaagaccggcgaggttattaagcttacagacgttaaagattttagcctccctctctggctcatttttattatctgcgtatgttattatgtagcagtgttccccttcatagggctgggcaaagtgttttttacagaaaagtttggtttctcctcccaggcagcgtctgcgataaattcagtggtctatgtcatttctgctcctatgagtccagtgttcggactgctcgtggacaaaacaggtaagaatattatttgggtactgtgtgcagtggcagcaaccctggttagtcacatgatgttagcctttactatgtggaatccctggatagccatgtgcctgctaggcctgagctattcactgctggcttgcgccctgtggcccatggtagccttcgtggtccccgagcaccaactagggacagcttacggttttatgcagtctatacagaacctgggcctcgccatcataagcattatagccggaatgattttagattcaaggggctatctctttttagaggtgttttttatcgcatgtgtctctcttagtctcttgtcagtggtgttactttacctggtgaaccgcgctcaaggaggtaatctgaactacagcgcaagacagcgagaggaaattaaatttagtcacactgagtag

SEQ ID NO: 287386 - protein, 147 aa, Artificial Sequence
  derived and/or modified sequence
MAEAEFKDHSTAMDTEPNPGTSSVSTTTSSTTTTTITTSSSRMQQPQISVYSGSDRHAVQALHRPPSSAAQYLQQMYAAQQQHLMLHTAALQQQHLSSSQLQSLAAVQASLSSGRPSTSPTGSVTQQSSMSQTSVSSLNFFFLDLKF

SEQ ID NO: 287387 - protein, 151 aa, Artificial Sequence
  derived and/or modified sequence
MAEAEFKDHSTAMDTEPNPGTSSVSTTTSSTTTTTITTSSSRMQQPQISVYSGSDRHAVQVIQQALHRPPSSAAQYLQQMYAAQQQHLMLHTAALQQQHLSSSQLQSLAAVQASLSSGRPSTSPTGSVTQQSSMSQTSVSSLNFFFLDLKF

SEQ ID NO: 287388 - DNA, 486 bp, Artificial Sequence
  derived and/or modified sequence
taacgttggaacagaaagcccgataaccagtctctgggccatcgcggacgccgcccctctgggcccgacggggcagccagagagcatatcttaagacaactgcctattacctatccttcagcagaggaggatctagcctcacacgaagacagtgtacccagtgcaatgacaacgcggctgcgccgacaaagtgaacgagagagagagcgcgaattgcgcgacgtaaggatccgcaagatgcccgagaactccgatttattacccgtagctcaaactgagccctccatctggacagtggatgacgtgtgggccttcatacattccctcccgggatgccaggacattgccgatgagtttcgggcacaagagatcgatggacaggcattattgctgctcaaagaggatcacctaatgtccgccatgaacattaagctggggcctgccctgaagatatgtgcaagaattaacagtctgaaagagtcttag

SEQ ID NO: 287389 - DNA, 486 bp, Artificial Sequence
  derived and/or modified sequence
tgaagatggaacaggaagccagacaaccagagcctgggccaccggggcagaagacccagcggcccagatggagctgcccgggagcacatcctgcggcagctgcccatcacctaccccagcgctgaggaggacctggccagccatgaagattctgtgcccagcgccatgaccacccggctgcggcggcagagcgagcgggagcgggagcgggagctgagagatgtgcgcatcaggaagatgcctgagaacagcgacctgctgcctgtggcccagacagagcccagcatctggacagtggatgatgtgtgggccttcatccacagcctgcccggctgccaggacattgctgatgagttccgggcccaggagattgatggccaggccctgctgctgctgaaggaggaccacctgatgtctgccatgaacatcaagctgggccctgccctgaagatctgtgcccgcatcaacagcctgaaggagagctag

SEQ ID NO: 287390 - DNA, 913 bp, Artificial Sequence
  derived and/or modified sequence
gtcgttggaatcgtaagcctgataatcaaagtcttgggcatcgtggccgtcgtccaagtggccctgatggggcagcgagagaacatatccttaggcagcttccaattacttatccatctgcagaagaagacttggcttctcatgaagattctgtgccatctgctatgacaactcgtctgcgcaggcagagcgagcgggaaagagaacgtgagcttcgggatgtgagaattcggaaaatgcctgagaacagtgacttgctaccagttgcacaaacagagccatctatatggacagttgatgatgtctgggccttcatccattctttgcctggctgccaggatatcgcagatgaattcagagcacaggagattgatggacaggcccttctcttgctgaaagaagaccatctcatgagtgcaatgaatatcaagctaggcccagccctgaagatctgtgcacgcatcaactctctgaaggaatcttaacaggaacatgaagccttgataaaacagcagttttacttttctcacaaaaacttgtaagatctgatcatagagaggtggacatatgattgaagtcaggttgaacagtcattccccgggactgtatatttgaagaagttaggagatgctttaagtaagtgtaattaattatgaaagccctgagctgctggcagccagaacacccactttgtggacacaaaatggaaaccgacaactcagagagattctcctagtagtttactaagtaagttcttgccaatatccagcttgttcttagaatggctcaggttgagtttgtattacctgctactcaaagaattcttgactgactctccaggagcatttcccaacttgtctttatagatgcttaattaattaattttagctaattaaagagacttgtgtgctca

SEQ ID NO: 287391 - DNA, 486 bp, Artificial Sequence
  derived and/or modified sequence
tgacggtggaaccggaagcccgacaaccagagcctgggccaccggggccgccgaccaagcggaccagacggggctgcgcgcgaacacatactgcggcagttgcctatcacgtacccatccgcagaagaagacctcgcttctcacgaggacagtgtcccttccgccatgacaacacggcttcggaggcaatctgagagggagcgggagagagaactgagagatgtcagaatccgaaagatgcctgagaatagcgacctgttacctgtcgcccagacagaaccgtctatctggactgttgatgatgtgtgggccttcatccacagcctgcccggatgccaggacatcgctgacgagtttagagctcaggaaattgacgggcaggctcttcttcttctgaaagaggatcacctgatgtctgccatgaacatcaagttgggtccagctctgaaaatatgtgcgcgcatcaacagtttgaaagaatcatag

SEQ ID NO: 287392 - DNA, 486 bp, Artificial Sequence
  derived and/or modified sequence
taacggtggaatcgtaaacctgacaaccagagcctcggccataggggcagacggcctagcggcccagatggtgcggcacgcgaacatatcctgcgccagctccctattacctatccttctgcggaagaagacctcgcctcacatgaggactcagtgcctagcgcaatgacaactagactgaggcggcaaagtgagcgtgagagggaacgcgaattgagagacgtgagaatccgcaagatgccagagaacagcgacttgctacctgtggcacagacagaacctagcatttggaccgtcgacgatgtctgggccttcattcactctctaccagggtgccaggacattgcagatgaattcagagcccaggagattgatggccaggcacttctgctgctcaaggaggatcacctgatgagtgccatgaacatcaagcttgggccagctttgaagatttgtgccaggatcaattccctcaaggagagctag

SEQ ID NO: 287393 - DNA, 486 bp, Artificial Sequence
  derived and/or modified sequence
tgaagatggaacagaaagcccgacaaccagagcctgggccacagaggcagaagacccagcggccccgacggcgccgccagagagcacatcctgagacagctgcccatcacctaccccagcgccgaggaggacctggccagccacgaggacagcgtgcccagcgccatgaccaccagactgagaagacagagcgagagagagagagagagagagctgagagacgtgagaatcagaaagatgcccgagaacagcgacctgctgcccgtggcccagaccgagcccagcatctggaccgtggacgacgtgtgggccttcatccacagcctgcccggctgccaggacatcgccgacgagttcagagcccaggagatcgacggccaggccctgctgctgctgaaggaggaccacctgatgagcgccatgaacatcaagctgggccccgccctgaagatctgcgccagaatcaacagcctgaaggagagctag

SEQ ID NO: 287394 - DNA, 744 bp, Artificial Sequence
  derived and/or modified sequence
atggccgaggcagaatttaaagatcatagcacagccatggacaccgagccgaatccgggaacctcgagcgtgtccactacaacctcatcgaccacaaccaccaccattactaccagttcttcacgcatgcaacagcctcagataagcgtctacagcggcagtgatcgtcacgctgttcaggtgatccagcaagctctgcatcgaccccctagcagtgctgcccagtatctgcaacagatgtacgccgctcagcagcagcacctcatgctccacactgctgccctgcaacaacagcatctttcctcttcacagcttcagtccttagccgctgttcaggccagtctttcatccggaagaccttccacatctccaactggaagtgtgacccagcagagttctatgagtcagacctcgatcaacctgagtaccagtcctacaccggcccagcttataagcaggtcgcaggcctcctcctccacctcaggttcaatcacccagcagacgatgcttctggggtcaacaagccccacactgaccgccagtcaggcccagatgtatctacgggcccaaatgctgattttcaccccagctaccaccgtggcagcagtccagagtgatattcctgtggtgagcagtagctcaagttcctcttgccagtccgctgcaacccaggtgcagaatctgactctgcgtagtcagaagctcggagttctgtcaagctcccagaacggccctccaaaatag

SEQ ID NO: 287395 - DNA, 444 bp, Artificial Sequence
  derived and/or modified sequence
atggctgaggccgagtttaaggatcattctacagccatggataccgaacctaacccaggaacaagctccgtgtctactactacttcttcaactacaaccactaccatcacgaccagctcctcacgaatgcagcagcctcagatcagcgtctatagtggctcagatcgtcacgccgtgcaggcacttcaccggccaccctcatccgccgctcagtatctgcaacagatgtacgccgctcaacagcagcacctgatgcttcacaccgccgcgttacaacaacagcacctgtcatcttcccaactccagtctttggccgccgttcaagcaagtttgagtagcggtcgtccttctacaagtcctaccgggtctgtgacccagcagtcatctatgagccaaacttcagtcagctccctgaacttcttttttctcgatctgaagttctag

SEQ ID NO: 287396 - DNA, 456 bp, Artificial Sequence
  derived and/or modified sequence
atggctgaggcagaattcaaggaccacagcaccgcaatggatacggaaccaaatccgggcacctcatccgtgtctacaaccactagcagcactaccaccaccactatcacaacgagctcctcccggatgcagcagcctcaaatctctgtttactcgggcagtgaccgccacgctgtgcaggtgattcagcaagctctccatcgtcctccgtctagcgctgctcagtacttgcaacaaatgtacgccgcccagcagcagcatctgatgcttcacaccgcggcccttcagcagcagcacctgtctagctcccagttacagagcctggccgccgtccaggcatcactgtccagtgggagacccagtacatcccccactggatcagtgacccaacagtctagcatgtctcagactagcgtttctagtttgaattttttctttcttgacctcaaattctag

SEQ ID NO: 287397 - DNA, 744 bp, Artificial Sequence
  derived and/or modified sequence
atggccgaggccgagttcaaggaccacagcacagccatggacacagagcccaaccctggcaccagctctgtgtccaccaccaccagcagcaccaccaccaccaccatcaccaccagcagcagcaggatgcagcagccccagatctctgtgtacagcggcagtgacagacatgctgtgcaggtgatccagcaggccctgcacaggcctcccagcagcgctgcccagtacctgcagcagatgtatgctgcccagcagcagcacctgatgctgcacacagctgccctgcagcagcagcacctgagcagcagccagctgcagagcctggccgctgtgcaggccagcctgagcagcggccggcccagcaccagccccactggatctgtgacccagcagagctccatgagccagaccagcatcaacctgagcaccagccccaccccagcccagctgatcagccgcagccaggccagcagcagcaccagcggcagcatcacccagcagaccatgctgctgggcagcaccagccccaccctgacagccagccaggcccagatgtacctgcgggcccagatgctgatcttcaccccagccaccaccgtggccgctgtgcagagcgacatccctgtggtgagcagcagcagcagcagcagctgccagagcgctgccacccaggtgcagaacctgaccctgcggagccagaagctgggcgtgctgagcagcagccagaatggaccacccaagtag

SEQ ID NO: 287398 - DNA, 444 bp, Artificial Sequence
  derived and/or modified sequence
atggccgaggccgagttcaaggaccacagcacagccatggacacagagcccaaccctggcaccagctctgtgtccaccaccaccagcagcaccaccaccaccaccatcaccaccagcagcagcaggatgcagcagccccagatctctgtgtacagcggcagtgacagacatgctgtgcaggccctgcacaggcctcccagcagcgctgcccagtacctgcagcagatgtatgctgcccagcagcagcacctgatgctgcacacagctgccctgcagcagcagcacctgagcagcagccagctgcagagcctggccgctgtgcaggccagcctgagcagcggccggcccagcaccagccccactggatctgtgacccagcagagctccatgagccagacctctgtgagcagcctgaacttcttcttcctggacctgaagttctag

SEQ ID NO: 287399 - DNA, 456 bp, Artificial Sequence
  derived and/or modified sequence
atggccgaggccgagttcaaggaccacagcacagccatggacacagagcccaaccctggcaccagctctgtgtccaccaccaccagcagcaccaccaccaccaccatcaccaccagcagcagcaggatgcagcagccccagatctctgtgtacagcggcagtgacagacatgctgtgcaggtgatccagcaggccctgcacaggcctcccagcagcgctgcccagtacctgcagcagatgtatgctgcccagcagcagcacctgatgctgcacacagctgccctgcagcagcagcacctgagcagcagccagctgcagagcctggccgctgtgcaggccagcctgagcagcggccggcccagcaccagccccactggatctgtgacccagcagagctccatgagccagacctctgtgagcagcctgaacttcttcttcctggacctgaagttctag

SEQ ID NO: 287400 - DNA, 772 bp, Artificial Sequence
  derived and/or modified sequence
gcagcccatgttagtgatggaggagagaagatggcggaagcggaatttaaggaccatagtacagctatggatactgaaccaaacccgggaacatcttctgtgtcaacaacaaccagcagtaccaccaccaccaccatcaccacttcctcctctcgaatgcagcagccacagatctctgtctacagtggttcagaccgacatgctgtacaggtaattcaacaggcattgcatcggccccccagctcagctgctcagtaccttcagcaaatgtatgcagcccaacaacagcacttgatgctgcatactgcagctcttcagcagcagcatttaagcagctcccagcttcagagccttgctgctgttcaggcaagtttgtccagtggaagaccatctacatctcccacaggaagtgtcacacagcagtcaagtatgtcccaaacgtctatcaacctctccacttctcctacacctgcacagttaataagccgttcccaggcttccagttctaccagcggcagtattacccaacagactatgttactagggagtacttcccctaccctaacggcaagccaagctcaaatgtatctccgagctcaaatgctgattttcacacccgctaccactgtggctgctgtacagtctgacattcctgttgtctcgtcgtcatcgtcatcttcctgtcagtctgcagctactcaggttcagaatttaacattacgcagccagaagttgggtgtattatctagctcacagaatggtccaccaaaaa

SEQ ID NO: 287401 - DNA, 1075 bp, Artificial Sequence
  derived and/or modified sequence
gcgcagcccatgttagtgatggaggagagaagatggcggaagcggaatttaaggaccatagtacagctatggatactgaaccaaacccgggaacatcttctgtgtcaacaacaaccagcagtaccaccaccaccaccatcaccacttcctcctctcgaatgcagcagccacagatctctgtctacagtggttcagaccgacatgctgtacaggcattgcatcggccccccagctcagctgctcagtaccttcagcaaatgtatgcagcccaacaacagcacttgatgctgcatactgcagctcttcagcagcagcatttaagcagctcccagcttcagagccttgctgctgttcaggcaagtttgtccagtggaagaccatctacatctcccacaggaagtgtcacacagcagtcaagtatgtcccaaacgtctgtaagttccctaaatttttttttcctggatttaaaattttaaagaattgttttccaaaagtaaactgttgttatttatgaagctgttattataatttgttgcatgctgtttaaagtaacaattgcccagaaatagaaatgataaaattcaagaattcagaactaatgttaaacttatgaaaatctgagtcttaaaaaaatctttttgtattatttcttgtatatccatttgcactgatcatgttcagatcttatgtggtttcagctttctgtgtgtattgaaagcctaaaatatacaatgcagggatattggccatgaatttactgtgatatacaatagtatgtcatgtccttggtagacatctaagcatttctaactttgtgcaattcacattttagaaattatactttcagcttacatgagttatttgggttcaatttgcaagtatccattcaagatagggtaatttattttgagaaaggagtaaaagaaagctgattcgctatattgcacatatatattgggaaattgtgccaagtttcccaggtaaaataaatttatgggcatggtaatacttgtttagcttttaattttggtataattttaaactgcaataataataaaaaaatttctgtatctac

SEQ ID NO: 287402 - DNA, 2087 bp, Artificial Sequence
  derived and/or modified sequence
agtgatggaggagagaagatggcggaagcggaatttaaggaccatagtacagctatggatactgaaccaaacccgggaacatcttctgtgtcaacaacaaccagcagtaccaccaccaccaccatcaccacttcctcctctcgaatgcagcagccacagatctctgtctacagtggttcagaccgacatgctgtacaggtaattcaacaggcattgcatcggccccccagctcagctgctcagtaccttcagcaaatgtatgcagcccaacaacagcacttgatgctgcatactgcagctcttcagcagcagcatttaagcagctcccagcttcagagccttgctgctgttcaggcaagtttgtccagtggaagaccatctacatctcccacaggaagtgtcacacagcagtcaagtatgtcccaaacgtctgtaagttccctaaatttttttttcctggatttaaaattttaaagaattgttttccaaaagtaaactgttgttatttatgaagctgttattataatttgttgcatgctgtttaaagtaacaattgcccagaaatagaaatgataaaattcaagaattcagaactaatgttaaacttatgaaaatctgagtcttaaaaaaatctttttgtattatttcttgtatatccatttgcactgatcatgttcagatcttatgtggtttcagctttctgtgtgtattgaaagcctaaaatatacaatgcagggatattggccatgaatttactgtgatatacaatagtatgtcatgtccttggtagacatctaagcatttctaactttgtgcaattcacattttagaaattatactttcagcttacatgagttatttgggttcaatttgcaagtatccattcaagatagggtaatttattttgagaaaggagtaaaagaaagctgattcgctatattgcacatatatattgggaaattgtgccaagtttcccaggtaaaataaatttatgggcatggtaatacttgtttagcttttaattttggtataattttaaactgcaataataataaaaaaatttctgtatctactctactcagattaatcaattattgcatattgccccattactttatcattcattcttttccactacatgtatacatatttttttctgagtcatttgtaagttgagatatgttcctttattcctaaatactttgatgtgtatttcctaagaacaaggctattgttttttgaagccacagaaaaattactaaattcaggaaatataacattgatacagtgcagttcattttcacatttcatcatttgtctcaggtttcccaacctcatcactatggacattatgagccagataattctttgttgtcaggggctatcgtgtaatttataggatgtttagcagcatccctggctactagatgccggcagcttgtggtctttctccttcctctagtgtgacaactataggtgtttcctggtggggggcaaactgcctgtagttgagaacctaataatgtcctttctagatattttttcctggtccagaatggtaatactttgatacttcataaaattggctccaatacaatatagtttgtaggttgttaaggaattgaaggttaaggaattgtgctctatttcttcagctaagggtatggtctttgctaactacatgctgtggtcagcatatagctgtggttttttttgttgtttggtttttttttctggctgttgatctgactttttttttttggcgtgggaatgtcctggagtgtgaacaagattagtttaaaaagttccctatgacttgaagatgttagattaaatgaaaaacttaaataatgtaacctagctcttaagcattaatactggagtttttgtcattgacatcagatgtctttaatacaatggtaattaaggaaaggagtggtaaatattttgtgggctactgaaggaaattatatagacaaattctttattctgtgaaatactggaataacaataggatgtatttgtatagatatgttattttgaatttttttccttcatgttattaaaaggtatctttttaaactgtc

SEQ ID NO: 287403 - DNA, 744 bp, Artificial Sequence
  derived and/or modified sequence
atggccgaggccgagttcaaggaccacagcaccgccatggacaccgaacccaacccaggcacttctagtgtgtcgaccaccacgtcaagtaccaccacgaccaccattaccactagcagttccaggatgcagcagccacagatcagcgtgtacagtggaagtgataggcatgccgtgcaggtgattcagcaggccctgcaccgacccccttctagcgctgcccagtacctgcagcaaatgtacgccgcccagcagcagcatcttatgttgcacacagctgccttacagcaacagcacttatcaagttcgcagctgcagagcctagctgccgtgcaagcctccctgagcagcggtagaccatccaccagccctactggttcagtaactcagcagagtagcatgtctcagaccagcattaacctctcaacttcccctacccctgcacagctgattagccggtcccaagcctctagctccacatcaggttcaatcactcaacagactatgttgctcggaagtacgagtcctaccttaaccgcttcccaggcgcagatgtatttgagagcccaaatgctgatcttcactcccgcgactactgtggcagcagtacaatcagatatcccggtggtgagcagctcatcctcatctagctgtcagagcgcggccacgcaagttcagaatctgacgcttcgcagtcagaaactgggggtgttgagctccagtcagaacggcccgcctaagtag

SEQ ID NO: 287404 - DNA, 444 bp, Artificial Sequence
  derived and/or modified sequence
atggccgaggccgagttcaaggaccacagcaccgccatggacaccgagccaaatcccggcactagcagtgtgtctaccacaaccagtagcacaactactaccacaatcaccacatcatctagcagaatgcaacaaccccagatctccgtgtacagtggttccgataggcatgctgtacaggcccttcatcggccccccagttccgctgctcagtatctgcagcagatgtacgctgcccagcagcagcacctcatgttacacacagctgctcttcagcaacagcacctgagctcatcacaattgcagtccctggccgctgtacaggccagcctgagctcagggcggccaagtacaagccctactggatccgtgacccagcagtcttctatgtcacagaccagcgttagcagcctaaatttcttcttcctggacttaaaattctag

SEQ ID NO: 287405 - DNA, 456 bp, Artificial Sequence
  derived and/or modified sequence
atggccgaggccgagttcaaggaccacagcaccgccatggacaccgagccaaaccccggcacgtcgtccgtttctacaaccacaagctcgacaacaacaacaacgataaccacatccagcagtcgcatgcagcagccacagatctcggtgtactcgggcagcgatcgccatgcggtacaggtgattcaacaggcacttcataggcctccctccagtgccgcgcaatacttacaacaaatgtacgctgcccagcagcaacaccttatgttacataccgcagccctccaacaacagcatttgtccagtagccagctccagagcctagcagcagtccaggcttctctgtcaagcggcaggccttccacctctcccaccggctccgttacacagcagtcgtccatgagccagacgtcagtttctagcctgaatttcttttttctcgatctgaagttttag

SEQ ID NO: 287406 - DNA, 744 bp, Artificial Sequence
  derived and/or modified sequence
atggcagaggcagagtttaaggaccactccactgcaatggataccgagcccaatcctggtacctcttccgtgtcaacaactacaagctccactactaccacgaccattaccaccagtagtagcagaatgcagcaacctcagatcagtgtttacagcggaagcgacagacatgccgtgcaggtgatccagcaggcactgcatcgacccccatccagtgcggctcagtaccttcagcagatgtatgcagctcagcagcagcatcttatgctgcacactgccgcattgcagcagcagcatctttcatcctcccagctgcagtctctcgccgcagtgcaggcctccctgagctctggcaggccatccacctcccctacgggttcagtgacgcagcagagtagcatgtcccaaacatctattaacttaagtaccagtcccacccccgcacagttgatcagtagatctcaggcatctagcagcacgagcggatcaatcactcaacagacaatgcttcttggctccacaagccccacactcacagcttcgcaagcccaaatgtacctccgagcacagatgctgatctttaccccagccaccactgtggccgctgtgcagagcgatatccccgtggtctcttcctcttcttcttccagctgtcagtccgctgcaactcaggtccaaaatctcaccctacggagccagaaacttggggtgctgagctcatcacaaaatggcccacctaagtag

SEQ ID NO: 287407 - DNA, 444 bp, Artificial Sequence
  derived and/or modified sequence
atggctgaagccgagttcaaggaccacagtaccgccatggacaccgagcccaacccgggaacctctagtgtctccaccactaccagttcaacaactactactaccatcactacttctagctcaaggatgcagcagccccagatttcagtgtactctggctctgatcgccacgctgtgcaagcattgcacaggcccccaagtagtgccgctcagtatctgcagcaaatgtatgctgcccagcagcagcacctgatgctgcacaccgctgccctccaacaacagcatttaagttcttcccagctgcagtccctggcagcagtccaggctagcctgagttcaggccgacccagcaccagtcctactggctccgtgacacagcagagtagcatgtcacagacatccgtaagttcattgaattttttttttcttgacctcaagttctag

SEQ ID NO: 287408 - DNA, 456 bp, Artificial Sequence
  derived and/or modified sequence
atggccgaggccgagttcaaggaccacagcaccgcaatggatacggaaccaaaccccggaaccagctcagtgtccacgacaacctcaagtacgaccacaacaactatcaccacatcaagcagcaggatgcagcagccccaaatttccgtttacagcggctccgatcgtcatgcagtccaggtcattcagcaagcgctccaccggcctcccagtagtgcagctcagtatctgcagcagatgtacgcggctcagcagcagcaccttatgctgcacacagcggctctgcagcaacaacatctgtcatctagccaacttcagagccttgccgcagtacaagcaagtctgtcctccgggaggcctagcacttctcccacgggtagcgtgacccagcagtccagcatgagtcagacgagtgtgagctctctcaacttcttttttctcgatctgaaattctag

SEQ ID NO: 287409 - DNA, 744 bp, Artificial Sequence
  derived and/or modified sequence
atggccgaggccgagttcaaggaccacagcaccgccatggacaccgagcccaaccccggcaccagcagcgtgagcaccaccaccagcagcaccaccaccaccaccatcaccaccagcagcagcagaatgcagcagccccagatcagcgtgtacagcggcagcgacagacacgccgtgcaggtgatccagcaggccctgcacagaccccccagcagcgccgcccagtacctgcagcagatgtacgccgcccagcagcagcacctgatgctgcacaccgccgccctgcagcagcagcacctgagcagcagccagctgcagagcctggccgccgtgcaggccagcctgagcagcggcagacccagcaccagccccaccggcagcgtgacccagcagagcagcatgagccagaccagcatcaacctgagcaccagccccacccccgcccagctgatcagcagaagccaggccagcagcagcaccagcggcagcatcacccagcagaccatgctgctgggcagcaccagccccaccctgaccgccagccaggcccagatgtacctgagagcccagatgctgatcttcacccccgccaccaccgtggccgccgtgcagagcgacatccccgtggtgagcagcagcagcagcagcagctgccagagcgccgccacccaggtgcagaacctgaccctgagaagccagaagctgggcgtgctgagcagcagccagaacggcccccccaagtag

SEQ ID NO: 287410 - DNA, 444 bp, Artificial Sequence
  derived and/or modified sequence
atggccgaggccgagttcaaggaccacagcaccgccatggacaccgagcccaaccccggcaccagcagcgtgagcaccaccaccagcagcaccaccaccaccaccatcaccaccagcagcagcagaatgcagcagccccagatcagcgtgtacagcggcagcgacagacacgccgtgcaggccctgcacagaccccccagcagcgccgcccagtacctgcagcagatgtacgccgcccagcagcagcacctgatgctgcacaccgccgccctgcagcagcagcacctgagcagcagccagctgcagagcctggccgccgtgcaggccagcctgagcagcggcagacccagcaccagccccaccggcagcgtgacccagcagagcagcatgagccagaccagcgtgagcagcctgaacttcttcttcctggacctgaagttctag

SEQ ID NO: 287411 - DNA, 456 bp, Artificial Sequence
  derived and/or modified sequence
atggccgaggccgagttcaaggaccacagcaccgccatggacaccgagcccaaccccggcaccagcagcgtgagcaccaccaccagcagcaccaccaccaccaccatcaccaccagcagcagcagaatgcagcagccccagatcagcgtgtacagcggcagcgacagacacgccgtgcaggtgatccagcaggccctgcacagaccccccagcagcgccgcccagtacctgcagcagatgtacgccgcccagcagcagcacctgatgctgcacaccgccgccctgcagcagcagcacctgagcagcagccagctgcagagcctggccgccgtgcaggccagcctgagcagcggcagacccagcaccagccccaccggcagcgtgacccagcagagcagcatgagccagaccagcgtgagcagcctgaacttcttcttcctggacctgaagttctag

SEQ ID NO: 287412 - DNA, 210 bp, Artificial Sequence
  derived and/or modified sequence
atgtgctacgtggtccctggctgtttcatttacatttgcggctgtactaggattaagtcaacacatttcaacggcaaatcacagatggtcgacctaaaaagccagagttgggatctcgaaaggctggagaacaaaccacccccagccgtgtatgacctcgccgctaccaccagtcagttgggtgagtgggccaaatctagaatctggtag

SEQ ID NO: 287413 - DNA, 303 bp, Artificial Sequence
  derived and/or modified sequence
atggggacatctagtattttcctatgcgtcttattcctgtgcggtgctctcggtctgaccatgtctcctgctcgcggtagactgcgctgttacatctgtggattcactaagccatgccatcccgtgcctactgagtgcagagacgatgaagcatgtgggatttcgatcggcacatcaggacgcacgctcgtgcagtggcctttttctcgacgattgcccaccagtatccaccctgcttttcctgtggctcccgccagtgcctgcctctttcatccaacggaccagagcgagatcactgagtag

SEQ ID NO: 287414 - protein, 921 aa, Artificial Sequence
  derived and/or modified sequence
MRPEGAGMELGGGEERLPEESRREHWQLLGNLKTTVEGLVSTNSPNVWSKYGGLERLCRDMQSILYHGLIRDQACRRQTDYWQFVKDIRWLSPHSALHVEKFISVHENDQSSADGASERAVAELWLQHSLQYHCLSAQLRPLLGDRQYIRKFYTDAAFLLSDAHVTAMLQCLEAVEQNNPRLLAQIDASMFARKHESPLLVTKSQSLTALPSSTYTPPNSYAQHSYFGSFSSLHQSVPNNGSERRSTSFPLSGPPRKPQESRGHVSPAEDQTIQAPPVSVSALARDSPLTPNEMSSSTLTSPIEASWVSSQNDSPGDASEGPEYLAIGNLDPRGRTASCQSHSSNAESSSSNLFSSSSSQKPDSAASSLGDQEGGGESQLSSVLRRSSFSEGQTLTVTSGAKKSHIRSHSDTSIASRGAPESCNDKAKLRGPLPYSGQSSEVSTPSSLYMEYEGGRYLCSGEGMFRRPSEGQSLISYLSEQDFGSCADLEKENAHFSISESLIAAIELMKCNMMSQCLEEEEVEEEDSDREIQELKQKIRLRRQQIRTKNLLPMYQEAEHGSFRVTSSSSQFSSRDSAQLSDSGSADEVDEFEIQDGSEGSNLTHISKNGLSVSLASMFSDADIRRNTASSSKSFVSSQSFSHCFLHSTSAEAVAMGLLKQFEGMQLPAASELEWLVPEHDAPQKLLPIPDSLPISPDDGQHADIYKLRIRVRGNLEWAPPRPQIIFNVHPAPTRKIAVAKQNYRCAGCGIRTDPDYIKRLRYCEYLGKYFCQCCHENAQMAIPSRVLRKWDFSKYYVSNFSKDLLIKIWNDPLFNVQDINSALYRKVKLLNQVRLLRVQLCHMKNMFKTCRLAKELLDSFDTVPGHLTEDLHLYSLNDLTATRKGELGPRLAELTRAGATHVERCMVRKSHCSMQLSPCF

SEQ ID NO: 287415 - DNA, 2766 bp, Artificial Sequence
  derived and/or modified sequence
atgagacccgagggcgccggcatggagctgggcggcggcgaggagagactgcccgaggagagcagaagagagcactggcagctgctgggcaacctgaagaccaccgtggagggcctggtgagcaccaacagccccaacgtgtggagcaagtacggcggcctggagagactgtgcagagacatgcagagcatcctgtaccacggcctgatcagagaccaggcctgcagaagacagaccgactactggcagttcgtgaaggacatcagatggctgagcccccacagcgccctgcacgtggagaagttcatcagcgtgcacgagaacgaccagagcagcgccgacggcgccagcgagagagccgtggccgagctgtggctgcagcacagcctgcagtaccactgcctgagcgcccagctgagacccctgctgggcgacagacagtacatcagaaagttctacaccgacgccgccttcctgctgagcgacgcccacgtgaccgccatgctgcagtgcctggaggccgtggagcagaacaaccccagactgctggcccagatcgacgccagcatgttcgccagaaagcacgagagccccctgctggtgaccaagagccagagcctgaccgccctgcccagcagcacctacaccccccccaacagctacgcccagcacagctacttcggcagcttcagcagcctgcaccagagcgtgcccaacaacggcagcgagagaagaagcaccagcttccccctgagcggcccccccagaaagccccaggagagcagaggccacgtgagccccgccgaggaccagaccatccaggccccccccgtgagcgtgagcgccctggccagagacagccccctgacccccaacgagatgagcagcagcaccctgaccagccccatcgaggccagctgggtgagcagccagaacgacagccccggcgacgccagcgagggccccgagtacctggccatcggcaacctggaccccagaggcagaaccgccagctgccagagccacagcagcaacgccgagagcagcagcagcaacctgttcagcagcagcagcagccagaagcccgacagcgccgccagcagcctgggcgaccaggagggcggcggcgagagccagctgagcagcgtgctgagaagaagcagcttcagcgagggccagaccctgaccgtgaccagcggcgccaagaagagccacatcagaagccacagcgacaccagcatcgccagcagaggcgcccccgagagctgcaacgacaaggccaagctgagaggccccctgccctacagcggccagagcagcgaggtgagcacccccagcagcctgtacatggagtacgagggcggcagatacctgtgcagcggcgagggcatgttcagaagacccagcgagggccagagcctgatcagctacctgagcgagcaggacttcggcagctgcgccgacctggagaaggagaacgcccacttcagcatcagcgagagcctgatcgccgccatcgagctgatgaagtgcaacatgatgagccagtgcctggaggaggaggaggtggaggaggaggacagcgacagagagatccaggagctgaagcagaagatcagactgagaagacagcagatcagaaccaagaacctgctgcccatgtaccaggaggccgagcacggcagcttcagagtgaccagcagcagcagccagttcagcagcagagacagcgcccagctgagcgacagcggcagcgccgacgaggtggacgagttcgagatccaggacggcagcgagggcagcaacctgacccacatcagcaagaacggcctgagcgtgagcctggccagcatgttcagcgacgccgacatcagaagaaacaccgccagcagcagcaagagcttcgtgagcagccagagcttcagccactgcttcctgcacagcaccagcgccgaggccgtggccatgggcctgctgaagcagttcgagggcatgcagctgcccgccgccagcgagctggagtggctggtgcccgagcacgacgccccccagaagctgctgcccatccccgacagcctgcccatcagccccgacgacggccagcacgccgacatctacaagctgagaatcagagtgagaggcaacctggagtgggccccccccagaccccagatcatcttcaacgtgcaccccgcccccaccagaaagatcgccgtggccaagcagaactacagatgcgccggctgcggcatcagaaccgaccccgactacatcaagagactgagatactgcgagtacctgggcaagtacttctgccagtgctgccacgagaacgcccagatggccatccccagcagagtgctgagaaagtgggacttcagcaagtactacgtgagcaacttcagcaaggacctgctgatcaagatctggaacgaccccctgttcaacgtgcaggacatcaacagcgccctgtacagaaaggtgaagctgctgaaccaggtgagactgctgagagtgcagctgtgccacatgaagaacatgttcaagacctgcagactggccaaggagctgctggacagcttcgacaccgtgcccggccacctgaccgaggacctgcacctgtacagcctgaacgacctgaccgccaccagaaagggcgagctgggccccagactggccgagctgaccagagccggcgccacccacgtggagagatgcatggtgagaaagagccactgcagcatgcagctgagcccctgcttctag

SEQ ID NO: 287416 - DNA, 2766 bp, Artificial Sequence
  derived and/or modified sequence
atgagacctgagggtgctggaatggaacttggcgggggggaggagaggctcccagaggagagtagacgggaacattggcaactgcttggaaacctaaagacaacagtagagggacttgtgtcgacaaactctcctaacgtttggtctaaatacggaggactggagcgcttgtgtcgtgatatgcaatctatcctatatcatgggttaattagggatcaagcatgcaggcgccagaccgattattggcagttcgtcaaggacattagatggctcagtccccacagtgcactccacgtggaaaagttcatttccgttcatgaaaatgaccagagctcagctgacggcgctagcgagcgggctgtggccgaactctggttacagcattcattgcagtaccactgtctcagcgcacagctgaggccccttctgggcgaccggcagtacatccgcaagttttataccgatgcggcatttctgttaagtgatgcccacgttactgctatgttacagtgcctggaagccgtggaacagaacaatcccagactccttgcccaaattgacgctagcatgttcgccaggaagcatgaaagccctctattagtgaccaaatcccagtccctgaccgctctcccaagttccacatatacgcctccaaatagctatgcccagcactcttattttggatcattcagctccctgcaccagtcagtacctaacaatggcagcgaacgcagatcaacctctttcccgttaagcggcccaccaaggaaaccccaggagtcacggggtcatgtctcacctgctgaagatcagacaatccaggcccctcctgtcagtgtgtctgctcttgcgagggactcaccactaacaccgaacgaaatgtcctcttcaacattgacctcacccatagaggcttcctgggtgtcgtcgcagaatgattcgcccggagatgcctcagaggggccagaatatctggctatcggtaatttggatcctcgcggtcgcacggcctcttgccaatctcattcatccaatgcggaatcttcctcttccaacctgttttccagttcttcatctcaaaagccggatagcgctgccagctctctgggggatcaggaaggtggaggggaaagccagttgtcctcagtgttaaggagatcttctttttctgaaggccagaccctcacagttacaagtggggccaagaagtcccacattagatctcattcagacacctcaatagcctctcgcggggcccctgagtcatgcaatgacaaggcaaaactgcgcggccccctgccatacagtggacaatccagcgaagttagcaccccctcgagtctttatatggagtacgagggaggacgctacttgtgctcaggcgagggcatgttccgaagaccttccgaaggacagtctctgattagctacctgagcgagcaggatttcggtagctgcgctgatctcgaaaaagagaatgctcatttctccatatccgaaagcctaattgctgctatcgaactcatgaagtgcaatatgatgtcacagtgcttggaggaggaagaagttgaggaggaggatagcgatcgggagattcaagagctcaaacagaaaattaggctgcgtagacaacagatcaggaccaagaaccttctcccaatgtatcaggaggctgagcacggttccttccgtgtaacgtcctcgtcctcacagtttagttcaagagacagcgctcagctgtcggacagcggatcagccgacgaggtagacgagtttgagatccaggacggaagcgagggctcaaatttgacacacatctcaaaaaatggcttatcagtaagccttgccagcatgttttcagacgccgacatccgcaggaacactgcttcctcctccaaatctttcgtgtcgtcccagagcttttcacactgttttctgcatagcacttccgcagaggccgttgctatgggccttttgaaacagttcgaaggaatgcaactgcctgccgcttcagagctggaatggcttgttcctgagcacgacgcgccacagaaattgctgcctatccctgacagcctcccaatttcaccagacgacggtcaacacgcagatatctataagctgcgcatcagggtaagagggaacctggagtgggcaccgccaaggccgcaaatcatcttcaatgtgcatccagcgcccacacggaagattgccgtcgctaagcagaactatcggtgcgccgggtgcgggatccgaaccgatccggactacattaagagactgcgatattgtgagtacctgggtaagtacttttgccagtgttgtcacgagaatgctcagatggccataccctctagggtcttaagaaagtgggactttagcaaatattatgtgtcaaatttcagtaaggaccttctgatcaaaatatggaatgacccgttatttaacgtccaggacattaacagtgctctgtacagaaaagtgaagcttttaaaccaggtgcgcttgctgcgggtgcaactatgtcatatgaagaatatgtttaaaacatgtcgtcttgcaaaggaattgttggattctttcgatacagttcccggccacctcaccgaggacttgcacctctactctctgaacgaccttactgcaactcggaaaggagaacttgggccccgactcgccgagcttaccagggccggcgctacccacgtagagcggtgtatggtgcgcaaaagccactgctcgatgcaactttcgccgtgcttttag

SEQ ID NO: 287417 - DNA, 2766 bp, Artificial Sequence
  derived and/or modified sequence
atgaggcctgagggcgccggcatggagctgggcggcggggaggagcggctgcctgaggagagccggcgggagcactggcagctgctgggcaacctgaagaccaccgtggagggcctggtgtccaccaacagccccaacgtgtggagcaaatatggaggcctggagcggctgtgccgggacatgcagagcatcctgtaccacggcctcatccgggaccaggcctgccggcggcagacagactactggcagtttgtgaaggacatccgctggctgagcccccacagcgccctgcacgtggagaagttcatctctgtgcatgaaaatgaccagagcagcgcagatggagccagcgagagagctgtggccgagctgtggctgcagcacagcctgcagtaccactgcctgagcgcccagctgcggcccctgctgggggaccggcagtacatcaggaagttctacacagatgctgccttcctgctgagtgatgcccacgtgacagccatgctgcagtgcctggaggccgtggagcagaacaacccccggctgctggcccagattgatgcctccatgtttgccaggaagcatgagagccccctgctggtgaccaagagccagagcctgacagccctgcccagcagcacctacaccccacccaacagctatgcccagcacagctacttcggcagcttcagcagcctgcaccagagcgtgcccaacaacggcagcgagcggcgcagcaccagcttccccctgagcggcccccccaggaagccccaggagagccggggccacgtgtccccagctgaggaccagaccatccaggcccctcctgtgtctgtgtctgccctggcccgggacagccccctgaccccaaatgagatgagcagcagcaccctgaccagccccatcgaggcctcctgggtgagcagccagaatgacagccctggagatgccagcgagggccctgagtacctggccatcggcaacctggacccccggggccgcacagccagctgccagagccacagcagcaatgctgagagcagcagcagcaacctcttcagcagcagcagcagccagaagccagacagcgctgccagcagcctgggggaccaggagggcggcggggagagccagctgagctctgtgctgcggcgcagcagcttcagcgagggccagaccctgactgtgaccagcggggccaagaagagccacatccgcagccacagcgacaccagcatcgccagcagaggagcccctgagagctgcaatgacaaggccaagctgcggggccccctgccctacagcggccagagcagcgaggtgtccacccccagcagcctgtacatggagtatgagggcggccgctacctgtgcagcggggagggcatgttccggcggcccagcgagggccagagcctcatctcctacctgtctgagcaggactttggcagctgtgccgacctggagaaggaaaatgcccacttcagcatcagcgagagcctgattgctgccatcgagctgatgaagtgcaacatgatgagccagtgcctggaggaggaggaggtggaggaggaggacagcgaccgggagatccaggagctgaagcagaagatccggctgcggcggcagcagatccgcaccaagaacctgctgcccatgtaccaggaggccgagcacggcagcttccgggtgaccagcagcagcagccagttcagcagccgggacagcgcccagctgagtgacagcggcagcgcagatgaggtggatgaatttgagatccaggacggcagcgagggcagcaacctgacccacatcagcaagaatggcctgtctgtgtccctggcctccatgttcagtgatgctgacatcagaagaaacacagccagcagcagcaagagctttgtgagcagccagagcttcagccactgcttcctgcacagcaccagcgctgaggccgtggccatgggcctgctgaagcagtttgagggcatgcagctgcctgctgccagcgagctggagtggctggtgcctgagcatgatgccccccagaagctgctgcccatcccagacagcctgcccatcagcccagatgatggccagcacgccgacatctacaagctgcgcatccgggtgcggggcaacctggagtgggccccaccccggccccagatcatcttcaacgtgcacccagcccccaccaggaagattgctgtggccaagcagaactaccgctgtgccggctgcggcatcagaacagatcctgactacatcaagaggctgcgctactgtgagtacctgggcaagtacttctgccagtgctgccatgaaaatgcccagatggccatccccagccgggtgctgaggaagtgggacttcagcaagtactacgtgagcaacttcagcaaggacctgctgatcaagatctggaatgaccccctcttcaacgtgcaggacatcaacagcgccctgtacaggaaggtgaagctgctgaaccaggtgcggctgctgcgggtgcagctgtgccacatgaagaacatgttcaagacctgccgcctggccaaggagctgctggacagctttgacacagtgcccggccacctgacagaggacctgcacctgtacagcctgaatgacctgacagccaccaggaaaggagagctgggcccccggctggccgagctgacccgggccggggccacccacgtggagcgctgcatggtgaggaagagccactgcagcatgcagctgagcccctgcttctag

SEQ ID NO: 287418 - DNA, 2949 bp, Artificial Sequence
  derived and/or modified sequence
ggccgggatagaagccgcagcccaggcggcggtccctcccgctgtcgccgcccgggtgtagcgcatcacccggagcccaccggccgcaggtgcctcctccggccccagggggccccgggagccctgaagggcgaagcggcagggacgcctctcttgggcgaagaggcggcctcaccgccccggatgcggccggagggcgcgggaatggagctcggaggcggcgaggagcgcctgcctgaggagagcaggagggagcactggcagttgctgggtaatttgaagacgacggtggagggtttggtatcaaccaacagccccaacgtctggtctaagtatggtggcttggagcggctttgcagggacatgcagagcatcctctatcacgggcttatccgtgaccaggcgtgccgccgccagacggattactggcagttcgtgaaagacatccggtggctcagtccccactcagcccttcacgtggagaagttcatcagcgtgcacgagaacgaccagagcagtgctgatggtgccagtgaacgtgctgttgccgagctgtggctgcagcacagcctgcagtaccactgcctctcagcccagctccggcccctgctcggggatagacagtatatcagaaaattctacacagatgctgccttcctgctaagtgacgctcatgtcacggccatgctgcagtgcctggaagcagtggaacagaacaacccccgcctcctggctcagatcgatgcgtccatgtttgccagaaagcacgagagcccgctcctggtgacaaagagccagagcctgacagccctgcccagttccacatacacccctccaaacagctatgctcagcattcctactttgggtccttctctagcctccaccaatccgtgcccaacaatggctcagagagaagatctacttcctttccactctctggccctccccggaaacctcaagaaagcagagggcacgtctcaccagcagaggatcaaaccatccaagcccccccagtttcagtctctgcactagccagggattcccctttgaccccaaatgaaatgagctccagtactctgaccagccccatagaggcatcctgggtcagcagccagaatgattccccaggtgatgccagtgaggggcctgagtacctggccattggcaacttggacccccgaggccggactgccagctgtcagagtcacagcagcaatgccgagagcagcagttccaatttgttctcctccagcagctcccagaagccagattctgctgcctcttccttaggggaccaggaaggaggtggggagagccagctgtccagtgtcctccgcaggtccagcttctcagaggggcagacactcactgtcaccagtggggcaaagaaaagccacattcgctcccattcggataccagcattgcctccaggggagctccagaatcctgcaatgataaggcgaagttgagaggccctttgccctactctggtcaaagcagtgaagtcagcacacccagctctctgtacatggaatatgaaggtggtcggtacctgtgctcaggggaaggcatgttccgaagaccatcagaaggacagtccctcatcagctacctctctgagcaagacttcggcagctgtgccgacctggaaaaggagaatgcccacttcagcatctcagagtccttaattgctgccatcgagctaatgaagtgcaacatgatgagccagtgcctagaggaggaggaagtggaagaggaagacagtgatagagagatccaggagctgaagcagaagatccgccttcggcgccagcaaatccgcaccaagaacctgctccccatgtaccaggaggctgagcacggaagctttcgggtcacctccagcagctcccagttcagctcacgtgattcggcacagctctctgactctggctctgctgatgaggttgatgaatttgaaatccaagatggtagcgaaggatctaacctgactcacatatcaaagaacggactgtcagtgtcactggcctcgatgttctcagatgctgacatcagaaggaacacagcctcaagcagcaaatccttcgtttcctcccagtccttctcccactgcttcctgcactccacgtctgctgaggcggtggccatggggctcctgaagcagtttgaggggatgcagcttccagccgcctcggagctggagtggcttgtcccggagcatgatgcccctcagaagctcctgcccattcctgactcactgcccatctcaccggatgacgggcagcacgctgacatctacaagctgcggattcgtgttcgtggcaacttggagtgggccccgccccggcctcagataatttttaatgttcatccagccccaacgaggaaaattgccgtggccaagcagaattaccgctgtgcaggatgtggcatccggactgaccctgattacatcaagcgactgcggtactgtgagtacctgggcaagtacttctgccagtgctgccacgagaatgcccagatggccatccccagccgggttctgcgcaagtgggacttcagcaagtactacgtcagcaacttctccaaggacctgctcattaagatctggaatgatcctctcttcaacgtgcaggacataaacagtgccctctataggaaggtcaagctgctcaatcaagtccggctgctgcgggtccagctgtgtcacatgaagaacatgttcaagacttgccgactggccaaggagcttctggattcctttgacacagtcccaggccacctgacagaggacctccacctgtactcactgaatgacctgactgcgaccaggaagggggagctggggccccggcttgctgagctcaccagggcaggggctacccatgtggagagatgcatggtgagaaagtctcactgtagcatgcagctgagcccttgcttttag

SEQ ID NO: 287419 - DNA, 2766 bp, Artificial Sequence
  derived and/or modified sequence
atgcggcccgagggcgccggcatggagctgggcggcggcgaggagcggctgcccgaggagagtcgtcgcgagcactggcaactcctgggtaacctaaagacaactgtagagggcttggtgagtacaaacagtccgaacgtgtggtctaagtacggggggttagaacggttatgtcgtgacatgcagagtatcttatatcacggactgatcagggaccaagcttgccggcggcagaccgactattggcagttcgttaaagatattagatggctcagcccccactctgctttacatgtggagaagtttatttccgtccatgaaaacgatcagtcctctgcagatggcgcctccgagagggcagtggccgagctatggctgcagcactctctacagtatcattgtctgtcggcccaactgcgacccctgctcggcgatcgccagtatatacgaaaattttacacagatgccgcctttctcctgtcggacgcacatgtcaccgccatgttacagtgcttagaggcagtggaacagaacaaccctagactcctggctcagattgatgccagtatgttcgcccggaaacatgaaagtcctctgctggtcaccaaatcccagtccctcaccgcactcccaagcagtacctataccccacctaacagctacgcccagcactcttattttggatctttctcttctcttcatcagtcggtgccaaataacggcagtgagaggcggagtacctcatttcctctatctggcccgcctcggaaaccccaagaaagtcgagggcacgtcagcccagcggaagaccaaacgatccaggcgcctccagtgtctgtttcggcccttgcccgggattccccacttacaccgaacgaaatgtcgtcttccaccctgacctcccccatagaagcctcatgggtaagctctcagaatgacagtccaggcgacgcctccgaagggccagaatatctcgctataggtaacttggaccctaggggaagaaccgcatcctgccagagtcacagtagtaatgctgaaagctcaagcagcaatctgttcagttcttccagctcccaaaaacccgactcagctgccagttctctcggcgatcaggagggcgggggcgaaagccagttatcgtctgttttgcgacgcagtagtttcagtgagggacagactcttactgttacctcaggtgccaagaagtcacacatccggtctcattcagatacctccatcgcttcacggggggcccctgaaagttgcaacgataaagctaagcttcgggggccacttccctatagtggtcagagcagtgaagtttctaccccctctagcctctacatggagtatgaaggaggccgctacctgtgcagtggtgaaggcatgtttcgcaggccgtcggaggggcaatctctgatctcctatttatcggaacaggacttcgggtcctgtgccgatttagagaaagagaacgctcatttttcgatttccgaatccctcatcgccgccattgaactgatgaagtgtaatatgatgagccagtgtctggaggaagaggaggtggaggaggaggatagcgatagagaaatacaagaactgaaacaaaaaatccgactcaggcggcagcagatacggaccaagaacctgttacctatgtaccaagaagccgagcacgggagctttcgcgtgacaagctcatcctctcagttttcttctagggactcggctcagctgagcgactcaggaagcgccgacgaggtcgacgagtttgagatccaggacgggtcagaggggagcaacctgactcatatcagcaaaaacggtttatctgtgtctctggctagtatgttttcggacgccgatatccgtagaaacaccgctagttcttccaagagttttgtgtcatctcagtctttttctcattgcttccttcactcaacaagtgcggaggcagtggccatggggctgctaaaacagtttgagggaatgcagttgcccgcagcgagcgaactcgaatggctggtgccggagcacgatgcaccacaaaaattgctgcccatccctgactcactgcccataagtccggacgatgggcagcacgccgacatttataagctgcggatcagagtgcggggtaatctggagtgggcccctccacgccctcaaataatcttcaacgtgcatcctgctcctacccggaaaattgctgtggcgaagcagaattaccggtgtgccggttgcggcatcaggacagatcctgattatattaaacgacttaggtattgtgagtacttgggcaagtacttctgtcagtgttgccatgagaacgctcagatggcaataccctctcgtgtgcttcgaaagtgggatttcagcaagtactacgtatctaacttcagcaaggaccttctgattaagatctggaacgatcccctgtttaatgttcaggacatcaacagcgctttgtacaggaaagtgaaactcctcaaccaggttagactgctgcgggtacagttatgtcacatgaagaacatgttcaagacttgccgtctggctaaagagctcctggacagctttgataccgtgccaggacacctgacagaggacctgcacctctatagcctaaatgatctaacggcgactcgcaaaggagaactcgggcctaggctggccgaattaaccagggccggtgctacacacgtggaaagatgtatggtcaggaaatctcattgcagcatgcagctcagtccctgcttttag

SEQ ID NO: 287420 - DNA, 2766 bp, Artificial Sequence
  derived and/or modified sequence
atgagaccagaaggagctggaatggagctaggagggggagaagagcgtctacctgaggagagcagaagagaacactggcagctgcttggcaacctgaagacgacagtcgagggcctcgtctctacaaattctccaaacgtgtggtcgaaatatggcggtctggaacggctgtgcagggatatgcaatccatcctgtatcacggcttgatccgcgaccaggcttgccggaggcagacagactattggcaattcgttaaagacatcaggtggttatccccccactctgccctccacgtggaaaagttcatatcagtgcacgagaacgaccagagttccgctgacggcgcttctgagcgcgcagtggcggagctgtggctccagcattccctgcagtaccattgcctgtctgcccagctccgccctctacttggtgacagacagtacatacgcaagttctacacggacgctgctttcctgctcagtgatgctcacgtgacggctatgctgcagtgcttagaggcggttgagcagaataacccgagattgttggcgcagattgatgcttctatgttcgcgcgaaagcatgaaagcccgctgttggttacaaaaagtcagagtctcacagctctgccttcctctacctatactccaccaaattcatacgctcagcatagctatttcggatcattctctagcctccatcagtcagttcctaataatgggtcagagcgccgaagtacttctttcccgctgagcggcccaccacgcaagccccaagagagcagggggcacgtatcaccagccgaagaccagacaatacaggccccacctgtgtcagtttccgctcttgctcgcgatagccccctgactcctaacgagatgtcatcatccactttgacgagtccaatcgaagcctcctgggtgagctcgcagaacgacagccctggcgacgcctcagaggggcctgaatacctggcgattggtaacctcgaccctagaggcagaacagcatcatgtcagtctcacagctcaaacgcagaatcctcaagttctaatctattctcctcttcttcttcacaaaagccggactctgccgcatcgagtctgggagaccaggaagggggaggagagagccagttatccagtgtgctacggagatcctcatttagcgaggggcaaactctgaccgtcacttctggggcaaaaaagtcacatataagatctcacagtgatactagcattgcaagtcgcggtgcacctgaaagctgtaatgataaggctaagctgcggggacccctgccgtactcaggccaatccagcgaggtctctactccttcctcactttacatggagtatgaaggaggcagatacctctgcagtggcgaaggcatgtttaggagacctagcgaaggacagtcgctaatcagttacctgtctgagcaggattttgggagctgcgccgatctcgaaaaagaaaacgctcatttttcaatatctgaaagcctgatcgccgctatcgagctcatgaaatgcaatatgatgtctcagtgcctcgaagaggaagaggtggaggaggaagatagcgatagggagatccaagagctcaaacagaagattcggcttcggaggcagcaaatcagaaccaagaatctgctcccaatgtatcaggaggccgagcacggctcatttagagtcacctctagtagcagccagttttcctcaagggactctgcccagttatctgacagcggatcggctgatgaagtggacgagttcgagatacaagatgggagcgagggctcaaacttaactcatattagcaagaatgggctctccgtcagtcttgccagcatgttctcggatgccgatatccggaggaacacggcctcttccagcaaaagtttcgtaagttctcagtcattttcccactgcttcctgcacagcaccagtgccgaggcggtcgccatgggtctcttgaaacaatttgagggcatgcagctgcctgccgcaagcgaactggagtggctggtgccagagcacgacgctccgcagaagttgttgccaattcctgattctctcccaatctcccccgatgatggccaacatgcggatatctataagttgcgcataagggtgcgagggaacctggagtgggccccacctcgaccccagatcatttttaacgtccaccccgctccaacccgcaaaattgcggtcgcaaaacagaactataggtgcgctgggtgcgggattagaacagatcccgactacatcaagcgcttgcggtattgcgaatacttggggaagtacttctgtcaatgctgccacgagaacgcccagatggccattccatctcgcgtgcttagaaagtgggacttctctaagtattatgtttctaatttctccaaagatctgctgattaaaatttggaatgacccactgttcaatgtgcaggacattaatagtgccctgtatagaaaggttaaattattaaatcaggtgcgtctgttacgcgtgcaactctgccacatgaaaaacatgttcaaaacttgtcgactggctaaggaactcctggacagctttgatactgtcccaggacacctgactgaagaccttcatctgtattccctcaacgatctaaccgccaccaggaagggggaattgggccctcggttagctgaactaacgcgagcaggcgctactcatgtggagagatgcatggtgagaaagtctcactgctccatgcaactttccccctgcttctag

SEQ ID NO: 287421 - protein, 208 aa, Artificial Sequence
  derived and/or modified sequence
MTVCRSCLVKYLEENNTCPTCRIVIHQSHPLQYIGHDRTMQDIVYKLVPGLQEAEMRKQREFYHKLGMEVPGDIKGETCSAKQHLDSHRNGETKADDSSNKEAAEEKPEEDNDYHRSDEQVSICLECNSSKLRGLKRKWIRCSAQATVLHLKKFIAKKLNLSSFNELDILCNEEILGKDHTLKFVVVTRWRFKKAPLLLHYRPKMDLL

SEQ ID NO: 287422 - DNA, 627 bp, Artificial Sequence
  derived and/or modified sequence
atgactgtatgcaggagctgcttggtgaagtacctggaagagaataacacctgccccacttgcagaatcgtcatccaccagagtcacccactgcaatacatcgggcatgatagaacaatgcaggatatagtatataagctagtcccaggacttcaagaggcagaaatgcgaaagcagcgtgagttctatcataaattgggcatggaggtgccgggcgatattaaaggggaaacatgttcagccaagcaacacctggattcgcacagaaacggggaaaccaaagctgatgattcgtccaataaggaggctgccgaagaaaagccagaggaggacaacgattatcacaggtctgacgagcaagtctctatttgcctcgagtgcaacagctccaaactgcgcggactcaagcgcaagtggataaggtgtagcgcccaggcgaccgttctgcacctcaagaagttcatagctaagaaattaaatttatcttcattcaatgagttggacatcctctgcaacgaagaaatcctgggaaaggatcacaccttgaagttcgtcgtggtgacacgctggcgctttaaaaaggccccactgttgttgcactatcggccgaaaatggacctcctgtag

SEQ ID NO: 287423 - DNA, 3609 bp, Artificial Sequence
  derived and/or modified sequence
ttgctcgcccgcagccccgagaccgcaggcgtcacaatgtagcagggaccccaggcgtcgtgctcagaaaatggaaaaagagccagggccggaaggagggtgcagaagcgagtccgcgtgcggagccaggaggcagcgtcgcgtgggagtgctggcctgaagcctccatgccccggcagagggacggacacgcggacgtctagcggaggctcccgtgtcctcagtatgcatcaggtctcccgaacctcacagccccgcagggaggaggagaaggggaggatttgactttggaagtctctgtgaccagaagccaaagatgttgaccaggaagatcaagctgtgggacatcaacgcccacatcacctgccgcctgtgcagcgggtacctcatcgacgccaccacggtgaccgagtgtctgcacacctctcaagcccgacaaaagcaggaaccaggaccaggggcagagacgatcttgaagataagtcagaaaagtcatttcacgctaaaggtcctgtgggtggtgtcagagcagatgaggcctcgcttaggagagcgaaacacaggagagaccccacattcctcccacggagcagcaaggccagtagccgctgtgacagtgctcactgctggcagtttccaaatctccagaggagttccttagatccttcaaaggggaaccttccagtgtgttcttcacacctgatgtgcgtcctcacacctgatgagtctgtgctttggtgttagaggactcacacctggggctggacctgagtgtttttctaagtgtggctaccgctgacgggcaggtgccatccatcaggctgaggctcggctcttatgctaacctgaggccccatggctggcggccctgctggtgtggacgaccgctgtgtgcgtctcttgatggctggggagcattttgtttaaacaggatctttaaaatgaagtgtacgcttataatacaagtgatgcttgtgtatttctcactttaggaaataaaatatttgccaatttgatagaattttgactttaacgttaatcgtatttttagatattggttagcatattttatgttaggttattttcatttgattttatctagttgtacgtagaagatactgtcatcttttaggacaaagtattgtaaaattatctgttttagcccatgttctgatgacccacagctctgtcacctttgagcatcatctccccattctaagtttttttcccacttaattcctaaccctgcctctttgaggaagcccattgacggggcaattaaaaccttctcattgctcctgagaccagaacggcaagatgtttcctttcagaagctgagagccacaaggaggacagcagtgagcatctgcacagaaacgagctcagagacgcccgtgttcagtggagcacgccgatggggtgggcgccctggctctagacgctctcctaacacacctgtgctttgatgacagtctgcaggagctgcctggtgaagtacctggaggagaacaacacctgccccacctgcaggattgtgatccaccagagccaccccctgcagtacatcggtcatgacagaaccatgcaagatattgtttacaaattggtaccaggcctccaagaagcggaaatgagaaagcagagggagttctatcacaaattgggcatggaggtgccgggagacatcaagggggagacctgctctgcaaaacagcacttagattcccatcggaatggtgaaaccaaagcagacgacagttcaaacaaagaggccgcggaggagaagccggaggaggacaacgactaccaccgcagcgacgagcaggtgagcatctgcctggagtgtaacagcagcaaactgcgcgggctgaagcggaagtggatccgctgctcagcccaggcgaccgtcttgcatctgaagaagttcatcgccaaaaaactcaacctttcatcctttaacgagctggacattttatgcaacgaggagatcctgggcaaggaccacacactcaagttcgtggttgtcactaggtggagattcaagaaggcgccgctcctgctgcactacagacccaagatggacttgctgtgaatggtgccacacagcgcccacagactgggccctcgcacccttgggtgctcccggccgccgcgcttaagaacattgcctctgggtgtcatgtggaccagacttctgaatagagaatatttataacttttgtatgagagagaattcacactcaacaagacactaccagcaccacgtttacagaggatgaaaacacttcacagtctcccagagccgatcgtcctctcccccgccccaccccgtgcttcagccttgcagggagagtgatgctccaggcaacacggttctgagtcaccttctgacacgagctccctctgcttgctttccagcagctccctgactggttcgcctttcattgtgtgaggtcggcacttggactcactcagaactgtcgctcacctgtggctgacacacccagccctggaaacggggccccagacgccacgtcgggatttctgacatgctcagcaggtagaccagaggccgtgtgaccagctcagtgctggtttacggaacaactcttacttttaaaaattacttgttcccccaaattgttgagtgccgccgtttggtttcctatgttttctttccctgttttgattttgctgaagggagaggtggtggtggttaggatcagagctctcctggcatccgtggggaggatttgctggtggtggcttcgggctcatgcccagacacactcactgccccgtctgtccaaggcctccccttcccctttgctggtgggaggagctcgtgtgctccttggccgcttactggaagggcgtttttcagagctgcagggacagggtgagcagctgaagggctaggagggaagccggcccccgctctgcagaagctgcatttcagctgaatctgtgtttcagcctcagttggttgcaccgttagcccctctcctcccggatggtcatgtttttgtcacattagagaataaacagccacacacacatttttttttttcctttaaaacagtaacttggaaatatgaaaaggccagaaggaggagcaagggctgttttctggagtggttgaggtgttgtcctgcagttgtcattgtcttctccaccgggctgttcccatttatttcctgtggaactgaatccctcctccctccactccttgggagcccaggtggtccttggccaccattcaggctttccaagaagccaaccaccttggagattttttttcttgaatttcgctgttttcttctgcttcctttagataaaaagcagctcaagagaccttatcttagggatgagaaaaacatgcatattaattccatctgagtgattgtcagtgtaaggccttttaaaacaaaagcaagttctttgttaggaattggtcaaaattcatctctttctttaagcccatcaactcccaggacggtttgagttactcagttacctaagcttgctattcatccaaatcattttctagagtcactgtataagggtctatgagtagctgtgtatgaataaatattacctgtctacctc

SEQ ID NO: 287424 - DNA, 627 bp, Artificial Sequence
  derived and/or modified sequence
atgacagtgtgccgcagctgcctggtgaagtacctggaggagaacaacacctgccccacctgcagaattgtcatccaccagagccaccccctgcagtacatcggccatgacaggaccatgcaggacatcgtgtacaagctggtgcccggcctgcaggaggccgagatgaggaagcagcgggagttctaccacaagctgggcatggaggtgcctggggacatcaagggggagacctgcagcgccaagcagcacctggacagccacagaaatggagagaccaaggcagatgacagcagcaacaaggaggccgctgaggagaagccagaggaggacaatgactaccacagaagtgatgagcaggtgtccatctgcctggagtgcaacagcagcaagctgcggggcctgaagaggaagtggatccgctgcagcgcccaggccaccgtgctgcacctgaagaagttcatcgccaagaagctgaacctgagcagcttcaatgagctggacatcctgtgcaatgaggagatcctgggcaaggaccacaccctgaagtttgtggtggtgacccgctggaggttcaagaaggcccccctgctgctgcactaccggcccaagatggacctgctgtag

SEQ ID NO: 287425 - DNA, 627 bp, Artificial Sequence
  derived and/or modified sequence
atgaccgtgtgccggagctgcctggtgaagtacctggaggagaacaacacctgtccaacttgccgcatcgtaatccaccagtcacacccgctccagtacattggtcacgaccgtacaatgcaagacatcgtgtacaaactggtgccaggcctgcaggaggccgaaatgcgaaagcagagagagttctaccacaagctaggcatggaggtccctggcgacattaaaggagaaacgtgtagcgccaagcaacatctagattcccatagaaacggagagactaaggccgatgacagtagcaacaaggaggccgctgaggagaaacccgaagaagataatgactaccaccggtcagacgagcaagtgtccatttgtctcgagtgcaactcatcgaaattgcgtgggctaaagcgcaagtggatccgatgtagcgcgcaggctactgttctgcacctgaagaagttcattgccaaaaagctaaacctcagctctttcaatgaactggacatcttgtgcaacgaggagattctcgggaaggaccacactctgaagtttgtggtggttaccagatggcggtttaaaaaggctcccttgctgctgcactatcgccctaagatggatctgctgtag

SEQ ID NO: 287426 - DNA, 627 bp, Artificial Sequence
  derived and/or modified sequence
atgactgtatgccgcagctgcctagtcaaatatctagaggagaacaacacatgccccacctgccgcattgttatccaccagtcacatccactacagtatatcggccatgatagaaccatgcaggatatagtctacaagttagtgcctggactgcaggaagcagagatgagaaaacaaagagagttttaccataagctaggcatggaagtccccggagacatcaaaggagagacttgcagtgcaaaacagcatttggattcgcatcgtaacggcgaaacaaaagccgacgacagcagcaacaaagaagcagctgaagagaagcccgaggaagacaacgattaccatcgttccgatgaacaggtctctatttgtctcgaatgtaattcttccaaactgaggggattgaagagaaagtggattcgctgctctgcccaggccacagttctccacctcaagaaatttatagccaaaaaactgaaccttagcagcttcaacgaactagacatcttatgtaacgaggaaattctgggaaaagatcacactcttaagtttgtcgtcgtaacgaggtggagattcaaaaaggccccacttctgttgcactatcgccctaaaatggacttgctctag

SEQ ID NO: 287427 - DNA, 627 bp, Artificial Sequence
  derived and/or modified sequence
atgaccgtgtgcagaagctgcctggtgaagtacctggaggagaacaacacctgccccacctgcagaatcgtgatccaccagagccaccccctgcagtacatcggccacgacagaaccatgcaggacatcgtgtacaagctggtgcccggcctgcaggaggccgagatgagaaagcagagagagttctaccacaagctgggcatggaggtgcccggcgacatcaagggcgagacctgcagcgccaagcagcacctggacagccacagaaacggcgagaccaaggccgacgacagcagcaacaaggaggccgccgaggagaagcccgaggaggacaacgactaccacagaagcgacgagcaggtgagcatctgcctggagtgcaacagcagcaagctgagaggcctgaagagaaagtggatcagatgcagcgcccaggccaccgtgctgcacctgaagaagttcatcgccaagaagctgaacctgagcagcttcaacgagctggacatcctgtgcaacgaggagatcctgggcaaggaccacaccctgaagttcgtggtggtgaccagatggagattcaagaaggcccccctgctgctgcactacagacccaagatggacctgctgtag

SEQ ID NO: 287428 - protein, 170 aa, Artificial Sequence
  derived and/or modified sequence
EYLDLSAPFEQYSPGGQDTPSSSSSGDDSVFAHDLLATGPQQCEGSLAAHPAAGAQPLPGMRLSADGETATQSFGLCVCVCVCVCCTSACACVRAHLASRCRGTLGVPAAVQRSPDWCCSTEGPLFWGDPVQNVSGPTRWDPGQGAGPDMRPLPLHHGTSQGLGPSHTQS

SEQ ID NO: 287429 - DNA, 759 bp, Artificial Sequence
  derived and/or modified sequence
atgaggcatacatggccatttcggaacgtgcctttcggctgctgcacgcctatacaccccgtgtataccagttccagaggagaccatctcgggtgctgggccctgaggcctgaatgcttgcgcattgtgtctcgggccccctggacgagcacctctgttggctttgttgccgtgggcccacagtgcttgcctgtgcgtggctggcactccagccgccccgtgagagatgacagcgtggtcgagaagagcctgaagtcactgaaggacaagaataagaagctggaggagggaggccctgtttattctcctcctgcagaggtagtcgtcaaaaagtccctcggccagagggtgctggatgaacttaaacactactaccatgggttcagattactttggatcgatacgaagatcgcagcccgcatgctgtggagaattctcaatggacattcattaacgaggcgagaacgtcgccaatttctccgcatctgtgcagacttattcaggctggtcccttttctggttttcgttgtagtcccatttatggaatttctgctccccgtagcggtgaagttgttcccaaatatgctgccttcgacttttgagacacagagtctaaaggaagaacggttgaagaaggagctccgggtgaagctcgagctggcaaagttcctccaggataccatcgaagaaatggcgctgaagaacaaagctgccaagggcagtgccacaaaggacttctcggtgtttttccagaagtag

SEQ ID NO: 287430 - DNA, 759 bp, Artificial Sequence
  derived and/or modified sequence
atgaggcacacctggcccttcagaaatgtgcccttcggctgctgcacccccatccaccctgtgtacaccagcagcagaggagaccacctgggctgctgggccctgcggcctgagtgcctgcgcatcgtgtcccgggccccctggaccagcacctctgtgggctttgtggccgtgggcccccagtgcctgcctgtgcggggctggcacagcagcaggcctgtgagagatgacagcgtggtggagaagagcctgaagagcctgaaggacaagaacaagaagctggaggagggcggccctgtgtacagccccccagctgaggtggtggtgaagaagagcctgggccagagggtgctggatgagctgaagcactactaccacggcttccggctgctgtggattgacaccaagattgctgccaggatgctgtggaggatcctgaatggccacagcctgacccggcgggagcggcggcagttcctgcgcatctgtgccgacctcttccggctggtgcccttcctggtgtttgtggtggtgcccttcatggagttcctgctgcctgtggccgtgaagctgttccccaacatgctgcccagcacctttgagacccagagcctgaaggaggagcggctgaagaaggagctgcgggtgaagctggagctggccaagttcctgcaggacaccatcgaggagatggccctgaagaacaaggccgccaagggcagcgccaccaaggacttctctgtgttcttccagaagtag

SEQ ID NO: 287431 - DNA, 759 bp, Artificial Sequence
  derived and/or modified sequence
atgcggcacacctggcccttccggaacgtgcccttcggctgctgcaccccgatccatcctgtctacaccagtagcaggggtgaccacctggggtgctgggcattacgtccggagtgcctcagaatcgtttctagggccccctggacatccacgtccgtcggcttcgtggctgtgggaccccagtgcctgccagtcagagggtggcactcaagccggcccgtacgcgatgactctgtggtggaaaagtccctgaagtcccttaaagataagaacaagaagctggaggagggcggcccagtttattccccacctgccgaagtggtggtaaaaaaatctctcggccaacgggtcttagacgagctgaaacactattaccacggcttccggcttctatggatcgacactaaaatcgcagcgagaatgctttggcgcatcttgaacggccattcactgacaagacgggagagacgacaatttctgcgaatatgtgccgatctgttccgtcttgtgccattcttggttttcgtcgtggtgccctttatggagttcttgttgcccgtggctgtaaaactcttccctaatatgctccccagtaccttcgaaacgcaatcgttgaaagaggagcggctgaagaaggagctgcgcgtcaaacttgagctggctaaatttttgcaggacacaatcgaagagatggccctgaagaataaggcggcgaaggggagtgcgacaaaggatttttcagtgtttttccaaaaatag

SEQ ID NO: 287432 - DNA, 759 bp, Artificial Sequence
  derived and/or modified sequence
atgcggcatacttggccttttcggaacgtaccctttgggtgttgcactcccatacatccagtctatacgtcatctcgaggcgaccacctggggtgctgggcattgaggcctgagtgccttagaattgtcagcagggctccctggacaagcactagtgttggctttgtggcggtcgggcctcaatgccttcccgttcgtgggtggcactccagccgccctgtacgggatgacagcgtcgtcgagaagtcgctcaaaagcctgaaggataagaataaaaaactcgaggagggtggaccagtgtattccccccctgccgaggtcgttgtcaagaaatcgctgggccaaagggtcctggatgagcttaagcattattatcatggtttccgcctactctggattgacactaagattgccgctcgcatgttgtggaggatcttgaacggacattccttgacgagacgcgagcgtaggcagttcctcagaatttgtgcggatctgtttcggctagtgccatttctggtattcgtggtcgtgccctttatggagttccttcttcccgtcgctgtgaagttgtttccaaatatgctcccttctacctttgaaacccaatctcttaaggaggagcgcctcaaaaaggagctgcgggtcaaactcgaactcgccaaattcttgcaggatactatagaggagatggcgctgaagaataaagctgcaaagggcagcgccactaaagattttagcgttttctttcaaaaatag

SEQ ID NO: 287433 - DNA, 759 bp, Artificial Sequence
  derived and/or modified sequence
atgagacacacctggcccttcagaaacgtgcccttcggctgctgcacccccatccaccccgtgtacaccagcagcagaggcgaccacctgggctgctgggccctgagacccgagtgcctgagaatcgtgagcagagccccctggaccagcaccagcgtgggcttcgtggccgtgggcccccagtgcctgcccgtgagaggctggcacagcagcagacccgtgagagacgacagcgtggtggagaagagcctgaagagcctgaaggacaagaacaagaagctggaggagggcggccccgtgtacagcccccccgccgaggtggtggtgaagaagagcctgggccagagagtgctggacgagctgaagcactactaccacggcttcagactgctgtggatcgacaccaagatcgccgccagaatgctgtggagaatcctgaacggccacagcctgaccagaagagagagaagacagttcctgagaatctgcgccgacctgttcagactggtgcccttcctggtgttcgtggtggtgcccttcatggagttcctgctgcccgtggccgtgaagctgttccccaacatgctgcccagcaccttcgagacccagagcctgaaggaggagagactgaagaaggagctgagagtgaagctggagctggccaagttcctgcaggacaccatcgaggagatggccctgaagaacaaggccgccaagggcagcgccaccaaggacttcagcgtgttcttccagaagtag

SEQ ID NO: 287434 - protein, 163 aa, Artificial Sequence
  derived and/or modified sequence
MDECIPQDRAPRDFCVKFPEEIRHDNLAGQLWFGAECLAAGSIIMNRELESMAMRPLAKELTRSLEDVRGALRDQALRDLNTYTEKMREALRHFDVLFAEFELSYVSAMVPVKSPREYYVQQEVIVLFCETVERALDFGYLTQDMIDDYEPALMFSIPRLAIV

SEQ ID NO: 287435 - DNA, 1590 bp, Artificial Sequence
  derived and/or modified sequence
gtcacccgctcggaggccgtgggcgccttgacgagggcgcggcggcgggaatgcacaacgttatgctcatcacctgcgtccaccactgtcacccctgacggcgagacgcgaggtgctaagggcttgtccaggctaagcgggttctctgcgtccttaagcccactttgcagatgctaatcagaggggacaggcggccaagaacctggagcccacccgggcgtctgtgcccagtgccgaccgtctaaattcccttcccacgtggctcctgttgcgtctgggctgtggaggattcctctaaacaggcacagccaccctctggaggtcggatccgcagctgcttgcccggttctactatgccgacgaggagctgaaccaggtggccgcggagctggacagcctggatgggcggaaggacccccagcggtgcacgctgctggtcagccagttccgctcctgtcaggacaatgtgttgaacatcattaaccagatcatggatgagtgcatcccccaggaccgcgcccccagagatttctgcgtcaagttccctgaggagatccggcacgacaacctggccggccagctgtggttcggtgccgagtgcctggccgccggctccatcatcatgaaccgggagctggagagcatggccatgcgcccgctggccaaggagctgacgcgcagcctggaggacgtgcggggcgccctccgtgaccaggcgctgcgggacctgaacacctacacagagaagatgagggaagcgctgaggcacttcgacgtcctgttcgcagagtttgagctcagctacgtctcggccatggtgcctgtgaagtcccccagggagtactacgtgcagcaggaggtcatcgtgctcttctgcgagacggtggagagggccctggacttcgggtacctgactcaggacatgattgatgactacgagccggccctcatgttcagcatccccaggctggccatcgtgtgaaatggaaaaggtgttctaaaattcatgtggaactgcaatgggccctaaatagccaaaacaatattgaaaaacaaaaacaaaattggaagattcatacgtcctgatttcaaaacttactacaagtcaaaaccttatggtactggcataaagatagatgtatagaccaatggaataaaattgagaagccataaataaacccaaacatctatggtgaactgattattgacaagggggccaagatcattcaataaggaaagaacagtctcttcagtgaatgttcctggagcaactggataaccacatgcaaaagaacaaagttggaaaaaaaaaaaaaaaagaacaaagttggaccctgcgatggttaacttcatgtgtcatcttgggtaggccacattacccagatatttggtaaaataccagtctgaatgttgctgtgaaggtatttttttttctttttataatgataaactggcaatttataattgcgcagatttatagcatgcaaagttgtgttataatctatgaatgcagtgtggaataattaaatcaagctggttaacatatccatcacctcaaatatttaacatcttttgaatgagatcatttta

SEQ ID NO: 287436 - protein, 1447 aa, Artificial Sequence
  derived and/or modified sequence
MFRAGEASKRPLPGPSPPRVRSVEVARGRAGYGFTLSGQAPCVLSCVMRGSPADFVGLRAGDQILAVNEINVKKASHEDVVKLIGKCSGVLHMVIAEGVGRFESCSSDEEGGLYEGKGWLKPKLDSKALGINRAERVVEEMQSGGIFNMIFENPSLCASNSEPLKLKQRSLSESAATRFDVGHESINNPNPNMLSKEEISKVIHDDSVFSIGLESHDDFALDASILNVAMIVGYLGSIELPSTSSNLESDSLQAIRGCMRRLRAEQKIHSLVTMKIMHDCVQLSTDKAGVVAEYPAEKLAFSAVCPDDRRFFGLVTMQTNDDGSLAQEEEGALRTSCHVFMVDPDLFNHKIHQGIARRFGFECTADPDTNGCLEFPASSLPVLQFISVLYRDMGELIEGMRARAFLDGDADAHQNNSTSSNSDSGIGNFHQEEKSNRVLVVDLGGSSSRHGPGGSAWDGVGGRGAQPWGAPWTGPFCPDPEGSPPFEAAHQTDRFWDLNKHLGPASPVEVPPASLRSSVPPSKRGTVGAGCGFNQRWLPVHVLREWQCGHTSDQDSYTDSTDGWSSINCGTLPPPMSKIPADRYRVEGSFAQPPLNAPKREWSRKAFGMQSIFGPHRNVRKTKEDKKGSKFGRGTGLTQPSQRTSARRSFGRSKRFSITRSLDDLESATVSDGELTGADLKDCVSNNSLSSNASLPSVQSCRRLRERRVASWAVSFERLLQDPVGVRYFSDFLRKEFSEENILFWQACEYFNHVPAHDKKELSYRAREIFSKFLCSKATTPVNIDSQAQLADDVLRAPHPDMFKEQQLQIFNLMKFDSYTRFLKSPLYQECILAEVEGRALPDSQQVPSSPASKHSLGSDHSSVSTPKKLSGKSKSGRSLNEELGDEDSEKKRKGAFFSWSRTRSTGRSQKKREHGDHADDALHANGGLCRRESQGSVSSAGSLDLSEACRTLAPEKDKATKHCCIHLPDGTSCVVAVKAGFSIKDILSGLCERHGINGAAADLFLVGGDKPLVLHQDSSILESRDLRLEKRTLFRLDLVPINRSVGLKAKPTKPVTEVLRPVVARYGLDLSGLLVRLSGEKEPLDLGAPISSLDGQRVVLEEKDPSRGKASADKQKGVPVKQNTAVNSSSRNHSATGEERTLGKSNSIKIKGENGKNARDPRLSKREESIAKIGKKKYQKINLDEAEEFFELISKAQSNRADDQRGLLRKEDLVLPEFLRLPPGSTELTLPTPAAVAKGFSKRSATGNGRESASQPGEQWEPVQESSDSPSTSPGSASSPPGPPGTTPPGQKSPSGPFCTPQSPVSLAQEGTAQIWKRQSQEVEAGGIQTVEDEHVAELTLMGEGDISSPNSTLLPPPSTPQEVPGPSRPGSGTHGSRDLPVNRIIDVDLVTGSAPGRDGGIAGAQAGPGRSQASGGPPTSDLPGLGPVPGEPAKPKTSAHHATFV

SEQ ID NO: 287437 - protein, 667 aa, Artificial Sequence
  derived and/or modified sequence
MFRAGEASKRPLPGPSPPRVRSVEVARGRAGYGFTLSGQAPCVLSCVMRGSPADFVGLRAGDQILAVNEINVKKASHEDVVKLIGKCSGVLHMVIAEGVGRFESCSSDEEGGLYEGKGWLKPKLDSKALGINRAERVVEEMQSGGIFNMIFENPSLCASNSEPLKLKQRSLSESAATRFDVGHESINNPNPNMLSKEEISKVIHDDSVFSIGLESHDDFALDASILNVAMIVGYLGSIELPSTSSNLESDSLQAIRGCMRRLRAEQKIHSLVTMKIMHDCVQLSTDKAGVVAEYPAEKLAFSAVCPDDRRFFGLVTMQTNDDGSLAQEEEGALRTSCHVFMVDPDLFNHKIHQGIARRFGFECTADPDTNGCLEFPASSLPVLQFISVLYRDMGELIEGMRARAFLDGDADAHQNNSTSSNSDSGIGNFHQEEKSNRVLVVDLGGSSSRHGPGGSAWDGVGGRGAQPWGAPWTGPFCPDPEGSPPFEAAHQTDRFWDLNKHLGPASPVEVPPASLRSSVPPSKRGTVGAGCGFNQRWLPVHVLREWQCGHTSDQDSYTDSTDGWSSINCGTLPPPMSKIPADRYRVEGSFAQPPLNAPKREWSRKAFGMQSIFGPHRNVRKTKEDKKGSKFGRGTGLTQPSQRTSARRSFGRSKRFSITRSLDDLES

SEQ ID NO: 287438 - DNA, 4344 bp, Artificial Sequence
  derived and/or modified sequence
atgttcagagccggcgaggccagcaagagacccctgcccggccccagcccccccagagtgagaagcgtggaggtggccagaggcagagccggctacggcttcaccctgagcggccaggccccctgcgtgctgagctgcgtgatgagaggcagccccgccgacttcgtgggcctgagagccggcgaccagatcctggccgtgaacgagatcaacgtgaagaaggccagccacgaggacgtggtgaagctgatcggcaagtgcagcggcgtgctgcacatggtgatcgccgagggcgtgggcagattcgagagctgcagcagcgacgaggagggcggcctgtacgagggcaagggctggctgaagcccaagctggacagcaaggccctgggcatcaacagagccgagagagtggtggaggagatgcagagcggcggcatcttcaacatgatcttcgagaaccccagcctgtgcgccagcaacagcgagcccctgaagctgaagcagagaagcctgagcgagagcgccgccaccagattcgacgtgggccacgagagcatcaacaaccccaaccccaacatgctgagcaaggaggagatcagcaaggtgatccacgacgacagcgtgttcagcatcggcctggagagccacgacgacttcgccctggacgccagcatcctgaacgtggccatgatcgtgggctacctgggcagcatcgagctgcccagcaccagcagcaacctggagagcgacagcctgcaggccatcagaggctgcatgagaagactgagagccgagcagaagatccacagcctggtgaccatgaagatcatgcacgactgcgtgcagctgagcaccgacaaggccggcgtggtggccgagtaccccgccgagaagctggccttcagcgccgtgtgccccgacgacagaagattcttcggcctggtgaccatgcagaccaacgacgacggcagcctggcccaggaggaggagggcgccctgagaaccagctgccacgtgttcatggtggaccccgacctgttcaaccacaagatccaccagggcatcgccagaagattcggcttcgagtgcaccgccgaccccgacaccaacggctgcctggagttccccgccagcagcctgcccgtgctgcagttcatcagcgtgctgtacagagacatgggcgagctgatcgagggcatgagagccagagccttcctggacggcgacgccgacgcccaccagaacaacagcaccagcagcaacagcgacagcggcatcggcaacttccaccaggaggagaagagcaacagagtgctggtggtggacctgggcggcagcagcagcagacacggccccggcggcagcgcctgggacggcgtgggcggcagaggcgcccagccctggggcgccccctggaccggccccttctgccccgaccccgagggcagcccccccttcgaggccgcccaccagaccgacagattctgggacctgaacaagcacctgggccccgccagccccgtggaggtgccccccgccagcctgagaagcagcgtgccccccagcaagagaggcaccgtgggcgccggctgcggcttcaaccagagatggctgcccgtgcacgtgctgagagagtggcagtgcggccacaccagcgaccaggacagctacaccgacagcaccgacggctggagcagcatcaactgcggcaccctgcccccccccatgagcaagatccccgccgacagatacagagtggagggcagcttcgcccagccccccctgaacgcccccaagagagagtggagcagaaaggccttcggcatgcagagcatcttcggcccccacagaaacgtgagaaagaccaaggaggacaagaagggcagcaagttcggcagaggcaccggcctgacccagcccagccagagaaccagcgccagaagaagcttcggcagaagcaagagattcagcatcaccagaagcctggacgacctggagagcgccaccgtgagcgacggcgagctgaccggcgccgacctgaaggactgcgtgagcaacaacagcctgagcagcaacgccagcctgcccagcgtgcagagctgcagaagactgagagagagaagagtggccagctgggccgtgagcttcgagagactgctgcaggaccccgtgggcgtgagatacttcagcgacttcctgagaaaggagttcagcgaggagaacatcctgttctggcaggcctgcgagtacttcaaccacgtgcccgcccacgacaagaaggagctgagctacagagccagagagatcttcagcaagttcctgtgcagcaaggccaccacccccgtgaacatcgacagccaggcccagctggccgacgacgtgctgagagccccccaccccgacatgttcaaggagcagcagctgcagatcttcaacctgatgaagttcgacagctacaccagattcctgaagagccccctgtaccaggagtgcatcctggccgaggtggagggcagagccctgcccgacagccagcaggtgcccagcagccccgccagcaagcacagcctgggcagcgaccacagcagcgtgagcacccccaagaagctgagcggcaagagcaagagcggcagaagcctgaacgaggagctgggcgacgaggacagcgagaagaagagaaagggcgccttcttcagctggagcagaaccagaagcaccggcagaagccagaagaagagagagcacggcgaccacgccgacgacgccctgcacgccaacggcggcctgtgcagaagagagagccagggcagcgtgagcagcgccggcagcctggacctgagcgaggcctgcagaaccctggcccccgagaaggacaaggccaccaagcactgctgcatccacctgcccgacggcaccagctgcgtggtggccgtgaaggccggcttcagcatcaaggacatcctgagcggcctgtgcgagagacacggcatcaacggcgccgccgccgacctgttcctggtgggcggcgacaagcccctggtgctgcaccaggacagcagcatcctggagagcagagacctgagactggagaagagaaccctgttcagactggacctggtgcccatcaacagaagcgtgggcctgaaggccaagcccaccaagcccgtgaccgaggtgctgagacccgtggtggccagatacggcctggacctgagcggcctgctggtgagactgagcggcgagaaggagcccctggacctgggcgcccccatcagcagcctggacggccagagagtggtgctggaggagaaggaccccagcagaggcaaggccagcgccgacaagcagaagggcgtgcccgtgaagcagaacaccgccgtgaacagcagcagcagaaaccacagcgccaccggcgaggagagaaccctgggcaagagcaacagcatcaagatcaagggcgagaacggcaagaacgccagagaccccagactgagcaagagagaggagagcatcgccaagatcggcaagaagaagtaccagaagatcaacctggacgaggccgaggagttcttcgagctgatcagcaaggcccagagcaacagagccgacgaccagagaggcctgctgagaaaggaggacctggtgctgcccgagttcctgagactgccccccggcagcaccgagctgaccctgcccacccccgccgccgtggccaagggcttcagcaagagaagcgccaccggcaacggcagagagagcgccagccagcccggcgagcagtgggagcccgtgcaggagagcagcgacagccccagcaccagccccggcagcgccagcagcccccccggcccccccggcaccaccccccccggccagaagagccccagcggccccttctgcaccccccagagccccgtgagcctggcccaggagggcaccgcccagatctggaagagacagagccaggaggtggaggccggcggcatccagaccgtggaggacgagcacgtggccgagctgaccctgatgggcgagggcgacatcagcagccccaacagcaccctgctgcccccccccagcaccccccaggaggtgcccggccccagcagacccggcagcggcacccacggcagcagagacctgcccgtgaacagaatcatcgacgtggacctggtgaccggcagcgcccccggcagagacggcggcatcgccggcgcccaggccggccccggcagaagccaggccagcggcggcccccccaccagcgacctgcccggcctgggccccgtgcccggcgagcccgccaagcccaagaccagcgcccaccacgccaccttcgtgtag

SEQ ID NO: 287439 - DNA, 4344 bp, Artificial Sequence
  derived and/or modified sequence
atgttcagggccggcgaggcttcaaaaagacctttgccaggtccatcaccacctcgcgtgcgctccgtggaggttgctcgcggaagggcaggctatggattcacgctgagcggccaggcaccatgcgtactcagttgcgttatgcgcggtagccccgcggactttgtgggactgcgggcaggggaccagattctcgcagttaacgaaattaacgtgaagaaagcctctcacgaggatgtggtaaaattaattgggaagtgctccggtgtgctgcatatggtgattgccgaaggcgtcggtcggttcgaaagttgttcatccgatgaggagggcgggctctacgagggcaaagggtggctgaagccaaaattagacagtaaggccctcggcattaacagagcagagcgggttgtggaggaaatgcagtccggaggtatatttaacatgattttcgagaatccaagtctgtgtgcaagcaattccgaaccacttaaactcaagcagagatctctcagtgaaagcgcggctactcggttcgatgtgggccacgagtcgataaacaatcccaacccaaatatgctcagtaaagaggaaatcagtaaggtaatccatgacgattccgtgttcagtattggtctggaatctcacgatgatttcgcacttgacgcttccattttgaatgtggccatgattgttggatatctggggtctatcgagctgcccagtacgagttcgaatctcgagtcagatagtctccaggctatcagaggctgcatgagacgcctgcgagctgaacaaaaaatacattcccttgtcaccatgaaaattatgcatgactgtgtccagctcagtaccgacaaagctggcgtcgtggcagaatatcccgcagaaaaactcgctttctccgccgtgtgcccagatgatcgtagatttttcggacttgtgacgatgcagacaaatgacgatggtagtttggcccaggaagaagaaggggcactgagaacatcatgtcacgtgtttatggtcgacccagacctatttaaccacaaaatacaccagggcatcgcccggaggtttggctttgagtgcaccgcagatccagataccaacggatgcctggaatttccagcatctagcttgccagtccttcaatttatcagcgtactatatcgagatatgggggaactgatagagggcatgcgggccagagccttcttggatggagacgccgatgctcaccaaaataactctacatcttctaacagcgatagcggcatcggaaatttccaccaggaagaaaagagcaatagggtactcgtcgtggatctgggaggtagttcaagccggcacgggccaggaggaagtgcctgggacggcgtgggcggacgcggcgcccaaccctggggcgcaccttggactggtcctttctgtcctgatccagagggttctccaccctttgaggctgcacatcagacggaccgtttttgggaccttaataagcacttgggcccagctagcccagtggaggtaccacccgcgagcctgcgctcaagcgtgcctccttctaagagggggacagtcggcgcaggctgcggattcaaccagagatggctgcctgtgcacgtgcttagagagtggcaatgtggtcacacatctgaccaggacagctatacagactctactgatggctggagctcaattaattgcggcacactcccccctccgatgtcaaagatcccagccgacagataccgggttgaaggatcctttgcccagccacctttgaacgcccccaaaagagagtggtcccggaaagctttcgggatgcagagtattttcggtcctcatcggaatgtccggaagaccaaagaggacaaaaaaggttctaagttcggtcggggcacagggttaacccaaccatcacagcggacctccgccaggcgatcttttgggcgtagtaagcgcttctcaatcaccagaagcttggatgacttagagagcgccacagtatcagacggggagctcaccggcgctgatttaaaggattgcgtgtctaacaattccctcagtagcaacgcctcccttccttccgtgcagtcatgtcggcgtcttagagaacgacgggtggcttcctgggcagtatccttcgagagactcctgcaagatccagtgggcgtgcgatacttttctgatttcctccgaaaggaattctctgaagaaaatattctgttttggcaggcgtgcgaatattttaaccacgtgcctgcccacgataagaaggagctgagctacagggcgcgtgagatttttagtaagttcctctgctccaaagcaacaaccccagttaacatagactcccaagcccaactcgcagacgacgtgctgcgggcaccccaccccgatatgtttaaagagcaacagctgcagatctttaacttaatgaagtttgatagctacaccaggttccttaaatcaccgctataccaagaatgtattttggcggaggtagaagggcgagcgctccccgactcccagcaagtgccttctagtccggcttcgaaacactcactgggctccgaccattcatccgtgtctacaccaaaaaagctcagcgggaagtcaaaaagcgggcgaagcctgaatgaagaactgggtgatgaagatagcgagaaaaagaggaaaggagctttcttctcttggtctagaactaggagcaccggtcggagccaaaagaagagggaacacggcgaccacgccgatgatgcactgcacgcgaacggcggcttatgtaggcgcgaaagccaaggttctgtgagttctgctggaagtcttgatcttagtgaggcttgcagaaccttagctcctgaaaaagacaaggccactaaacattgctgtattcatctccccgatggaacctcttgtgttgttgccgtgaaggccggcttttccatcaaagatattcttagcggtctttgtgaaaggcacggaattaacggcgccgctgccgatctgttcctagtgggcggagataagccactggtactgcaccaagacagttcaatcctggagagtagagatctcaggctggagaagagaactctgtttcgtctggatctagtcccaattaataggtccgtgggccttaaggctaagcctaccaaacctgttaccgaagtccttcggcctgttgtggctagatatggactggaccttagcggactgttagtaaggctgagcggcgaaaaagagccccttgacctgggtgccccgatttcctccttggatggacaacgggtcgtcttagaggagaaggatccatcccgaggcaaagcttcggcggacaaacagaagggagttcccgttaagcaaaacacagcagttaatagttcctccaggaaccacagcgccaccggtgaagaaaggactctgggcaagtccaactccataaagatcaaaggcgagaatggtaaaaacgcccgcgaccctcggttgagcaaacgcgaagaatctattgcaaaaattggcaagaagaaataccagaagattaacctagacgaggctgaggagtttttcgagttgatctcaaaggcccagagcaatcgcgccgacgatcagaggggtctgctgaggaaggaagacctggtcctgcctgaatttctcaggcttcctcccgggtccaccgagttaaccctcccgacccctgcagcagtggccaaaggtttctctaagcgctccgccactgggaacggaagagagtcagcctcccagcccggagagcagtgggagcccgtgcaagagagcagtgattccccatcaacttctcccggctccgcgtccagtccaccgggcccccctggcaccacccccccaggacagaaatctcccagtgggcccttctgcacgccacagtctcccgtgtccctcgcccaagagggtaccgcccaaatttggaaaaggcaatctcaggaggtagaagctggcgggatacagactgttgaggatgagcacgtggccgagctgactttgatgggagaaggtgatatcagcagccccaacagcacccttctccctccgccctctaccccccaagaggtacctggtccaagcagacccggttccggcacgcacggctctcgcgacctgcccgtcaatagaatcatcgacgtggacctcgtgacaggatccgctcccggccgtgacggtggtattgcaggcgcacaggccggtcctgggcgctcacaagcaagtggagggcccccgaccagcgatcttccaggacttggcccagtgccaggggaacccgctaagccaaagacaagcgcccaccacgcgaccttcgtgtag

SEQ ID NO: 287440 - DNA, 4344 bp, Artificial Sequence
  derived and/or modified sequence
atgttccgggccggggaggccagcaagaggcccctgcccggccccagccccccccgggtgcgctctgtggaggtggcccggggccgggccggctacggcttcaccctgagcggccaggccccctgtgtgctgagctgtgtgatgaggggcagccctgctgactttgtgggcctgcgggccggggaccagatcctggccgtgaatgagatcaacgtgaagaaggccagccatgaagatgtggtgaagctgattggcaagtgcagcggcgtgctgcacatggtgattgctgagggcgtgggccgctttgagagctgcagcagtgatgaggagggcggcctgtatgagggcaagggctggctgaagcccaagctggacagcaaggccctgggcatcaacagagctgagcgggtggtggaggagatgcagagcggcggcatcttcaacatgatctttgagaaccccagcctgtgtgccagcaacagcgagcccctgaagctgaagcagaggagcctgtctgagagcgctgccaccaggtttgatgtgggccacgagagcatcaacaaccccaaccccaacatgctgagcaaggaggagatcagcaaggtgattcatgatgattctgtgttcagcatcggcctggagagccatgatgactttgccctggatgccagcatcctgaatgtggccatgattgtgggctacctgggcagcattgagctgcccagcaccagcagcaacctggagagtgacagcctgcaggccatccggggctgcatgaggcggctgcgggcagagcagaagatccacagcctggtgaccatgaagatcatgcatgactgtgtgcagctgagcacagacaaggccggcgtggtggccgagtacccagctgagaagctggccttctctgctgtgtgcccagatgaccggcgcttcttcggcctggtgaccatgcagaccaatgatgatggcagcctggcccaggaggaggagggcgccctgcggaccagctgccacgtgttcatggtggaccctgacctcttcaaccacaagatccaccagggcatcgccaggagatttggatttgagtgcacagctgaccctgacaccaacggctgcctggagttccctgccagcagcctgcctgtgctgcagttcatctctgtgctgtacagagacatgggagagctgattgagggcatgagggcccgggccttcctggatggagatgctgatgcccaccagaacaacagcaccagcagcaacagcgacagcggcatcggcaacttccaccaggaggagaagagcaacagagtgctggtggtggacctgggcggcagcagcagccgccacggccctgggggcagcgcctgggatggagtgggcggccgcggggcccagccctggggcgccccctggacaggccccttctgcccagaccctgagggcagccccccatttgaggccgcccaccagacagaccgcttctgggacctgaacaagcacctgggccctgccagccctgtggaggtgcccccagccagcctgcggagctctgtgccccccagcaagaggggcaccgtgggcgccggctgcggcttcaaccagcgctggctgcctgtgcacgtgctgcgggagtggcagtgtggccacaccagtgaccaggacagctacacagacagcacagatggctggagcagcatcaactgtggcaccctgcccccacccatgagcaagatcccagctgaccgctacagagtggagggcagctttgcccagccccccctgaatgcccccaagcgggagtggagcaggaaggccttcggcatgcagagcatcttcggcccccacagaaatgtgaggaagaccaaggaggacaagaagggcagcaagtttggccggggcaccggcctgacccagcccagccagaggaccagcgcccggcgcagctttggccgcagcaagcgcttcagcatcaccaggagcctggatgacctggagagcgccaccgtgtctgatggagagctgaccggggctgacctgaaggactgtgtgagcaacaacagcctgagcagcaatgccagcctgcccagcgtgcagagctgccggcggctgcgggagaggagagtggcctcctgggccgtgtcctttgagcggctgctgcaggaccctgtgggcgtgcgctacttcagtgacttcctgaggaaggagttcagcgaggagaacatcctcttctggcaggcctgtgagtacttcaaccacgtgcctgcccatgacaagaaggagctgagctaccgggcccgggagatcttcagcaagttcctgtgcagcaaggccaccacccctgtgaacatcgacagccaggcccagctggctgatgatgtgctgcgggccccccacccagacatgttcaaggagcagcagctgcagatcttcaacctgatgaagtttgacagctacacccgcttcctgaagagccccctgtaccaggagtgcatcctggccgaggtggagggccgggccctgcctgacagccagcaggtgcccagcagccctgccagcaagcacagcctgggcagtgaccacagctctgtgtccacccccaagaagctgagcggcaagagcaagagcggccgcagcctgaatgaggagctgggagatgaagattctgagaagaagaggaagggggccttcttctcctggagcaggaccaggagcacaggccgcagccagaagaagcgggagcacggggaccatgctgatgatgccctgcacgccaacggcggcctgtgcagaagagagagccagggctctgtgagcagcgctggcagcctggacctgtctgaggcctgcaggaccctggcccctgagaaggacaaggccaccaagcactgctgcatccacctgcctgatggcaccagctgtgtggtggccgtgaaggccggcttcagcatcaaggacatcctgagcggcctgtgtgaaagacatggcatcaacggggctgctgctgacctcttcctggtgggcggggacaagcccctggtgctgcaccaggacagcagcatcctggagagccgggacctgcggctggagaagaggaccctcttccggctggacctggtgcccatcaacagatctgtgggcctgaaggccaagcccaccaagcctgtgacagaggtgctgcggcctgtggtggcccgctatggcctggacctgagcggcctgctggtgcggctgtctggagagaaggagcccctggacctgggcgcccccatcagcagcctggatggccagagggtggtgctggaggagaaggaccccagccggggcaaggccagcgctgacaagcagaagggcgtgcctgtgaagcagaacacagctgtgaacagcagcagcaggaaccacagcgccactggagaggagaggaccctgggcaagagcaacagcatcaagatcaagggggagaatggcaagaatgcccgggacccccggctgagcaagcgggaggagagcatcgccaagattggcaagaagaagtaccagaagatcaacctggatgaagctgaggagttctttgagctgatcagcaaggcccagagcaacagagcagatgaccagaggggcctgctgaggaaggaggacctggtgctgcctgagttcctgcggctgcccccaggcagcacagagctgaccctgcccaccccagctgctgtggccaagggcttcagcaagaggtctgccactggaaatggccgggagagcgccagccagcctggagagcagtgggagcctgtgcaggagagcagtgacagccccagcaccagccctggcagcgccagcagccccccaggccccccaggcaccaccccacctggccagaagagccccagcggccccttctgcaccccccagagccctgtgtccctggcccaggagggcacagcccagatctggaagaggcagagccaggaggtggaggccggcggcatccagacagtggaggatgagcacgtggccgagctgaccctgatgggagagggggacatcagcagccccaacagcaccctgctgcccccacccagcaccccccaggaggtgcccggccccagcaggcctggcagcggcacccacggcagccgggacctgcctgtgaaccgcatcattgatgtggacctggtgactggaagtgcccctggaagagatggcggcattgctggggcccaggccggccctggccgcagccaggccagcggcggcccccccaccagtgacctgcccggcctgggccctgtgcctggagagcccgccaagcccaagaccagcgcccaccacgccacctttgtgtag

SEQ ID NO: 287441 - DNA, 4344 bp, Artificial Sequence
  derived and/or modified sequence
atgttccgggccggcgaggccagcaagcggcccctgcccggcccctctccccctagggttagatcagtagaggtggcaagaggacgcgctggttacgggttcacactgagcggacaggccccatgcgtactgagctgcgtcatgcgagggtcacctgctgatttcgtcgggcttcgggcaggcgatcagattctggctgtgaacgagataaatgtcaagaaggctagccatgaggacgtcgtcaagctgattggcaaatgctcgggagtgctgcatatggtgattgcagagggggtaggcagattcgaatcatgttcctcagacgaggaggggggcctatacgagggaaaaggctggctcaagcctaaactggatagcaaggcactcggcatcaaccgggccgagagagtggtcgaagaaatgcagtcagggggaatcttcaacatgatatttgaaaatccgagcctatgtgctagcaactcggaaccccttaagctcaagcaacgcagcctgagtgaatcggccgcaacacgtttcgatgtgggccatgaatcgatcaacaaccctaatcccaatatgttgtcaaaagaggagatttccaaagtgattcacgatgactctgtctttagtatcggtttggagtcacacgatgattttgctctcgacgcatctatccttaatgtggctatgattgtcggctatctggggtccattgagctgccctcaacgtccagcaaccttgagtccgatagcctgcaagctataagaggatgtatgcgcaggctgagagcggagcagaagattcactcacttgtgactatgaagatcatgcacgattgtgttcaacttagcaccgacaaggctggagtagtcgctgagtatccagccgagaaactagccttttctgctgtatgccctgacgatagacgctttttcggtctcgttaccatgcagacaaatgacgatgggagcctggcacaggaggaagaaggtgccctgcgcacttcttgtcatgttttcatggtcgaccccgatctgttcaaccacaaaattcatcaaggcatagcacgtcgctttgggttcgagtgcactgccgaccctgatacaaacggctgtttggaatttcctgcgagctcactgccggtgttacagttcatatcagtcctgtaccgcgatatgggcgaactaattgaggggatgcgagcaagggcgttcctggatggcgatgccgacgcccaccagaacaattctacaagctccaactctgacagtggcattggaaattttcaccaggaagaaaaatcaaatcgggtcttggtagtggacctggggggtagttcaagtaggcatggcccggggggatccgcctgggacggggtaggaggaaggggtgcacagccctggggagcgccctggacaggaccattctgcccagatccggagggatcaccaccatttgaggctgcacatcaaacggatcggttttgggatctgaacaaacatctgggccccgcctcacctgtggaggtgcctccagcctctctgcggagctccgtgcctccaagcaaacgtgggaccgttggtgccggatgcgggtttaaccagcggtggcttccagtgcacgtcctacgtgagtggcaatgtggccacacttccgaccaagacagctatactgattctaccgacggctggagctcaatcaattgcggcaccctaccacccccgatgagcaaaatccctgctgatcgctacagggtggaaggcagcttcgcgcagcctccgcttaacgcgcctaaaagagagtggagtcggaaagcatttggaatgcaatccatctttggaccacatcggaacgttaggaagaccaaggaagataagaaaggatccaaattcggacgggggacagggctaacacagcccagccaacgaacatctgctagaaggagtttcggccgatcaaaaaggttcagcattaccaggagtctcgacgaccttgaatccgctaccgtcagcgacggagaactgaccggagccgacctcaaggattgtgtgtcgaacaatagcctatctagtaatgcctctctaccttctgtacagtcctgcaggcgcttgcgcgagcgaagagttgcatcctgggccgtgagtttcgagaggctgctccaggaccccgttggtgtgcggtactttagcgactttctacgcaaagagttctcggaggagaatattttattctggcaggcctgcgagtactttaaccatgttcctgcccatgacaagaaggaattgagttatcgagcaagggagattttcagtaagttcttgtgctcaaaggcaactacccccgtgaatatagactcccaggcgcaactagctgacgacgtattaagggccccccatcccgacatgttcaaggaacaacaattgcagatattcaacctgatgaagttcgattcctacaccagatttctgaagtcacccttgtatcaggaatgcatattggctgaagtcgagggacgtgctctcccagactctcagcaggttccctcctccccagcttcaaagcactcccttggtagcgaccacagctctgtgagcacccccaagaagctctctggcaagtccaaatccggcaggtccctgaacgaagaactgggagatgaggactcggaaaagaagcggaaaggggcgttcttctcgtggtcacgcactcgcagcactggtcgctcccagaagaaacgtgaacacggcgaccatgctgatgatgctctccacgctaacgggggactctgcaggcgggagtctcagggtagtgtctctagtgccggatctttggacctgagcgaggcatgtcggacactcgcgcctgagaaagacaaagccaccaaacactgctgcattcaccttcctgatgggaccagctgtgtcgtcgcagttaaggccggattttctattaaggatattctgagcggactctgtgagaggcacggcattaacggtgctgcggccgacttgttccttgtgggcggcgacaagccattggtcctgcatcaagactcctcaatactggaatctcgggacctacgccttgagaaaagaacactgttccgactggacctggtcccaatcaatcggtccgtgggcctgaaagcgaagcccacaaaaccagtcacagaggtcctgcggccagtcgtggctaggtacggactggacttgtctggtctgttggtgaggttgtctggggagaaggagcctctggacctgggtgccccaatttcgagcttggatggacagcgggtggttctcgaggaaaaagaccccagccgcgggaaagcatctgccgataagcagaagggggttcccgttaagcagaatactgccgtgaacagctcctcaagaaaccactctgccacaggagaggaacgcacactggggaagtcaaatagcatcaaaatcaagggtgaaaatggtaaaaatgcgcgggaccctaggttaagcaagcgcgaagagtcaatcgccaaaatcggaaagaagaagtatcaaaagatcaatttagacgaagctgaggagttcttcgagctgatttctaaggcccagtctaatcgcgcagacgaccagagggggctccttcgaaaggaggacttagttctgcccgaattcctaaggctgcctcctggcagcacagaattgacgcttcccacacctgctgccgtggcaaaaggattttccaagcggagcgccacagggaacggaagagagagcgctagccagccgggcgagcaatgggaaccggttcaggagtcatcagacagcccatccacctctccaggtagtgcctctagcccacccgggccgccaggcaccacccctcccggccaaaagtctccttctggacctttctgcactccacagtcccccgtgtccctggcccaggaaggtacagctcagatttggaaaagacaaagccaggaagtggaagcaggcggaatacagaccgtggaggacgaacacgtggccgagcttacattaatgggcgagggcgatatctcctcacctaatagcacacttctgcctccccctagcacaccgcaggaggtgcccgggccgtccagacctgggtctgggacccacggctccagagatctgccggtgaaccggatcatcgacgtggacttggtcacggggtccgcacctggccgagatggaggcatcgctggagcccaggctggtcccggccgcagtcaagcctccggaggcccccccacaagcgacctcccaggcttggggcctgtcccgggcgaacctgctaagcccaaaacttccgcacaccatgctacttttgtatag

SEQ ID NO: 287442 - DNA, 4344 bp, Artificial Sequence
  derived and/or modified sequence
atgttcagggccggtgaggcaagcaaaaggccgctgcccggtcccagtcccccacgagtgaggagcgtggaggtggcgcgtggaagggccggatacggtttcactctgagcggccaggccccttgtgtacttagttgtgtaatgagagggtctcccgctgatttcgtgggtttgagggctggggaccagatcctggccgtgaacgagatcaatgtgaagaaggcctctcacgaagatgtcgtgaaattaatcgggaaatgcagtggcgtgctacatatggtgatcgcagagggagtcggtagattcgagagttgctcctctgacgaagagggtggtttgtacgaagggaaagggtggctgaaaccgaaactagattctaaagctttgggcataaatagagctgaacgagttgtagaggaaatgcagtccgggggaatatttaacatgatatttgaaaacccctccctctgcgcatcaaatagcgagcccctcaagctgaagcagcggtccctttcagaaagcgcggctacccgcttcgacgtggggcacgaatcaatcaacaatccgaaccctaatatgctgtccaaggaggaaatctcgaaagtcatccacgacgatagcgtcttttctatcggattggagagtcacgatgatttcgccttggacgcgagcattttaaatgtagcaatgatagtgggctacctgggatccatagaactgccctccaccagctccaatttggagtctgacagccttcaggctatccgaggatgtatgcggcgtttgcgggctgagcagaagatccattctctggttacaatgaaaatcatgcatgattgtgtgcaactctcaaccgataaagcaggagtggtggcggagtatccggctgaaaagctcgcatttagcgctgtgtgccccgatgaccggcgtttcttcggacttgtgaccatgcaaacaaatgatgacgggtccttggctcaggaagaagagggtgcactgagaacttcatgccatgtatttatggtagaccccgatttgtttaaccacaaaatccatcagggtatagcgagacggttcgggttcgagtgcacagccgacccagacacaaatggctgtttggaatttccggcatcctcgctgccggtgctgcaatttatttcagtcctgtaccgagacatgggcgaactgatagaaggcatgcgtgctcgcgctttcttagacggtgatgctgatgcacatcagaacaacagtacttcttcgaactcggattcaggaatcgggaattttcaccaggaggaaaaaagcaatagggtgctggtagtggacctcggtggatccagcagccgccatggccctggtggatcagcctgggacggggtgggtggccgaggcgcacagccgtggggcgcaccgtggacaggccctttttgtccagacccggaagggtcacctcccttcgaggccgctcaccagacagaccgtttctgggatctcaacaaacatcttgggccagcatccccagtcgaggtcccacccgcttcactacggtctagtgtgccccctagtaaaagagggaccgtgggagccggatgcggcttcaatcagcggtggctgccggtacatgtattgcgggagtggcagtgtggtcacacctctgaccaggatagctacaccgatagcaccgacggctggtcaagcattaactgcggtactctgccgcctcccatgtccaagatccccgctgatcgctatagagttgaaggctccttcgcccagccaccactgaacgctcctaaaagggagtggtctcggaaagcctttggcatgcagtcgatctttggacctcacaggaatgtgcgcaagactaaagaggacaaaaaaggcagtaaattcggacgcggtactggtctgacccagcccagccagaggacgagcgctaggcgctccttcggcagatccaaaaggttcagcattacgaggtccctcgatgatttggaaagcgccaccgtttcagacggggagctgaccggggctgatctcaaagattgcgtgagtaacaattcactctccagtaacgcctctttaccttcagtgcagtcttgcaggcgattgagagagcgacgcgtcgctagttgggctgtcagttttgaacggcttttgcaagatccggtgggcgttcggtacttttccgactttcttaggaaggagttctccgaagaaaacattttattctggcaagcctgcgaatatttcaatcatgtcccagcccatgataagaaagaactctcgtatagagctcgagagattttctccaagtttctgtgctccaaggccaccacacctgtgaacattgactcccaagctcaactcgccgacgacgtgttaagagcaccacacccagatatgtttaaggagcagcagctgcaaatttttaatttgatgaaatttgatagttacaccagatttctcaagagcccactctatcaggaatgtattctggcggaggtcgaaggtcgggcactccccgactcgcagcaggtccctagttcccccgcttctaaacactctctgggctctgatcactccagtgtgtctactcccaagaagctgtccggcaaatccaagtcagggaggagcttaaatgaggagttgggggacgaggattcggagaaaaagaggaaaggagcattcttctcgtggtctcggactcggtctacaggcagatctcagaagaagcgggagcatggggaccacgccgatgatgcgcttcacgctaacggaggactgtgcagaagggagagccagggctcagtgagctctgccggatcgttagatttgtcagaagcgtgtcgcacgctggcgcctgagaaagacaaggcaactaaacactgttgtatccacctgccggacggcactagctgtgtggtcgctgtcaaggcgggtttcagtattaaagatattctcagcggcctttgcgaacgacacggaattaacggcgctgccgctgacttgttcctagtcggtggcgataaacctctggtccttcaccaggactccagtatcctagaaagcagagatctgcgactggaaaagagaaccttatttcggctcgaccttgtgccgattaataggagcgttggactgaaggctaagcccactaagccagtaacggaggtgctgcgccctgttgttgcaagatatggtctcgatctaagtggtctccttgttagactaagcggagagaaggagccccttgacctcggagcacctatcagctctctggacggccaaagagtggtgcttgaggaaaaggatccaagccgagggaaggcctccgctgacaaacaaaagggcgtaccggttaaacagaatactgctgtgaacagttccagccggaaccacagtgctacaggggaggagcggacgcttggcaagtctaattcaatcaaaatcaaaggtgaaaatggcaaaaacgcacgggatcccaggttgtctaagagggaggagtccattgcaaagataggaaaaaagaagtaccagaaaattaacttggacgaggcggaagagttttttgagcttatcagcaaagcccaatccaatcgtgctgacgatcagcgaggcctgctgcgaaaggaagacttggtgctccccgagttcttgagactgccacccggttccaccgaattgacactgcctacccccgcagctgtggctaaaggcttcagcaaacggagcgccacgggaaatggtcgcgagtccgcctcacagcccggtgagcagtgggaaccagtgcaggaaagcagcgattcccccagcacatcccctgggtcggcatcttcaccaccaggacccccagggacaacaccccctggtcaaaagtccccaagcggacctttttgcactccccagtccccggtatcccttgctcaggaaggcactgcccagatttggaagcgtcaatcacaggaggtggaggccggagggatccagacagtggaggacgagcatgtggcggaactcacgttgatgggagagggagacatatcctcccctaatagcacgctcctgcctcccccttcaacaccgcaggaagtgcccggtcctagtcgaccaggctctggaactcacggatctcgggatttgcccgttaatcggattatcgatgtggacctcgttacaggatctgcaccaggtagggacggcggaatcgccggagcacaggcgggacccggaagaagtcaggctagcggtggcccaccaactagtgatctgccaggcctcgggccagtccccggagagcccgcaaagccaaagacttcagcccaccacgccacattcgtgtag

SEQ ID NO: 287443 - DNA, 5469 bp, Artificial Sequence
  derived and/or modified sequence
atttatattcattttttactcttttccatcaaaacataattttactaagtacgcatgttctgtgtccgtgttttgtcatcactgaagccacttttggagtcacctagtaatagcctttccactctatctagttctgtagcttttatgtgtgtaaattacttcaaatctgtttatgatcctattgctggaaactttatcccaagacacaaaaatcttttctattagaagttattaactttaaaacaattatttattttattttattttattttttgagacagagtctcgctttgtcacccaggctggagtgcagtggcacgatctcggctcactgcaagctccacctcccgagttcatgccattctcctgcctcagcctcccgagtagctgggactacgggcgtccgccaccatgcccagctaattttttttgtatttttggtagagacaaggtttcaccgtgttagccaggatggtcttgatctcctgacctcgtggtccacctgcctcggcctcccaaagcgctgggattataggcgtgagccaccgcacctggcctaaaacaattatttctttaaaaaaacataccctctattctattttgtgtcttcacaacacaatcacttactgtattgctttttaaagtgatctttaaagagtcttgcagaagagactacacagcaggcccgagaccatcctgagaggcctgtgtgcaaggctggccccccgctggtgtcaggacggtgcccaccaccctcaatgaagaggggctccctgtgcttagctgcttgtgtggggaacaagggcactgtttgaagaagcaaacatggtagcatcaagcattccttgaaatatggctccaagggaacaatgagacgtgctcttggtcttggaagctcatcagaatgtttagagctggggaggcctccaaacgcccattgcctgggccgtcgcccccaagggtgcggagtgtggaggttgcccgggggagggccggctacggattcacgctttcgggacaggcaccctgtgtgctcagctgcgtcatgagagggagccctgcggatttcgtgggcctccgagctggagaccagatacttgctgtcaatgaaatcaacgtgaaaaaagcatctcatgaagatgtagtgaaattaattgggaagtgctctggtgtccttcacatggtgattgctgaaggcgtcggccgcttcgaatcctgttccagtgatgaagaagggggactctatgaaggaaaaggctggctgaagcccaagctggattctaaagcactaggtataaacagagcagagcgagtcgtggaggaaatgcagtctggtggaattttcaatatgatttttgaaaacccgagcctttgtgcgagcaattcagagcccttgaaattgaaacaaagatccctttcagagtcggccgcaactcgatttgatgttggacatgaaagtataaataatccaaatcccaacatgctttctaaggaggaaatatcaaaagttattcatgatgattcggttttcagcattggactagaaagtcatgacgattttgcattggatgcaagtattttaaacgtggcgatgatcgtgggctacttaggctccattgagcttccttccacgagctccaacctggagtccgacagcttgcaagccatccgcggctgcatgcggcgcctgcgggcagagcagaaaatccactcgctggtgaccatgaagatcatgcacgactgtgtgcagctgagcactgacaaggctggagtcgtggccgagtacccggccgagaagctggccttcagcgccgtgtgcccggacgaccggcgatttttcgggttggttaccatgcagacgaatgacgacgggagcctggcccaggaggaggagggcgccctgcggacttcctgccacgtgttcatggtggacccagacttgtttaatcacaagatccaccaaggcattgctcggcggtttgggtttgagtgcacggccgacccagacaccaatggctgtctggaattcccggcgtcctccctccccgtcctgcagttcatctctgtcctgtaccgagacatgggtgagctgattgagggcatgcgggcccgcgcctttctggacggggacgccgatgcccaccagaacaacagcaccagcagcaacagtgacagcggcattgggaacttccaccaggaggagaagagcaaccgggtccttgtggtggacctgggtgggagctcgagcagacacggccccggaggcagcgcgtgggacggtgtgggtgggaggggtgcccagccctggggtgctccctggactgggcccttctgtccggaccccgaagggagccccccatttgaggccgctcatcagactgacaggttctgggacctaaacaagcacctagggccagcctctcctgtggaggtgcccccagcttccttgaggagctcagtccccccttccaagaggggcaccgtgggtgctggctgtggtttcaaccagcgctggctcccggtccacgtgctccgggagtggcagtgcggacacaccagcgaccaggactcttacacagattccaccgatggctggtccagcatcaactgcggcacactgccccctcctatgagcaagatccccgcagaccgctacagggtggagggcagcttcgcgcagcccccgctgaatgccccgaagagggagtggtccaggaaggcctttggaatgcaaagcatttttggtccccatcgaaatgttcgaaagactaaggaagataaaaagggctcaaaatttgggcggggaactggactcactcagccttctcaacgcacgtctgctcggagatcatttgggagatccaagagattcagtatcactcgctcccttgatgatcttgagtctgcaactgtgtctgatggcgagttgacgggcgccgacctgaaggactgcgtcagcaacaacagcctgagcagcaatgccagcctccccagcgtgcagagctgccggcgcctgcgtgagaggagggtcgccagctgggccgtgtcctttgagcgcctgctgcaggaccccgtcggtgtccgctacttctctgattttctaaggaaagaattcagtgaagaaaacattttattctggcaggcctgtgaatattttaatcatgttcctgcacatgacaaaaaggagctttcctacagggcccgggagattttcagtaagtttctctgcagcaaagccaccaccccggtcaacatcgacagccaggcccagctagcagacgacgtcctccgcgcacctcacccagacatgttcaaggagcagcagctgcagatcttcaatctcatgaagtttgatagctacactcgctttctgaagtccccgctgtaccaggaatgcatcctggcggaagtggagggccgtgcactcccggactcgcagcaggtccccagcagcccggcttccaagcacagcctcggttcagaccactccagtgtgtccacgccaaaaaagttaagtggaaaatcaaaatccggccgatccctgaatgaagagctgggggatgaggacagcgagaagaagcggaaaggcgcgtttttctcgtggtcgcggaccaggagcaccgggaggtcccagaaaaagagggagcacggggaccacgcagacgacgccctgcatgccaatggaggcctgtgtcgccgagagtcgcagggctctgtgtcctctgcggggagcctggacctgtcggaggcctgcaggactttggcacccgagaaggacaaggccaccaagcactgctgcattcatctcccggatgggacatcctgcgtggtggctgtcaaggcgggcttctccatcaaagacatcctgtccggactctgtgagcggcatggcatcaacggggcggccgcggacctcttcctggtgggcggggacaagcctctggtgctgcaccaagacagtagcatcttggagtcaagggacctgcgcctagaaaagcgcaccttgtttcggctggatcttgttccgattaaccggtcagtgggactcaaggccaagcccaccaagcccgtcacggaggtgctgcggcccgtggtggccagatacggcctggacctcagtggcctgctggtgaggctgagtggagagaaggagcccctggaccttggcgcccctatatcgagtctggacggacagcgggttgtcttggaggagaaggatccttccagaggaaaggcatccgcagataaacagaaaggtgtgccagtgaaacagaacacagctgtaaattccagctccagaaaccactcggctacgggagaggaaagaacactaggcaagtctaattctattaaaataaaaggagaaaatggaaaaaatgctagggatccccggctttcaaagagagaagaatctattgcaaagattgggaaaaaaaaatatcagaaaattaatttggacgaagcagaggagttttttgagcttatttccaaagctcagagcaacagagcagatgaccaacgtgggctgctaaggaaggaagacctggtgttgccagagttcctccgtttacctcctggttccacagaactcaccctccccactccagctgctgtggccaagggctttagcaagagaagcgccacaggcaacggccgggagagcgcctcccagcctggcgagcagtgggagccagtccaggagagcagcgacagcccgtccaccagcccgggctcagcctccagcccccctggacctcctgggacgaccccccccgggcagaagtctcccagcgggcccttctgcactccccagtcccccgtctccctcgcgcaggagggcaccgcccagatctggaagaggcagtctcaggaagtggaggccgggggcatccagacggtggaggatgagcacgtggccgagctgaccctgatgggggagggggacatcagcagccccaacagcaccttgctgccgccgccctccaccccccaggaagtgccaggaccttccagaccaggaagtgggacccatggcagccgagacctcccagtcaacagaatcatcgatgtggatcttgtaactggctcggcgcccgggcgggatggtggcatagcgggggcacaggctggccctgggaggtcgcaggccagtggtgggcctcctacatcagacctccctggcttgggccccgtcccgggtgagcctgctaagcccaagaccagcgctcaccacgccaccttcgtctgagctgccctggcctggccaactctcctgtggacatgtcggggtggggcagcccaggtggattctgtgggcctcaggggggccaccctggccaccacaccctcaggagcccagccaggagggcagggggtgacctcgctggaggcactggccccggacattcgccatgctggccatggggctccctggccctggcctcctgctgcccaataaagcatttctga

SEQ ID NO: 287444 - protein, 555 aa, Artificial Sequence
  derived and/or modified sequence
MKKHDFAENLPSSLLIIILVIFTLSGSKFGRGTGLTQPSQRTSARRSFGRSKRFSITRSLDDLESATVSDGELTGADLKDCVSNNSLSSNASLPSVQSCRRLRERRVASWAVSFERLLQDPVGVRYFSDFLRKEFSEENILFWQACEYFNHVPAHDKKELSYRAREIFSKFLCSKATTPVNIDSQAQLADDVLRAPHPDMFKEQQLQIFNLMKFDSYTRFLKSPLYQECILAEVEGRALPDSQQVPSSPASKHSLGSDHSSVSTPKKLSGKSKSGRSLNEELGDEDSEKKRKGAFFSWSRTRSTGRSQKKREHGDHADDALHANGGLCRRESQGSVSSAGSLDLSEACRTLAPEKDKATKHCCIHLPDGTSCVVAVKAGFSIKDILSGLCERHGINGAAADLFLVGGDKPLVLHQDSSILESRDLRLEKRTLFRLDLVPINRSVGLKAKPTKPVTEVLRPVVARYGLDLSGLLVRLSGEKEPLDLGAPISSLDGQRVVLEEKDPSRGKASADKQKGVPVKQNTAVNSSSRNHSATSFLSLFPKLRATEQMTNVGC

SEQ ID NO: 287445 - protein, 499 aa, Artificial Sequence
  derived and/or modified sequence
MSLSLFFQSATVSDGELTGADLKDCVSNNSLSSNASLPSVQSCRRLRERRVASWAVSFERLLQDPVGVRYFSDFLRKEFSEENILFWQACEYFNHVPAHDKKELSYRAREIFSKFLCSKATTPVNIDSQAQLADDVLRAPHPDMFKEQQLQIFNLMKFDSYTRFLKSPLYQECILAEVEGRALPDSQQVPSSPASKHSLGSDHSSVSTPKKLSGKSKSGRSLNEELGDEDSEKKRKGAFFSWSRTRSTGRSQKKREHGDHADDALHANGGLCRRESQGSVSSAGSLDLSEACRTLAPEKDKATKHCCIHLPDGTSCVVAVKAGFSIKDILSGLCERHGINGAAADLFLVGGDKPLVLHQDSSILESRDLRLEKRTLFRLDLVPINRSVGLKAKPTKPVTEVLRPVVARYGLDLSGLLVRLSGEKEPLDLGAPISSLDGQRVVLEEKDPSRGKASADKQKGVPVKQNTAVNSSSRNHSATSFLSLFPKLRATEQMTNVGC

SEQ ID NO: 287446 - DNA, 1668 bp, Artificial Sequence
  derived and/or modified sequence
atgaagaagcacgacttcgccgagaacctgcccagcagcctgctgatcatcatcctggtgatcttcaccctgagcggcagcaagttcggcagaggcaccggcctgacccagcccagccagagaaccagcgccagaagaagcttcggcagaagcaagagattcagcatcaccagaagcctggacgacctggagagcgccaccgtgagcgacggcgagctgaccggcgccgacctgaaggactgcgtgagcaacaacagcctgagcagcaacgccagcctgcccagcgtgcagagctgcagaagactgagagagagaagagtggccagctgggccgtgagcttcgagagactgctgcaggaccccgtgggcgtgagatacttcagcgacttcctgagaaaggagttcagcgaggagaacatcctgttctggcaggcctgcgagtacttcaaccacgtgcccgcccacgacaagaaggagctgagctacagagccagagagatcttcagcaagttcctgtgcagcaaggccaccacccccgtgaacatcgacagccaggcccagctggccgacgacgtgctgagagccccccaccccgacatgttcaaggagcagcagctgcagatcttcaacctgatgaagttcgacagctacaccagattcctgaagagccccctgtaccaggagtgcatcctggccgaggtggagggcagagccctgcccgacagccagcaggtgcccagcagccccgccagcaagcacagcctgggcagcgaccacagcagcgtgagcacccccaagaagctgagcggcaagagcaagagcggcagaagcctgaacgaggagctgggcgacgaggacagcgagaagaagagaaagggcgccttcttcagctggagcagaaccagaagcaccggcagaagccagaagaagagagagcacggcgaccacgccgacgacgccctgcacgccaacggcggcctgtgcagaagagagagccagggcagcgtgagcagcgccggcagcctggacctgagcgaggcctgcagaaccctggcccccgagaaggacaaggccaccaagcactgctgcatccacctgcccgacggcaccagctgcgtggtggccgtgaaggccggcttcagcatcaaggacatcctgagcggcctgtgcgagagacacggcatcaacggcgccgccgccgacctgttcctggtgggcggcgacaagcccctggtgctgcaccaggacagcagcatcctggagagcagagacctgagactggagaagagaaccctgttcagactggacctggtgcccatcaacagaagcgtgggcctgaaggccaagcccaccaagcccgtgaccgaggtgctgagacccgtggtggccagatacggcctggacctgagcggcctgctggtgagactgagcggcgagaaggagcccctggacctgggcgcccccatcagcagcctggacggccagagagtggtgctggaggagaaggaccccagcagaggcaaggccagcgccgacaagcagaagggcgtgcccgtgaagcagaacaccgccgtgaacagcagcagcagaaaccacagcgccaccagcttcctgagcctgttccccaagctgagagccaccgagcagatgaccaacgtgggctgctag

SEQ ID NO: 287447 - DNA, 1500 bp, Artificial Sequence
  derived and/or modified sequence
atgagcctgagcctgttcttccagagcgccaccgtgagcgacggcgagctgaccggcgccgacctgaaggactgcgtgagcaacaacagcctgagcagcaacgccagcctgcccagcgtgcagagctgcagaagactgagagagagaagagtggccagctgggccgtgagcttcgagagactgctgcaggaccccgtgggcgtgagatacttcagcgacttcctgagaaaggagttcagcgaggagaacatcctgttctggcaggcctgcgagtacttcaaccacgtgcccgcccacgacaagaaggagctgagctacagagccagagagatcttcagcaagttcctgtgcagcaaggccaccacccccgtgaacatcgacagccaggcccagctggccgacgacgtgctgagagccccccaccccgacatgttcaaggagcagcagctgcagatcttcaacctgatgaagttcgacagctacaccagattcctgaagagccccctgtaccaggagtgcatcctggccgaggtggagggcagagccctgcccgacagccagcaggtgcccagcagccccgccagcaagcacagcctgggcagcgaccacagcagcgtgagcacccccaagaagctgagcggcaagagcaagagcggcagaagcctgaacgaggagctgggcgacgaggacagcgagaagaagagaaagggcgccttcttcagctggagcagaaccagaagcaccggcagaagccagaagaagagagagcacggcgaccacgccgacgacgccctgcacgccaacggcggcctgtgcagaagagagagccagggcagcgtgagcagcgccggcagcctggacctgagcgaggcctgcagaaccctggcccccgagaaggacaaggccaccaagcactgctgcatccacctgcccgacggcaccagctgcgtggtggccgtgaaggccggcttcagcatcaaggacatcctgagcggcctgtgcgagagacacggcatcaacggcgccgccgccgacctgttcctggtgggcggcgacaagcccctggtgctgcaccaggacagcagcatcctggagagcagagacctgagactggagaagagaaccctgttcagactggacctggtgcccatcaacagaagcgtgggcctgaaggccaagcccaccaagcccgtgaccgaggtgctgagacccgtggtggccagatacggcctggacctgagcggcctgctggtgagactgagcggcgagaaggagcccctggacctgggcgcccccatcagcagcctggacggccagagagtggtgctggaggagaaggaccccagcagaggcaaggccagcgccgacaagcagaagggcgtgcccgtgaagcagaacaccgccgtgaacagcagcagcagaaaccacagcgccaccagcttcctgagcctgttccccaagctgagagccaccgagcagatgaccaacgtgggctgctag

SEQ ID NO: 287448 - DNA, 2004 bp, Artificial Sequence
  derived and/or modified sequence
atgttcagagccggcgaggccagcaagagacccctgcccggccccagcccccccagagtgagaagcgtggaggtggccagaggcagagccggctacggcttcaccctgagcggccaggccccctgcgtgctgagctgcgtgatgagaggcagccccgccgacttcgtgggcctgagagccggcgaccagatcctggccgtgaacgagatcaacgtgaagaaggccagccacgaggacgtggtgaagctgatcggcaagtgcagcggcgtgctgcacatggtgatcgccgagggcgtgggcagattcgagagctgcagcagcgacgaggagggcggcctgtacgagggcaagggctggctgaagcccaagctggacagcaaggccctgggcatcaacagagccgagagagtggtggaggagatgcagagcggcggcatcttcaacatgatcttcgagaaccccagcctgtgcgccagcaacagcgagcccctgaagctgaagcagagaagcctgagcgagagcgccgccaccagattcgacgtgggccacgagagcatcaacaaccccaaccccaacatgctgagcaaggaggagatcagcaaggtgatccacgacgacagcgtgttcagcatcggcctggagagccacgacgacttcgccctggacgccagcatcctgaacgtggccatgatcgtgggctacctgggcagcatcgagctgcccagcaccagcagcaacctggagagcgacagcctgcaggccatcagaggctgcatgagaagactgagagccgagcagaagatccacagcctggtgaccatgaagatcatgcacgactgcgtgcagctgagcaccgacaaggccggcgtggtggccgagtaccccgccgagaagctggccttcagcgccgtgtgccccgacgacagaagattcttcggcctggtgaccatgcagaccaacgacgacggcagcctggcccaggaggaggagggcgccctgagaaccagctgccacgtgttcatggtggaccccgacctgttcaaccacaagatccaccagggcatcgccagaagattcggcttcgagtgcaccgccgaccccgacaccaacggctgcctggagttccccgccagcagcctgcccgtgctgcagttcatcagcgtgctgtacagagacatgggcgagctgatcgagggcatgagagccagagccttcctggacggcgacgccgacgcccaccagaacaacagcaccagcagcaacagcgacagcggcatcggcaacttccaccaggaggagaagagcaacagagtgctggtggtggacctgggcggcagcagcagcagacacggccccggcggcagcgcctgggacggcgtgggcggcagaggcgcccagccctggggcgccccctggaccggccccttctgccccgaccccgagggcagcccccccttcgaggccgcccaccagaccgacagattctgggacctgaacaagcacctgggccccgccagccccgtggaggtgccccccgccagcctgagaagcagcgtgccccccagcaagagaggcaccgtgggcgccggctgcggcttcaaccagagatggctgcccgtgcacgtgctgagagagtggcagtgcggccacaccagcgaccaggacagctacaccgacagcaccgacggctggagcagcatcaactgcggcaccctgcccccccccatgagcaagatccccgccgacagatacagagtggagggcagcttcgcccagccccccctgaacgcccccaagagagagtggagcagaaaggccttcggcatgcagagcatcttcggcccccacagaaacgtgagaaagaccaaggaggacaagaagggcagcaagttcggcagaggcaccggcctgacccagcccagccagagaaccagcgccagaagaagcttcggcagaagcaagagattcagcatcaccagaagcctggacgacctggagagctag

SEQ ID NO: 287449 - DNA, 1668 bp, Artificial Sequence
  derived and/or modified sequence
atgaaaaagcacgattttgctgaaaacctgcccagtagcctgctgattattatcctcgtgattttcacgctctcagggtcgaagttcgggaggggaaccggtcttactcaaccttctcagcgtaccagtgcccgcagaagtttcggccggtccaaaagatttagcatcactaggtccctggatgatcttgagagcgcaaccgtttctgacggggaactgaccggagcggacctaaaagattgcgtcagtaataatagcctgtcttctaatgcctccctcccaagtgtccagtcttgccggcgccttcgcgagcgtcgcgtcgcatcatgggctgtttcgtttgaacggctcttacaggacccagttggagttcgttatttttcagattttctgagaaaggagttttcagaagaaaatattctgttctggcaggcctgcgaatacttcaaccacgttcctgctcacgataaaaaggaactctcatatagagcaagagagatattttcaaagttcttgtgctctaaggcaaccactccagtcaatattgattcccaggctcagttggcagacgatgtgttaagagctccccacccagatatgttcaaggaacagcaactccagattttcaaccttatgaaatttgacagctacacaaggttcctgaagtcccctctgtatcaggagtgcatccttgcggaagtggaagggcgagcgcttcccgattcacagcaggtaccctctagcccagcttctaagcactctcttggctcagatcacagttccgtcagcactcccaagaagttgtccgggaagagcaaatccggccgcagcctgaatgaggaactgggggatgaggattctgaaaaaaaaagaaagggagcattcttctcctggtcccggactcgatcaactggcagaagccagaaaaagcgagaacatggagatcatgccgacgacgcactgcacgccaatggaggactttgccgtagagagagccagggatctgtctcctctgccgggtccctggatctcagcgaagcgtgccgcacattagcacctgagaaagacaaggcgactaagcattgctgcattcatctgccagacggcaccagttgcgtggttgctgtgaaggccggcttctctattaaggacatactgtcgggtctatgcgagagacacggaattaatggggccgccgctgacttgtttctcgtgggaggcgataaacctctggtgctgcatcaggacagcagcattcttgagtctcgcgaccttcggttagagaagcggaccctgtttagactagatttagtgcccataaaccggtctgtcgggctgaaagccaaacccactaagccggtgaccgaggtcctgaggcccgttgttgccaggtacgggctcgacctttcagggctgttggttcggctgagtggagagaaggaaccgcttgatctgggagctcctatctcttccctggacggtcaaagggtcgttttggaagaaaaagacccttcccggggcaaggccagtgcagacaaacagaagggcgtccccgttaagcagaataccgctgtgaactcctcctctcgcaatcatagtgctacatcttttctttccttatttccaaagcttcgtgcaaccgagcagatgaccaatgtgggatgctag

SEQ ID NO: 287450 - DNA, 1500 bp, Artificial Sequence
  derived and/or modified sequence
atgtcgttgtcactgtttttccagagcgcaactgtgagtgatggcgagctcactggagccgacttgaaagactgcgtgtcgaataattcactgagctccaacgctagtctaccttccgttcagtcctgccgtcgcctgcgtgagcggcgtgtcgcctcttgggctgtgtctttcgaaagactgctccaggaccctgttggggttagatatttctccgactttttaaggaaagagttctcagaggaaaatattttgttttggcaggcttgtgaatatttcaaccacgtacccgcccacgacaagaaagagctgtcttatagggcccgagagatattcagtaagttcctgtgctccaaggctacaactccggttaatatcgacagtcaggcacagctcgctgatgatgtgttgcgagcaccccatcccgatatgttcaaagaacagcaactgcagatcttcaacctgatgaagttcgattcttatactcgctttttgaagtcacccctgtaccaagagtgcatattagccgaagtggaaggcagggcactgccggattctcaacaggtgccatccagccccgcctcgaaacattccctcgggtctgatcacagttccgtgagcactccgaaaaaactgtctggaaaaagtaagagtggacgcagtctcaacgaggaactaggtgacgaagatagcgaaaagaaaaggaaaggagcctttttcagctggagcaggactcgcagtactggccggagccagaaaaagcgggagcacggagaccacgcggatgacgctctacatgccaacgggggactatgtcgccgagaatcacagggatctgtgagcagtgccgggtccctggatctatctgaggcctgcaggacactagcccctgagaaagacaaagcaacgaaacactgttgcatccatctacccgacggaacctcttgtgtcgtggccgtgaaagccggtttcagtattaaagatatcctcagtggattatgcgagcgacacgggatcaacggagctgctgctgatctgtttttagtgggcggggacaaaccactagtgctgcaccaggactcatctatccttgaaagccgcgatctccggttagagaaacgaaccttgttccgcctggacttagtgccaatcaatagaagtgttgggttgaaggccaagcctactaaacctgtgaccgaggttctgagaccagtcgtagctagatacggactggacttaagcgggttgctcgtgaggcttagcggtgagaaggagcctctcgatctcggtgcaccaatctcaagtctggacgggcagagagttgttctagaggagaaggacccctctcgtggtaaggcctctgcagataagcagaagggcgtcccagttaagcagaacacagctgtcaattcatcctctagaaaccattccgccacttctttcctgtcactctttcccaaactccgcgccactgagcagatgaccaatgtaggatgctag

SEQ ID NO: 287451 - DNA, 2004 bp, Artificial Sequence
  derived and/or modified sequence
atgtttagagccggcgaggcatctaagcgacccctgccgggcccgtctcctcctagagtacggtccgtggaggtggcccgaggacgagctgggtacgggtttacgctctctggacaggccccctgcgtactcagctgcgttatgcgcgggtccccagctgattttgtaggcctccgcgctggagatcaaatacttgccgtgaatgagattaacgtcaaaaaagcgtcccacgaagacgtagttaaactaatagggaaatgttccggtgtgctgcatatggtcatcgccgaaggagtcggtcgcttcgagtcttgttcctctgacgaagagggagggttgtacgagggcaagggctggctgaagcccaaactggacagtaaggccctcggaatcaatcgcgcagaaagggtggtggaggagatgcaatctggtggcatctttaatatgatctttgaaaacccttcattgtgtgcgtctaacagtgagccactgaagctaaagcagcgatcattgagtgagagcgctgctactcgcttcgacgttgggcatgagtccatcaataatcctaacccgaacatgctgagcaaagaagagattagtaaggtgattcatgacgactctgtgttctctatcggcctggagagtcacgacgacttcgcgctagacgcgtcaatcttaaacgttgccatgatcgtgggctatctaggctctatcgaacttcccagtaccagctcgaatctggagagtgattccctccaggccattcgaggatgcatgcgacggttgcgggctgaacagaaaattcactctctggtgacaatgaagataatgcatgattgcgtgcagctctccacggacaaggctggcgttgtggccgagtatccagcagagaaactggccttctccgccgtttgtccagacgaccgtagattctttggactggtgacaatgcagaccaatgacgacgggtccctggcacaggaggaagaaggcgccctgaggacatcttgccatgttttcatggtagatccggacctcttcaatcacaaaatccaccagggcatcgctcgccgctttggatttgagtgcaccgcagaccccgacacaaatgggtgtctggagttccccgcgtccagccttcctgtgctgcaatttattagcgtgctatatagggacatgggcgagcttatcgagggaatgcgggcaagagccttcctcgacggcgacgcggatgcccatcagaataactctactagcagtaatagcgacagtggcatcggaaattttcatcaggaagaaaaatctaatcgagttctcgttgtggacttgggaggtagtagtagcagacacggccccggcggctctgcctgggacggcgtgggcggcagaggggctcagccttggggggcaccctggacagggccattttgtcccgatccagagggttcaccacccttcgaagcggcccatcagactgacaggttttgggacctgaataagcacttgggacccgctagtcctgtggaagtgcctcctgcttccctgcggtcttcggtgccaccgtccaaacgcgggacggtaggcgccggctgtggttttaaccagcggtggctccccgtccatgtcctgagggaatggcaatgtggacatacatcagaccaggacagctataccgattctactgacggatggtcatctatcaattgcggaactctcccccccccaatgagcaagatcccggcagatcgttaccgggttgagggatcattcgctcagccaccgctgaacgcacccaagcgtgaatggagccgcaaagcctttggcatgcagtcaatttttggcccacaccggaacgtgaggaaaactaaggaagataaaaaggggtccaaatttggaaggggcaccgggcttactcagcccagccagaggacaagtgccagacgatccttcggacggtctaaacgattctccatcactcgcagtttggatgacttagaatcctag

SEQ ID NO: 287452 - DNA, 1668 bp, Artificial Sequence
  derived and/or modified sequence
atgaagaagcatgactttgctgagaacctgcccagcagcctgctgatcatcatcctggtgatcttcaccctgagcggcagcaagtttggccggggcaccggcctgacccagcccagccagaggaccagcgcccggcgcagctttggccgcagcaagcgcttcagcatcaccaggagcctggatgacctggagagcgccaccgtgtctgatggagagctgaccggggctgacctgaaggactgtgtgagcaacaacagcctgagcagcaatgccagcctgcccagcgtgcagagctgccggcggctgcgggagaggagagtggcctcctgggccgtgtcctttgagcggctgctgcaggaccctgtgggcgtgcgctacttcagtgacttcctgaggaaggagttcagcgaggagaacatcctcttctggcaggcctgtgagtacttcaaccacgtgcctgcccatgacaagaaggagctgagctaccgggcccgggagatcttcagcaagttcctgtgcagcaaggccaccacccctgtgaacatcgacagccaggcccagctggctgatgatgtgctgcgggccccccacccagacatgttcaaggagcagcagctgcagatcttcaacctgatgaagtttgacagctacacccgcttcctgaagagccccctgtaccaggagtgcatcctggccgaggtggagggccgggccctgcctgacagccagcaggtgcccagcagccctgccagcaagcacagcctgggcagtgaccacagctctgtgtccacccccaagaagctgagcggcaagagcaagagcggccgcagcctgaatgaggagctgggagatgaagattctgagaagaagaggaagggggccttcttctcctggagcaggaccaggagcacaggccgcagccagaagaagcgggagcacggggaccatgctgatgatgccctgcacgccaacggcggcctgtgcagaagagagagccagggctctgtgagcagcgctggcagcctggacctgtctgaggcctgcaggaccctggcccctgagaaggacaaggccaccaagcactgctgcatccacctgcctgatggcaccagctgtgtggtggccgtgaaggccggcttcagcatcaaggacatcctgagcggcctgtgtgaaagacatggcatcaacggggctgctgctgacctcttcctggtgggcggggacaagcccctggtgctgcaccaggacagcagcatcctggagagccgggacctgcggctggagaagaggaccctcttccggctggacctggtgcccatcaacagatctgtgggcctgaaggccaagcccaccaagcctgtgacagaggtgctgcggcctgtggtggcccgctatggcctggacctgagcggcctgctggtgcggctgtctggagagaaggagcccctggacctgggcgcccccatcagcagcctggatggccagagggtggtgctggaggagaaggaccccagccggggcaaggccagcgctgacaagcagaagggcgtgcctgtgaagcagaacacagctgtgaacagcagcagcaggaaccacagcgccaccagcttcctgagcctcttccccaagctgcgggccacagagcagatgaccaacgtgggctgctag

SEQ ID NO: 287453 - DNA, 1500 bp, Artificial Sequence
  derived and/or modified sequence
atgagcctgagcctcttcttccagagcgccaccgtgtctgatggagagctgaccggggctgacctgaaggactgtgtgagcaacaacagcctgagcagcaatgccagcctgcccagcgtgcagagctgccggcggctgcgggagaggagagtggcctcctgggccgtgtcctttgagcggctgctgcaggaccctgtgggcgtgcgctacttcagtgacttcctgaggaaggagttcagcgaggagaacatcctcttctggcaggcctgtgagtacttcaaccacgtgcctgcccatgacaagaaggagctgagctaccgggcccgggagatcttcagcaagttcctgtgcagcaaggccaccacccctgtgaacatcgacagccaggcccagctggctgatgatgtgctgcgggccccccacccagacatgttcaaggagcagcagctgcagatcttcaacctgatgaagtttgacagctacacccgcttcctgaagagccccctgtaccaggagtgcatcctggccgaggtggagggccgggccctgcctgacagccagcaggtgcccagcagccctgccagcaagcacagcctgggcagtgaccacagctctgtgtccacccccaagaagctgagcggcaagagcaagagcggccgcagcctgaatgaggagctgggagatgaagattctgagaagaagaggaagggggccttcttctcctggagcaggaccaggagcacaggccgcagccagaagaagcgggagcacggggaccatgctgatgatgccctgcacgccaacggcggcctgtgcagaagagagagccagggctctgtgagcagcgctggcagcctggacctgtctgaggcctgcaggaccctggcccctgagaaggacaaggccaccaagcactgctgcatccacctgcctgatggcaccagctgtgtggtggccgtgaaggccggcttcagcatcaaggacatcctgagcggcctgtgtgaaagacatggcatcaacggggctgctgctgacctcttcctggtgggcggggacaagcccctggtgctgcaccaggacagcagcatcctggagagccgggacctgcggctggagaagaggaccctcttccggctggacctggtgcccatcaacagatctgtgggcctgaaggccaagcccaccaagcctgtgacagaggtgctgcggcctgtggtggcccgctatggcctggacctgagcggcctgctggtgcggctgtctggagagaaggagcccctggacctgggcgcccccatcagcagcctggatggccagagggtggtgctggaggagaaggaccccagccggggcaaggccagcgctgacaagcagaagggcgtgcctgtgaagcagaacacagctgtgaacagcagcagcaggaaccacagcgccaccagcttcctgagcctcttccccaagctgcgggccacagagcagatgaccaacgtgggctgctag

SEQ ID NO: 287454 - DNA, 2004 bp, Artificial Sequence
  derived and/or modified sequence
atgttccgggccggggaggccagcaagaggcccctgcccggccccagccccccccgggtgcgctctgtggaggtggcccggggccgggccggctacggcttcaccctgagcggccaggccccctgtgtgctgagctgtgtgatgaggggcagccctgctgactttgtgggcctgcgggccggggaccagatcctggccgtgaatgagatcaacgtgaagaaggccagccatgaagatgtggtgaagctgattggcaagtgcagcggcgtgctgcacatggtgattgctgagggcgtgggccgctttgagagctgcagcagtgatgaggagggcggcctgtatgagggcaagggctggctgaagcccaagctggacagcaaggccctgggcatcaacagagctgagcgggtggtggaggagatgcagagcggcggcatcttcaacatgatctttgagaaccccagcctgtgtgccagcaacagcgagcccctgaagctgaagcagaggagcctgtctgagagcgctgccaccaggtttgatgtgggccacgagagcatcaacaaccccaaccccaacatgctgagcaaggaggagatcagcaaggtgattcatgatgattctgtgttcagcatcggcctggagagccatgatgactttgccctggatgccagcatcctgaatgtggccatgattgtgggctacctgggcagcattgagctgcccagcaccagcagcaacctggagagtgacagcctgcaggccatccggggctgcatgaggcggctgcgggcagagcagaagatccacagcctggtgaccatgaagatcatgcatgactgtgtgcagctgagcacagacaaggccggcgtggtggccgagtacccagctgagaagctggccttctctgctgtgtgcccagatgaccggcgcttcttcggcctggtgaccatgcagaccaatgatgatggcagcctggcccaggaggaggagggcgccctgcggaccagctgccacgtgttcatggtggaccctgacctcttcaaccacaagatccaccagggcatcgccaggagatttggatttgagtgcacagctgaccctgacaccaacggctgcctggagttccctgccagcagcctgcctgtgctgcagttcatctctgtgctgtacagagacatgggagagctgattgagggcatgagggcccgggccttcctggatggagatgctgatgcccaccagaacaacagcaccagcagcaacagcgacagcggcatcggcaacttccaccaggaggagaagagcaacagagtgctggtggtggacctgggcggcagcagcagccgccacggccctgggggcagcgcctgggatggagtgggcggccgcggggcccagccctggggcgccccctggacaggccccttctgcccagaccctgagggcagccccccatttgaggccgcccaccagacagaccgcttctgggacctgaacaagcacctgggccctgccagccctgtggaggtgcccccagccagcctgcggagctctgtgccccccagcaagaggggcaccgtgggcgccggctgcggcttcaaccagcgctggctgcctgtgcacgtgctgcgggagtggcagtgtggccacaccagtgaccaggacagctacacagacagcacagatggctggagcagcatcaactgtggcaccctgcccccacccatgagcaagatcccagctgaccgctacagagtggagggcagctttgcccagccccccctgaatgcccccaagcgggagtggagcaggaaggccttcggcatgcagagcatcttcggcccccacagaaatgtgaggaagaccaaggaggacaagaagggcagcaagtttggccggggcaccggcctgacccagcccagccagaggaccagcgcccggcgcagctttggccgcagcaagcgcttcagcatcaccaggagcctggatgacctggagagctag

SEQ ID NO: 287455 - DNA, 1668 bp, Artificial Sequence
  derived and/or modified sequence
atgaagaagcacgacttcgccgagaacctgcccagcagcctgctgataattatacttgtgatttttaccctctcaggaagtaagtttggcagggggactggactgactcagcctagccagcgtacctcagcaagaaggagctttggccgctccaaacgtttttctattactagaagccttgatgatctggagtctgctaccgtaagtgacggcgagctgactggagctgacctgaaggattgcgtgagcaacaacagcctgagctctaacgcctctttaccgtctgtgcaatcttgcagacgattgagagagcgccgagtggccagctgggccgtttccttcgagaggcttttgcaagaccccgtgggtgtgaggtactttagcgactttctccggaaggagttttctgaagagaacatactgttctggcaagcctgcgagtacttcaaccatgtgccagcccacgataaaaaagaactttcctatcgggctcgggagattttctctaaattcctttgctctaaggcaacaacaccagtcaacattgattctcaggcacagctcgctgacgatgttctgagggctccccatcccgacatgttcaaggaacagcagctccagatctttaacctgatgaagtttgactcatacactcggttcttgaaatctcccctgtaccaggaatgcatcctcgccgaagtggaaggcagggcccttcctgatagccaacaggtcccttcaagccctgcctcaaaacactccttaggttccgatcactctagtgtgagcacaccaaaaaaactttcaggaaaaagcaaatctggccgctcactcaatgaggagctgggagatgaggacagcgaaaagaaacggaaaggagccttctttagctggagtcggaccaggtcaaccggtcgatcacaaaaaaagcgcgaacatggcgaccacgcggatgatgccctgcatgcaaacggaggcttatgcaggcgggaatctcaaggtagcgtgtcatccgccggcagtctggatctgtcagaggcctgtaggactctggctcctgagaaagacaaagcgaccaaacactgttgtatccatttgcctgatggcacctcctgcgtggtagcagtgaaagcaggatttagtatcaaagatattctgagtggactctgcgagaggcacggcatcaacggggctgcggcagacctttttctggttgggggcgacaaacctcttgtgctgcatcaggatagctcaatcctggagagcagggatttaagactggagaagaggacgctttttcgcctggatctcgtccctatcaataggagcgtcggtcttaaggctaagccgacaaaaccagttacggaagtgcttcggcctgtagtggcacgatatggattggacctctctggcctgctagtgaggctcagcggcgagaaggagccgcttgatctgggagcccctatctctagcttggatggccagcgagtggtgctagaagagaaggacccctctcgcggcaaagccagcgccgacaagcagaagggagtgccggttaaacagaacacagccgtcaacagttccagcagaaaccactccgcgacgagttttctgtcgctgttcccaaagctgcgagctacagaacagatgactaatgtgggttgctag

SEQ ID NO: 287456 - DNA, 1500 bp, Artificial Sequence
  derived and/or modified sequence
atgagcctgagcctgttcttccagagcgccaccgtgagcgacggcgagttaacgggggctgatttgaaggactgtgtgtccaataattcacttagttctaatgccagcctgccgtcagtgcagtcctgtaggcggttacgggaacgaagagtggccagttgggcagtgtcatttgaacgtctgctgcaggacccagtcggagttcgatacttttctgattttcttagaaaagagttttctgaagaaaatattctcttctggcaagcatgtgagtattttaatcacgtgccggctcatgataaaaaggaactgtcctacagggcccgtgagattttcagtaaatttctgtgttctaaagctacaactccagttaatattgatagccaggcacaactcgccgatgatgtattgcgtgcaccccaccccgacatgtttaaagaacaacagctgcagatcttcaacttgatgaaatttgattcttataccagatttctgaaatccccactttaccaggaatgcattctggctgaagtggaaggcagagcgttacctgactcgcagcaagtgccttcctctccagcgagcaagcattctttaggcagtgaccactcttctgtatctacccctaaaaaactctccggcaagagtaaaagcggacgctctctgaatgaggagttgggcgatgaagactcagagaagaagcgaaagggagcctttttttcatggtctaggacaagatccactggtaggtcccagaagaagagggagcatggagatcatgcggacgatgcactgcacgcaaacgggggcctgtgccgccgcgagagccagggcagcgtgagctccgccggcagcctggacctctccgaggcttgtcggactcttgccccagagaaagataaggccacaaagcactgctgtatccacctgcctgatggaactagctgcgtcgtagccgttaaagctgggttttccattaaagacatcttatcaggcctttgcgagcgccacggaattaatggagctgcagcggacctcttcctggtaggcggtgataagcctctcgttttgcaccaagatagttcaatcctggagtcccgcgatctgcgcctcgagaagaggacactgttcagactcgacctggtgccaattaatcgctccgtgggcctgaaggccaagccaacaaaacccgtgaccgaggtactcaggccagttgtggcccgatatggcttagatttgagtgggctgcttgtgaggctgtccggcgaaaaggagcccctagacctaggagcacccatctcgagcttggacggccagcgggtcgtgctggaagagaaggacccttcccgcggtaaggcatccgcagacaagcagaagggagtcccagtaaagcagaacactgccgttaatagcagcagccgaaatcactcagctaccagcttcttatctctgttccccaaactcagggctaccgagcagatgactaatgtcgggtgttag

SEQ ID NO: 287457 - DNA, 2004 bp, Artificial Sequence
  derived and/or modified sequence
atgttccgggccggcgaggccagcaagcggcccctgcccggccccagccctcctagggtgcggtccgtggaagtggccaggggaagagcaggatatggttttacactgtctgggcaggccccctgcgtgctctcttgcgtgatgcgcgggagccctgccgacttcgtcggcctgcgcgctggtgaccagattctcgccgtcaacgagatcaacgtcaaaaaagctagccatgaggacgtcgtcaagctaatcggtaagtgttcaggagtgctgcatatggtaatcgccgaaggggttggcaggtttgaatcctgttctagcgatgaggaaggcggcctatacgagggtaaaggatggctcaaacccaaattggattctaaggccctagggatcaaccgcgctgagcgtgtggtagaagaaatgcagagtggaggcatctttaacatgattttcgaaaacccttctctgtgtgcttccaattccgaacctctcaagcttaagcaacggagcttatctgaatcagcagcaactaggttcgatgtaggccatgagtcgattaataaccccaacccaaatatgctgagcaaggaggaaattagcaaagtgatccatgatgatagcgtttttagtataggactggagtcccacgacgactttgccctagatgcctctatcctgaacgtggccatgatagtggggtacctgggttctatcgagctcccgagcacgagctcaaatttggagagcgattccctacaggccattcggggctgcatgaggaggcttagagccgagcaaaaaattcactctttggtaaccatgaagattatgcacgactgtgtccagctatcaaccgacaaggctggcgtcgtggcagagtaccccgcagagaaactcgctttctcggcggtgtgccccgacgatcgccgtttttttgggctggtaactatgcaaaccaacgacgacgggtccctagctcaggaagaagaaggcgctctgcgtaccagttgccatgtcttcatggttgaccctgacctgtttaaccataagattcatcaaggcatcgcccggcgcttcgggttcgaatgcaccgcagatcccgacacgaatggctgcctagagtttccagcgtccagcctgccagtactgcagtttataagcgttctgtatagagatatgggagaattgattgagggaatgagagcgcgggcgttcctggacggagacgccgacgcgcaccagaacaacagcacaagctccaactccgactcaggaatagggaacttccaccaagaggagaaatccaatcgcgtgttggtcgtggacctgggtgggtcctcctcccgccacggtccgggagggagcgcgtgggacggtgtgggcggacgcggagcgcaaccgtggggcgccccctggactgggcctttttgtccggatcctgaaggatccccaccattcgaggccgctcaccagacagatcggttctgggacctcaacaagcatctgggccccgccagccccgtggaggtccccccagctagtttgcgatcgtcggtgccgccgtccaaacgtggaaccgtgggagccggctgcggctttaaccaaaggtggttgcctgtacacgttctgcgggagtggcagtgtggtcacaccagtgaccaggattcttatacagatagcacagatggctggtcctccatcaattgcgggacactgcctcctcccatgtctaagattcccgcagataggtatagagtggaaggttccttcgctcagccccctttgaacgccccaaagcgagagtggtcacgtaaagcatttgggatgcagtcaatcttcggcccacatcggaatgtgagaaagacgaaggaggataagaagggatcaaagttcggtcggggaacggggttgacacaaccctcccagcgtaccagcgcccgacgctccttcggaaggagcaaacgttttagtatcacccgcagcctcgacgacctggaatcgtag

SEQ ID NO: 287458 - DNA, 1668 bp, Artificial Sequence
  derived and/or modified sequence
atgaagaagcacgattttgcagaaaacctcccctctagcctcctgatcatcatcctcgttatctttaccctgtctgggagcaaattcggccgaggaacgggcctgacccagccctctcagcgtacttcggccaggagatcgttcgggagaagtaagagatttagcattactaggagcctcgacgacctcgagtccgcaacggtgagcgatggcgaactcaccggtgccgacctgaaggactgtgtgtctaacaatagcctgtctagcaacgcttctctgccgagcgttcagtcttgtcgcaggcttcgcgagaggagagtggctagctgggcggtgagcttcgagaggttgctgcaagaccctgttggtgtgcgttactttagcgatttccttagaaaggagttttcagaggagaacattctcttctggcaggcatgcgagtactttaaccacgtgcctgctcacgacaagaaggaactaagttacagggcccgagagatattcagcaaatttctgtgctccaaggccacaacccccgtcaacattgattcccaggctcagctggcagatgatgtactgagagctccacatccggatatgtttaaggaacaacagcttcaaatttttaacctgatgaagttcgatagctacactcggttcctaaagtcgccattataccaagaatgcatcctggccgaggtagagggacgagccctgcccgattctcagcaggtcccttccagccctgcatcaaagcactccttgggaagcgatcattctagcgtgagcacacccaagaagctgtctggcaagtccaagtctggtaggtctctgaacgaggagctcggagacgaagattctgaaaagaagcgcaaaggcgcattcttctcctggagtaggacccggagcactggcagatcccagaaaaagcgggagcacggtgaccacgcggatgatgctctacacgctaacgggggactttgtaggagagaaagccagggctcagtttcctctgccggatcactcgacctgtccgaggcctgtagaaccctcgctcccgagaaggataaggcaaccaaacactgctgtattcatttacccgacgggacctcatgtgtggttgcggtgaaggcgggattctctataaaggatatactgagcggcctgtgtgaaagacacgggattaacggcgctgccgctgacctttttctggttggtggagacaaacctctggtcctgcatcaggactccagcattctggagtctcgtgatcttcgacttgaaaagagaacactgtttcgcctggatcttgtgccgatcaacagaagtgtcgggctgaaagccaagcccacaaaacccgttaccgaggtactgcgccctgtcgtggccaggtacggcctggacctgagtgggctcttagtgcgcctgtccggagaaaaagagcctctagacctgggcgctcctattagcagccttgatggacaaagggtagttctcgaggaaaaggatcccagtcggggaaaagctagtgcagataaacagaagggtgtacctgtcaagcaaaacaccgctgtgaactccagtagccgtaaccattctgcaacaagtttcctgtctctgttcccaaagctcagggctaccgaacaaatgaccaatgtgggctgctag

SEQ ID NO: 287459 - DNA, 1500 bp, Artificial Sequence
  derived and/or modified sequence
atgtcactctctctatttttccaatctgcaaccgtatccgatggcgaacttactggagccgatctcaaggactgcgtgtctaataatagcctgtcctcaaacgcaagcctcccttccgtgcagtcgtgccgcagacttcgggaacgtcgggtggcttcttgggccgtgagctttgagcggctgctgcaggatcctgtgggcgtgcggtatttctctgatttccttcgcaaggagttctcagaagaaaacatcctgttctggcaagcctgtgaatattttaatcacgtgccggctcatgataagaaagagttgagctatcgagccagggaaatattcagtaaatttctgtgtagcaaagccaccacgcccgtgaatatcgacagccaggctcagctggcagatgacgtgttgcgcgcaccccatcccgacatgttcaaagagcagcagctccagatcttcaatctcatgaaattcgactcgtacacccggttcttgaagagtccactttaccaagagtgcatcctggccgaagtcgaaggcagagccctgcccgattctcaacaagtcccaagttcgcccgctagtaaacactcattggggtccgatcattctagcgtcagcacccccaagaaactgagcggaaagagtaaaagcggtagaagccttaacgaggagctaggcgacgaagattcagagaagaagagaaagggagcttttttctcctggtccagaacgcgatcaacagggaggtctcagaagaagcgggaacacggggaccacgcagacgatgctctgcacgctaatggcggactatgcaggagggaaagtcagggttcagtgtcttcagccggtagtcttgatttatcagaagcttgtcgcaccctggctccagaaaaagacaaggctacaaagcattgttgtatccatcttcccgacggtacatcatgtgtggtggctgtcaaggcaggattctctataaaggacatcctcagtggtttatgtgaaagacacggtatcaacggagctgcagccgacctgttcctagtgggcggtgataagcctttagtgctccaccaggactccagcattctggaaagcagagacctgagactcgagaaacgtacactgttcagattagatcttgtccccattaatcggagcgtaggcctgaaggccaaacccacgaaacctgttacggaagttctgcggcctgtcgtggctcgatacgggcttgatctatctggtctgttggtgagactctcaggtgagaaagagcccctagatctgggcgctccaatctcttcattagatgggcagcgcgtggtcttggaggagaaggatccttctcgaggcaaggcgtctgccgacaagcagaaaggcgttcccgtgaagcagaacaccgcagttaactcatcatcccggaaccattctgccactagcttcctcagcctattccccaaactaagggccactgaacagatgacaaatgtgggttgttag

SEQ ID NO: 287460 - DNA, 2004 bp, Artificial Sequence
  derived and/or modified sequence
atgttcagggccggtgaagccagcaaacgaccgctcccaggtccatcacccccaagagtgcggtctgtggaggtcgcaaggggcagggccggatacggcttcacattatcaggccaggccccttgtgtgttgtcttgtgttatgaggggaagtccagccgattttgtcgggctgagggcaggggaccagattctggcggtgaatgagatcaatgttaagaaggcctcacacgaggatgtagtgaaactcatcggaaaatgttcgggcgttctacatatggtgatcgccgagggggtgggcagatttgagtcttgctcctcggatgaagaggggggtctttatgagggaaagggctggttgaaacctaaattggacagtaaggccctcggcattaaccgtgctgagagagtggtggaggaaatgcagtcgggaggtatattcaatatgatatttgaaaaccccagcctctgtgcttcgaactcagagcccctgaaattgaaacagaggtctctcagcgagagcgccgctactaggtttgatgtcgggcatgagtcaatcaacaatcccaatcctaacatgctgtccaaagaggagataagcaaagtgatccatgacgacagcgtgttttctatcgggcttgaaagccatgatgactttgctcttgacgcctctatactcaacgttgctatgatcgtagggtatctgggctccattgagctgccctccacttcttcgaatctggaaagcgacagtctgcaagctatccggggttgtatgagaagactccgtgcagaacagaaaatccattccctggtgacaatgaagatcatgcatgactgtgtacagctttccaccgacaaagctggggtggttgcggaatatcctgccgagaaacttgcattctccgcagtgtgtcctgatgaccggcgattcttcggtctcgttacaatgcagacaaacgatgacggtagcctagcccaggaagaggaaggcgctctgcgaacaagctgccacgtgttcatggttgatccagatctcttcaaccataaaatccaccaaggaattgctcggaggttcgggtttgagtgcaccgctgacccagacacaaatggctgtctcgaattccccgcatcgtccctccctgtactccagttcatcagcgtgctttaccgggacatgggcgagctcatagagggaatgcgcgctcgggcatttctcgacggagacgccgatgcccaccagaacaactccacgtcgtctaactcagactcgggaatcggtaatttccaccaggaggaaaagtcgaacagagttctggttgtggacttagggggttctagcagtcgacatgggccagggggttccgcttgggacggagtaggaggtcggggagctcagccatggggcgcaccttggaccggcccattctgcccagaccccgagggatcgcctccattcgaggctgcacaccagacggatagattttgggatctgaataagcacctgggccctgcgagccccgtggaggtaccacctgcatcccttagatcatctgtgcctccctccaaaagaggcacggtcggggctggatgtggattcaatcagcgatggctacctgttcatgtgctcagggaatggcagtgcggacacacttccgaccaggactcctatacagatagcactgatggctggagctccatcaactgcggaacactgccaccgcctatgtccaagatccccgcagacaggtaccgggttgaagggagctttgcacaacccccactcaatgcgcctaaaagggagtggtcgaggaaagcctttggaatgcagagcatcttcgggcctcatcggaacgtgcggaagacaaaggaggataaaaaaggatctaagttcgggaggggaaccggcctaacgcaacctagccagaggactagcgctagaaggtctttcggcagatctaaaaggtttagcatcactcgctccttggatgatctcgaatcgtag

SEQ ID NO: 287461 - DNA, 1863 bp, Artificial Sequence
  derived and/or modified sequence
gccggagttggttgggtcttcagacaccagctgaatgcttagggattctttcatttcctaaagtgcttacaaaattatgaaaaagcacgactttgctgaaaacctgccttcatctttactaatcatcatactagtcatctttactctcagtggctcaaaatttgggcggggaactggactcactcagccttctcaacgcacgtctgctcggagatcatttgggagatccaagagattcagtatcactcgctcccttgatgatcttgagtctgcaactgtgtctgatggcgagttgacgggcgccgacctgaaggactgcgtcagcaacaacagcctgagcagcaatgccagcctccccagcgtgcagagctgccggcgcctgcgtgagaggagggtcgccagctgggccgtgtcctttgagcgcctgctgcaggaccccgtcggtgtccgctacttctctgattttctaaggaaagaattcagtgaagaaaacattttattctggcaggcctgtgaatattttaatcatgttcctgcacatgacaaaaaggagctttcctacagggcccgggagattttcagtaagtttctctgcagcaaagccaccaccccggtcaacatcgacagccaggcccagctagcagacgacgtcctccgcgcacctcacccagacatgttcaaggagcagcagctgcagatcttcaatctcatgaagtttgatagctacactcgctttctgaagtccccgctgtaccaggaatgcatcctggcggaagtggagggccgtgcactcccggactcgcagcaggtccccagcagcccggcttccaagcacagcctcggttcagaccactccagtgtgtccacgccaaaaaagttaagtggaaaatcaaaatccggccgatccctgaatgaagagctgggggatgaggacagcgagaagaagcggaaaggcgcgtttttctcgtggtcgcggaccaggagcaccgggaggtcccagaaaaagagggagcacggggaccacgcagacgacgccctgcatgccaatggaggcctgtgtcgccgagagtcgcagggctctgtgtcctctgcggggagcctggacctgtcggaggcctgcaggactttggcacccgagaaggacaaggccaccaagcactgctgcattcatctcccggatgggacatcctgcgtggtggctgtcaaggcgggcttctccatcaaagacatcctgtccggactctgtgagcggcatggcatcaacggggcggccgcggacctcttcctggtgggcggggacaagcctctggtgctgcaccaagacagtagcatcttggagtcaagggacctgcgcctagaaaagcgcaccttgtttcggctggatcttgttccgattaaccggtcagtgggactcaaggccaagcccaccaagcccgtcacggaggtgctgcggcccgtggtggccagatacggcctggacctcagtggcctgctggtgaggctgagtggagagaaggagcccctggaccttggcgcccctatatcgagtctggacggacagcgggttgtcttggaggagaaggatccttccagaggaaaggcatccgcagataaacagaaaggtgtgccagtgaaacagaacacagctgtaaattccagctccagaaaccactcggctacgagttttttgagcttatttccaaagctcagagcaacagagcagatgaccaacgtgggctgctaaggaaggaagacctggtgttgccagagttcctccgtttacctcctggttccacagaactcaccctccccactccagctgctgtggccaagggctttagcaagagaagcgccacaggcaac

SEQ ID NO: 287462 - DNA, 2193 bp, Artificial Sequence
  derived and/or modified sequence
gtgttcctcagatggacttttcgtttcctggagttttgtcatgaggcttaattaactcatgtctctctctcttttctttcagtctgcaactgtgtctgatggcgagttgacgggcgccgacctgaaggactgcgtcagcaacaacagcctgagcagcaatgccagcctccccagcgtgcagagctgccggcgcctgcgtgagaggagggtcgccagctgggccgtgtcctttgagcgcctgctgcaggaccccgtcggtgtccgctacttctctgattttctaaggaaagaattcagtgaagaaaacattttattctggcaggcctgtgaatattttaatcatgttcctgcacatgacaaaaaggagctttcctacagggcccgggagattttcagtaagtttctctgcagcaaagccaccaccccggtcaacatcgacagccaggcccagctagcagacgacgtcctccgcgcacctcacccagacatgttcaaggagcagcagctgcagatcttcaatctcatgaagtttgatagctacactcgctttctgaagtccccgctgtaccaggaatgcatcctggcggaagtggagggccgtgcactcccggactcgcagcaggtccccagcagcccggcttccaagcacagcctcggttcagaccactccagtgtgtccacgccaaaaaagttaagtggaaaatcaaaatccggccgatccctgaatgaagagctgggggatgaggacagcgagaagaagcggaaaggcgcgtttttctcgtggtcgcggaccaggagcaccgggaggtcccagaaaaagagggagcacggggaccacgcagacgacgccctgcatgccaatggaggcctgtgtcgccgagagtcgcagggctctgtgtcctctgcggggagcctggacctgtcggaggcctgcaggactttggcacccgagaaggacaaggccaccaagcactgctgcattcatctcccggatgggacatcctgcgtggtggctgtcaaggcgggcttctccatcaaagacatcctgtccggactctgtgagcggcatggcatcaacggggcggccgcggacctcttcctggtgggcggggacaagcctctggtgctgcaccaagacagtagcatcttggagtcaagggacctgcgcctagaaaagcgcaccttgtttcggctggatcttgttccgattaaccggtcagtgggactcaaggccaagcccaccaagcccgtcacggaggtgctgcggcccgtggtggccagatacggcctggacctcagtggcctgctggtgaggctgagtggagagaaggagcccctggaccttggcgcccctatatcgagtctggacggacagcgggttgtcttggaggagaaggatccttccagaggaaaggcatccgcagataaacagaaaggtgtgccagtgaaacagaacacagctgtaaattccagctccagaaaccactcggctacgagttttttgagcttatttccaaagctcagagcaacagagcagatgaccaacgtgggctgctaaggaaggaagacctggtgttgccagagttcctccgtttacctcctggttccacagaactcaccctccccactccagctgctgtggccaagggctttagcaagagaagcgccacaggcaacggccgggagagcgcctcccagcctggcgagcagtgggagccagtccaggagagcagcgacagcccgtccaccagcccgggctcagcctccagcccccctggacctcctgggacgaccccccccgggcagaagtctcccagcgggcccttctgcactccccagtcccccgtctccctcgcgcaggagggcaccgcccagatctggaagaggcagtctcaggaagtggaggccgggggcatccagacggtggaggatgagcacgtggccgagctgaccctgatgggggagggggacatcagcagccccaacagcaccttgctgccgccgccctccaccccccaggaagtgccaggaccttccagaccaggtacctccaggttctgatccctccaccttggccccgtaagcgtggtctgctcagcttccagtcagaaaggacagtgggcccccggctgccactgtttgctggtggtctccgtgaccccctcctcacctgctggttgggggcttccttgg

SEQ ID NO: 287463 - DNA, 2804 bp, Artificial Sequence
  derived and/or modified sequence
aggtgtcctctgaggagagctgagcaggagaggagctgggactcgggaatggcagggcactgtttgaagaagcaaacatggtagcatcaagcattccttgaaatatggctccaagggaacaatgagacgtgctcttggtcttggaagctcatcagaatgtttagagctggggaggcctccaaacgcccattgcctgggccgtcgcccccaagggtgcggagtgtggaggttgcccgggggagggccggctacggattcacgctttcgggacaggcaccctgtgtgctcagctgcgtcatgagagggagccctgcggatttcgtgggcctccgagctggagaccagatacttgctgtcaatgaaatcaacgtgaaaaaagcatctcatgaagatgtagtgaaattaattgggaagtgctctggtgtccttcacatggtgattgctgaaggcgtcggccgcttcgaatcctgttccagtgatgaagaagggggactctatgaaggaaaaggctggctgaagcccaagctggattctaaagcactaggtataaacagagcagagcgagtcgtggaggaaatgcagtctggtggaattttcaatatgatttttgaaaacccgagcctttgtgcgagcaattcagagcccttgaaattgaaacaaagatccctttcagagtcggccgcaactcgatttgatgttggacatgaaagtataaataatccaaatcccaacatgctttctaaggaggaaatatcaaaagttattcatgatgattcggttttcagcattggactagaaagtcatgacgattttgcattggatgcaagtattttaaacgtggcgatgatcgtgggctacttaggctccattgagcttccttccacgagctccaacctggagtccgacagcttgcaagccatccgcggctgcatgcggcgcctgcgggcagagcagaaaatccactcgctggtgaccatgaagatcatgcacgactgtgtgcagctgagcactgacaaggctggagtcgtggccgagtacccggccgagaagctggccttcagcgccgtgtgcccggacgaccggcgatttttcgggttggttaccatgcagacgaatgacgacgggagcctggcccaggaggaggagggcgccctgcggacttcctgccacgtgttcatggtggacccagacttgtttaatcacaagatccaccaaggcattgctcggcggtttgggtttgagtgcacggccgacccagacaccaatggctgtctggaattcccggcgtcctccctccccgtcctgcagttcatctctgtcctgtaccgagacatgggtgagctgattgagggcatgcgggcccgcgcctttctggacggggacgccgatgcccaccagaacaacagcaccagcagcaacagtgacagcggcattgggaacttccaccaggaggagaagagcaaccgggtccttgtggtggacctgggtgggagctcgagcagacacggccccggaggcagcgcgtgggacggtgtgggtgggaggggtgcccagccctggggtgctccctggactgggcccttctgtccggaccccgaagggagccccccatttgaggccgctcatcagactgacaggttctgggacctaaacaagcacctagggccagcctctcctgtggaggtgcccccagcttccttgaggagctcagtccccccttccaagaggggcaccgtgggtgctggctgtggtttcaaccagcgctggctcccggtccacgtgctccgggagtggcagtgcggacacaccagcgaccaggactcttacacagattccaccgatggctggtccagcatcaactgcggcacactgccccctcctatgagcaagatccccgcagaccgctacagggtggagggcagcttcgcgcagcccccgctgaatgccccgaagagggagtggtccaggaaggcctttggaatgcaaagcatttttggtccccatcgaaatgttcgaaagactaaggaagataaaaagggctcaaaatttgggcggggaactggactcactcagccttctcaacgcacgtctgctcggagatcatttgggagatccaagagattcagtatcactcgctcccttgatgatcttgagagttgacgggcgccgacctgaaggactgcgtcagcaacaacagcctgagcagcaatgccagcctccccagcgtgcagagctgccggcgcctgcgtgagaggagggtcgccagctgggccgtgtcctttgagcgcctgctgcaggaccccgtcggtgtccgctacttctctgattttctaaggaaagaattcagtgaagaaaacattttattctggcaggcctgtgaatattttaatcatgttcctgcacatgacaaaaaggagctttcctacagggcccgggagattttcagtaagtttctctgcagcaaagccaccaccccggtcaacatcgacagccaggcccagctagcagacgacgtcctccgcgcacctcacccagacatgttcaaggagcagcagctgcagatcttcaatctcatgaagtttgatagctacactcgctttctgaagtccccgctgtaccaggaatgcatcctggcggaagtggagggccgtgcactcccggactcgcagcaggtccccagcagcccggcttccaagcacagcctcggttcagaccactccagtgtgtccacgccaaaaaagttaagtggaaaatcaaaatccggccgatccctgaatgaagagctgggggatgaggacagcgag

SEQ ID NO: 287464 - protein, 814 aa, Artificial Sequence
  derived and/or modified sequence
MEELIVELRLFLELLDHEYLTSTVREKKAVITNILLRIQSSKGFDVKDHAQKQETANSLPAPPQMPLPEIPQPWLPPDSGPPPLPTSSLPEGYYEEAVPLSPGKAPEYITSNYDSDAMSSSYESYDEEEEDGKGKKTRHQWPSEEASMDLVKDAKICAFLLRKKRFGQWTKLLCVIKDTKLLCYKSSKDQQPQMELPLQGCNITYIPKDSKKKKHELKITQQGTDPLVLAVQSKEQAEQWLKVIKEAYSGCSGPVDSECPPPPSSPVHKAELEKKLSSERPSSDGEGVVENGITTCNGKEQVKRKKSSKSEAKGTVSKVTGKKITKIISLGKKKPSTDEQTSSAEEDVPTCGYLNVLSNSRWRERWCRVKDNKLIFHKDRTDLKTHIVSIPLRGCEVIPGLDSKHPLTFRLLRNGQEVAVLEASSSEDMGRWIGILLAETGSSTDPEALHYDYIDVEMSASVIQTAKQTFCFMNRRVISANPYLGGTSNGYAHPSGTALHYDDVPCINGSWEPEDGFPASCSRGLGEEVLYDNAGLYDNLPPPHIFARYSPADRKASRLSADKLSSNHYKYPASAQSVTNTSSVGRASLGLNSQLKGKKPPVASNGVTGKGKTLSSQPKKADPAAVVKRTGSNAAQYKYGKNRVEADAKRLQTKEEELLKRKEALRNRLAQLRKERKDLRAAIEVNAGRKPQAILEEKLKQLEEECRQKEAERVSLELELTEVKESLKKALAGGVTLGLAIEPKSGTSSPQSPVFRHRTLENSPISSCDTSDTEGPVPVNSAAVLKKSQAAPGSSPCRGHVLRKAKEWELKNGT

SEQ ID NO: 287465 - protein, 730 aa, Artificial Sequence
  derived and/or modified sequence
MEELIVELRLFLELLDHEYLTSTVREKKAVITNILLRIQSSKGFDVKDHAQKQETANSLPAPPQMPLPEIPQPWLPPDSGPPPLPTSSLPEGYYEEAVPLSPGKAPEYITSNYDSDAMSSSYESYDEEEEDGKGKKTRHQWPSEEASMDLVKDAKICAFLLRKKRFGQWTKLLCVIKDTKLLCYKSSKDQQPQMELPLQGCNITYIPKDSKKKKHELKITQQGTDPLVLAVQSKEQAEQWLKVIKEAYSGCSGPVDSECPPPPSSPVHKAELEKKLSSERPSSDGEGVVENGITTCNGKEQVKRKKSSKSEAKGTVSKVTGKKITKIISLGKKKPSTDEQTSSAEEDVPTCGYLNVLSNSRWRERWCRVKDNKLIFHKDRTDLKTHIVSIPLRGCEVIPGLDSKHPLTFRLLRNGQEVAVLEASSSEDMGRWIGILLAETGSSTDPEALHYDYIDVEMSASVIQTAKQTFCFMNRRVISANPYLGGTSNGYAHPSGTALHYDDVPCINGSLKGKKPPVASNGVTGKGKTLSSQPKKADPAAVVKRTGSNAAQYKYGKNRVEADAKRLQTKEEELLKRKEALRNRLAQLRKERKDLRAAIEVNAGRKPQAILEEKLKQLEEECRQKEAERVSLELELTEVKESLKKALAGGVTLGLAIEPKSGTSSPQSPVFRHRTLENSPISSCDTSDTEGPVPVNSAAVLKKSQAAPGSSPCRGHVLRKAKEWELKNGT

SEQ ID NO: 287466 - DNA, 2193 bp, Artificial Sequence
  derived and/or modified sequence
atggaagagctgatagtggagttgagactttttctggagctgctcgaccatgagtatctcaccagcaccgtgagagagaagaaagcggttataacgaacatactcctccgcatccagtcctctaagggcttcgatgtgaaagatcatgcacaaaagcaagaaaccgccaattcactccctgcacccccacagatgcctctgccagagatcccccagccatggttaccaccagacagtggacccccgcctctgcctacctcttctctgccagaagggtactacgaagaggccgtgccactctctcccgggaaagctcctgagtacatcacctctaactatgatagcgacgccatgagcagctcgtatgaaagctatgacgaagaggaggaggacgggaagggtaagaagacaagacatcagtggccatcagaggaagccagcatggacctggtcaaggatgccaagatttgtgcttttctcctccgcaaaaaacgatttggccagtggactaaactcctatgtgtgatcaaggacacgaaactgctttgctataagtcctccaaggatcagcagcctcagatggagctcccactacaaggatgcaacattacctacatccccaaagacagcaaaaaaaaaaaacatgaattaaagatcacacaacaagggacagatcctctggtgttggcggttcagagtaaggagcaagccgagcagtggctgaaggtcatcaaggaggcttatagtggatgtagcggaccggtggatagtgagtgcccccctcctcctagcagccccgtacacaaagcggagcttgagaaaaagctctcgagcgagcgcccaagtagtgatggcgagggagtggtggagaatggaattaccacatgtaacgggaaggagcaagtaaaacggaaaaaatcgagcaaatctgaggctaaaggcaccgtatcaaaggtgaccggtaagaaaatcacaaagatcatttcgctgggcaaaaaaaagcctagcacagacgaacagaccagcagcgccgaggaggatgtccctacctgcgggtacctgaatgtgctatccaattctaggtggagggaaaggtggtgcagggtgaaggataataagttgatttttcacaaggatcggactgaccttaaaactcacatcgtttccattccattgcgcggttgtgaagtgatcccaggactggattctaaacacccactgacctttcgactgttgaggaacggtcaggaggtggctgttttagaagcaagctcctccgaggacatgggacgatggattggcatcctgctcgccgaaaccggctcttcgactgacccagaggctctgcactatgactacattgatgtggagatgtctgcctctgtcattcagactgctaaacagacattttgcttcatgaaccgccgcgttatctcagcgaacccttacctcggtggcacaagtaacgggtacgcccatccaagtggcaccgcgcttcactatgacgacgtgccctgtattaacggtagtctaaagggaaagaaaccaccagtagctagcaacggagttaccggcaaaggcaagaccctgtcttctcagcccaagaaagctgatccggccgcagttgtaaagaggaccgggagcaatgctgcacagtataaatacggcaaaaaccgggtggaggcagacgctaagagactgcaaacaaaagaagaggagctccttaagcggaaggaagccctgcggaacagactcgctcagctgaggaaggagcggaaggacctgagggcagctatagaggtgaatgcaggccgcaagccgcaggccatactggaggagaagctcaagcagcttgaagaagagtgtagacagaaggaggctgaaagagtgtctttggagctggagctgactgaagtcaaggaatctctaaaaaaagcactcgctggaggggtgaccctgggactggctatagagcccaagagtggaacttccagtcctcaaagccctgtattccggcataggaccctcgagaactctcctatctctagctgcgatacatcagatactgaaggcccagtgcctgtgaatagcgccgcagtcctgaagaaaagccaagctgcccctgggtctagcccatgcagaggccacgttcttagaaaggctaaggagtgggagctgaagaacgggacatag

SEQ ID NO: 287467 - DNA, 2193 bp, Artificial Sequence
  derived and/or modified sequence
atggaagagttgattgttgagctgcgcctgttcttagagctgctcgatcacgaatatcttacaagcaccgtgcgagagaaaaaggctgttatcactaacattctcctaagaattcagtcgtccaaagggtttgacgtgaaggaccacgcccaaaagcaagagaccgctaactccctccctgccccaccccaaatgcctctgccagagatacctcaaccctggctgcccccggatagcggcccacccccgctgccgactagctcactgccagagggctattacgaagaagctgtccctctgtctcccggcaaagcccctgagtacatcacgtccaactatgatagtgacgccatgtctagctcgtacgagagttacgacgaggaggaggaggatggcaaaggcaaaaagacccgacaccagtggccttccgaggaggcgtcaatggatctcgtgaaagacgccaaaatctgtgcttttctccttcggaagaagaggttcggtcaatggacgaagctgctatgtgtgatcaaggataccaaacttttatgttataagtcttctaaggaccaacagcctcagatggaactgccattgcaaggctgtaacattacttatattccaaaagactccaagaagaagaaacacgaactcaaaataacacaacagggcactgaccccctggtgctggcagttcagtccaaggagcaggctgagcagtggctaaaggttattaaggaagcctattctggttgtagcggccccgtcgatagcgaatgccctccccctccttcatccccagtacataaggctgagctcgaaaagaagctgagcagcgaaaggccaagctccgatggtgagggcgtagttgagaacggcataaccacgtgcaacggcaaggaacaggtgaaacgaaaaaagtcaagtaagagtgaagccaaagggacagtctccaaggtgaccggaaagaagatcaccaagatcattagcctcggaaagaagaaacctagtactgacgaacagacctctagtgccgaagaagatgttcccacctgtgggtacttaaacgtgctgtccaatagcaggtggcgggagaggtggtgcagagtcaaagataacaagttaatatttcacaaggaccggactgacctaaaaacacacatagtgtctatccccctgcggggatgcgaggtgatccccggcctggacagcaagcaccccctgacctttagactgcttcggaatggacaagaagtggcagtgttggaggcgtcaagctccgaggacatgggtcgctggatcggcattctgctggccgagacgggcagtagcactgatcctgaagctctgcactatgattacatcgacgtagaaatgtctgctagcgtcatccagacagccaaacagacattttgttttatgaacagaagggttatctcagcaaacccctatctgggaggaacaagtaatgggtacgctcaccctagtggtactgcactgcattatgacgacgtcccgtgtattaatggttccttgaaggggaaaaaaccacccgtggcctccaatggcgtgaccggtaaaggaaagacactatctagtcagcctaaaaaggcggaccccgcagctgtggttaagcgaaccggctccaatgctgctcaatacaaatatggtaaaaatcgcgttgaagcggacgctaagcgactccaaaccaaggaagaggagctgcttaagagaaaggaggccctgcggaataggttggcgcagctgagaaaggagagaaaagacctcagagccgccatcgaagtgaacgccggcaggaagccacaagctatcctggaggagaaactaaaacagttagaagaggaatgcaggcagaaagaggccgagcgagtcagcctagagctagaactaacagaagtcaaagagtccctgaagaaggccctcgcaggcggagtcaccttgggtctagctatcgaacctaaaagcggcactagctctccacagtctcctgtgtttcggcacaggacactcgaaaacagccctatttcgagttgtgatactagtgacacagaaggcccagtcccagtaaattccgcagcggttctcaaaaaatcccaggctgctcctggcagcagcccatgtaggggacacgtgctccggaaagccaaggagtgggaactcaagaacggcacatag

SEQ ID NO: 287468 - DNA, 2193 bp, Artificial Sequence
  derived and/or modified sequence
atggaggagctgattgtggagctgcggctcttcctggagctgctggaccacgagtacctgaccagcacagtgcgggagaagaaggctgtgatcaccaacatcctgctgcgcatccagagcagcaagggctttgatgtgaaggaccacgcccagaagcaggagacagccaacagcctgcctgccccaccccagatgcccctgcctgagatcccccagccctggctgcccccagattctggccccccacccctgcccaccagcagcctgcctgagggctactatgaggaggccgtgcccctgagccctgggaaggcccctgagtacatcaccagcaactatgacagtgatgccatgagcagcagctatgagagctatgatgaggaggaggaggatggcaagggcaagaagaccaggcaccagtggcccagcgaggaggcctccatggacctggtgaaggatgccaagatctgtgccttcctgctgaggaagaagcgcttcggccagtggaccaagctgctgtgtgtgatcaaggacaccaagctgctgtgctacaagagcagcaaggaccagcagccccagatggagctgcccctgcagggctgcaacatcacctacatccccaaggacagcaagaagaagaagcatgagctgaagatcacccagcagggcacagaccccctggtgctggccgtgcagagcaaggagcaggccgagcagtggctgaaggtgatcaaggaggcctacagcggctgcagcggccctgtggacagcgagtgccccccaccacccagcagccctgtgcacaaggccgagctggagaagaagctgagcagcgagcggcccagcagtgatggagaaggagtggtggagaatggcatcaccacctgcaatggcaaggagcaggtgaagaggaagaagagcagcaagtctgaggccaagggcaccgtgtccaaggtgacaggcaagaagatcaccaagatcatcagcctgggcaagaagaagcccagcacagatgagcagaccagcagcgctgaggaggatgtgcccacctgtggctacctgaatgtgctgagcaacagccgctggagggagcgctggtgccgggtgaaggacaacaagctgatcttccacaaggacagaacagacctgaagacccacatcgtgtccatccccctgcggggctgtgaggtgattcctggcctggacagcaagcaccccctgaccttccggctgctgagaaatggccaggaggtggccgtgctggaggccagcagcagcgaggacatgggccgctggattggcatcctgctggccgagaccggcagcagcacagatcctgaggccctgcactatgactacattgatgtggagatgtctgccagcgtcatccagacagccaagcagaccttctgcttcatgaacagaagagtcatcagcgccaacccctacctgggcggcaccagcaatggctacgcccaccccagcggcacagccctgcactatgatgatgtgccctgcatcaatggcagcctgaagggcaagaagccccctgtggccagcaatggagtgacaggcaagggcaagaccctgagcagccagcccaagaaggctgaccctgctgctgtggtgaagaggacaggcagcaatgctgcccagtacaagtatggcaagaacagagtggaggctgatgccaagaggctgcagaccaaggaggaggagctgctgaagaggaaggaggccctgaggaaccggctggcccagctgaggaaggagaggaaggacctgcgggccgccatcgaggtgaatgccggcaggaagccccaggccatcctggaggagaagctgaagcagctggaggaggagtgccggcagaaggaggccgagcgggtgtccctggagctggagctgacagaggtgaaggagagcctgaagaaggccctggccggcggcgtgaccctgggcctggccatcgagcccaagagcggcaccagcagcccccagagccctgtgttccgccacaggaccctggagaacagccccatcagcagctgtgacaccagtgacacagagggccctgtgcctgtgaacagcgctgctgtgctgaagaagagccaggccgcccctggcagcagcccctgccggggccacgtgctgaggaaggccaaggagtgggagctgaagaatggcacctag

SEQ ID NO: 287469 - DNA, 2193 bp, Artificial Sequence
  derived and/or modified sequence
atggaggagctgatcgtggagctgcggctgttcctggagctgctggaccatgagtatctaaccagtactgtgagagaaaaaaaggccgtaattaccaatatcctcttacgaatccaaagcagcaagggattcgacgtcaaagaccacgcacagaaacaggaaactgcaaactctctgccagcgcctccccaaatgcctctacctgagattccacagccatggctgccacccgattccggccctcccccattgccgacatcctcgctgcccgaaggctattacgaggaggcagtgccgctctcacctgggaaagctccagagtatattacctcaaactacgatagcgatgcgatgtccagcagctacgagtcctacgacgaagaagaggaagacgggaaaggaaaaaaaacccggcaccagtggccaagcgaagaggccagtatggatctcgtgaaagatgcaaagatttgcgccttcctcctacggaaaaagcggttcggccagtggaccaaactgctgtgcgtcatcaaagacaccaagctgctttgctacaaatctagtaaagatcagcagccacaaatggagctgccactccaaggatgtaatataacttacatccctaaagactctaaaaaaaaaaagcatgaactcaagataacccagcagggcactgatcccctcgtcctggcagtgcagtcaaaagagcaagctgagcagtggctgaaggtaattaaggaggcctattcaggatgcagtggacccgttgattctgagtgccccccacccccatcatctccagtgcacaaggccgagcttgaaaagaagctgtcctcagaaaggccatcaagcgatggggagggtgtagttgaaaacggaatcacgacttgtaacggcaaggaacaggtaaagcgaaagaaatcatcaaaatccgaagctaagggaacagtttctaaagtgacgggaaaaaagattacgaagataatttccctcggcaaaaagaagccatccacagatgaacagactagctcagccgaggaggatgttcctacctgtgggtatttaaacgtgctgagtaattcacggtggcgagagcggtggtgtcgagtaaaagataacaagctcatattccacaaagaccgaactgatctgaagacacacatcgtctccattccactgagaggctgcgaagtcatcccgggactagatagcaagcatccgcttacttttaggctcctccgtaatggccaagaggttgccgttcttgaagcatccagctctgaggatatgggtagatggattggcattttgctggcggaaacgggatcttcgactgatcccgaggcattgcattacgactatatagacgtagaaatgtctgctagcgttattcaaacagccaagcagactttttgcttcatgaaccggagagtgatctccgcaaatccttacctgggggggacaagcaacggctacgcacatccaagtggcacagcactacattacgatgatgtgccttgtattaatggctctctgaagggcaagaagcctcccgtcgcaagcaacggtgtcacggggaagggaaaaacattgtctagccagccgaagaaagcagaccccgcagccgttgttaagcggactggctcaaacgccgcccagtataagtatggaaaaaatagagtcgaggcggacgccaagcggctccagaccaaagaagaggaacttctgaagaggaaggaagcactgcgaaatcgtctggcccagctcaggaaggaaagaaaggatcttcgcgccgctattgaggttaacgccggaagaaaaccccaagctatcctcgaggagaagctgaagcagctggaagaggaatgtcgccagaaggaggccgaaagggtctctctggagcttgagcttacagaggtcaaggaatccctcaaaaaggccttagccggcggtgtgacgctgggcctggcaattgagcctaagtccgggacttcttcgccccagagccctgtgtttcgtcaccggaccctcgaaaacagtcccatcagttcgtgcgatacaagtgataccgaaggacctgtgcccgtaaacagcgcggccgtgttgaaaaaaagccaagccgcacccggatcatctccctgtcgcgggcacgtccttcgaaaagcgaaagagtgggaactaaagaatggaacgtag

SEQ ID NO: 287470 - DNA, 2193 bp, Artificial Sequence
  derived and/or modified sequence
atggaggagctgatcgtggagctgcggctgttcctggagctgctggaccatgagtatctgactagcactgttcgcgaaaaaaaagccgtgatcacaaatatcctgctcagaatccagtcaagtaagggttttgacgtcaaagatcatgcccagaagcaggaaaccgccaattctctgcctgcgcctcctcagatgcccctgcccgagatcccccagccatggttaccacccgattccggccctcctccactgccaacctcttcactgccagaaggctactacgaggaagccgtgcccctctcgcctggaaaagcccctgaatacataacaagcaattacgattcagacgccatgtccagctcatatgagtcctacgacgaggaagaggaagatgggaagggtaaaaagacccgtcatcagtggccttctgaggaagcaagcatggatctggtaaaagacgctaaaatctgtgcatttttactgcgcaagaaaagattcgggcagtggactaaactcttatgcgtgatcaaagacacaaagctgctttgctacaagagtagcaaggatcagcagccacagatggaattgcctcttcagggatgcaacatcacatacattcccaaggattctaagaaaaagaagcacgaattaaaaatcacacagcagggaacagaccctctggttcttgctgtgcagtctaaggagcaggcagagcagtggctgaaagtgattaaagaagcctattccgggtgttccggacctgtggactccgagtgtccaccccctccgtcatcacctgttcacaaagccgaacttgagaagaaactctctagcgagagaccatcctcagacggagagggagtggtagagaatgggatcacaacttgtaacgggaaggagcaggtcaaaagaaaaaagagttccaaatcagaagcaaaagggacagtgtctaaggtgactggcaagaagattactaagattatctctctggggaaaaagaaaccgagcacggatgaacagactagtagtgctgaggaagacgtcccaacctgcgggtacctgaatgtgctatctaattctcgctggagggagcgctggtgtagagtcaaggataataaactgatcttccataaggaccgcactgacctcaagacacatatagtctctattcccctccggggatgtgaggttatccccggtttagacagcaagcaccctctgaccttccgcctgctgcggaacggacaggaagtggccgtgctggaggcgagcagtagtgaagacatggggagatggattgggattcttctggccgagacaggttcaagcacagatcctgaagcgctccactacgattatatcgatgttgagatgagtgcaagcgtgattcagaccgcgaaacaaaccttttgcttcatgaacagacgagtaatcagcgctaacccttaccttggagggacctcaaacggctatgctcatccctcagggaccgccctgcattacgatgatgtcccatgcataaatggctcacttaaggggaaaaagccaccggttgcgtcaaacggtgtcacaggaaaaggcaaaaccctctcatcccagccgaaaaaagctgaccctgcagcagtggtcaaacgtactgggtcgaatgctgcacaatataagtacggcaagaaccgtgtcgaagctgacgcgaaacgtctgcagactaaggaggaggagttactcaagcggaaggaggccctgagaaacaggctggcccaactgcggaaggagcgtaaagatctgcgagctgctatagaggtaaatgcgggccggaagccccaggccatcctggaggaaaaactgaaacagctggaagaggagtgtaggcagaaggaggccgagagagtcagcctagaactggagcttacagaagtgaaagaatccctcaaaaaggccctagctggaggggtaacgctcggattggcaattgaacctaagtctggtacttctagtccccagtcccccgtatttcggcaccgaacgctggaaaacagccccatctcatcttgcgatacttctgatactgagggcccggtcccggtgaatagtgccgcagtgcttaagaaaagtcaagctgcacccggcagttctccctgtcggggacatgttctgcggaaggcaaaagagtgggagctgaagaatgggacctag

SEQ ID NO: 287471 - DNA, 2193 bp, Artificial Sequence
  derived and/or modified sequence
atggaagagttgatagttgaactcaggctttttctcgagctgctggaccatgaataccttaccagcactgtgagagaaaaaaaggctgttatcactaacatcctcctaagaatccaaagtagtaagggttttgatgtgaaagaccatgcgcaaaagcaggagactgcgaacagcctaccagcgcctccacagatgcctctgccagagatacctcagccttggctgcctccggacagtgggcctccacccctgccgacctcatcgcttccggaaggctactatgaagaggccgtgcctttgtccccaggcaaagcccctgagtacattaccagtaactacgactctgacgctatgtcaagctcatacgaaagttatgacgaggaggaggaggacggcaaggggaaaaaaactaggcaccaatggccttcagaggaagcttcaatggatctcgtgaaggatgccaagatctgtgccttcctgcttagaaagaaacggttcggacagtggaccaagttgttatgcgtcataaaggataccaaattgttatgttacaaatcttccaaagatcagcagccacaaatggaactgccattgcaggggtgtaatattacctacatccctaaggatagtaagaagaaaaagcacgaattaaaaattactcagcaggggactgaccccttagttctggcagtccagtccaaggaacaagctgaacagtggctaaaggtgatcaaagaagcctattctggctgtagcggccctgtggactcagagtgtcccccacctcctagctctcccgttcataaagcggaactcgaaaaaaagttaagcagtgagagaccttcttccgacggggagggggtggtggagaatgggattaccacttgtaacggcaaagagcaggtgaagagaaagaaatcctctaagtcggaggcgaagggaaccgtcagtaaggtgactggaaagaagattactaaaattatctccctcggcaagaaaaagccaagcacggatgagcagacctccagtgctgaggaggatgtccccacatgtggctatttgaacgtattaagcaattcacggtggcgagagaggtggtgtcgagttaaagataacaaactcatttttcataaagaccgcacagatcttaaaacacatatcgtcagcatcccgctgcgtggctgcgaagtgatcccgggactcgattctaagcatcctctgactttcagactgttgcgcaatggccaggaggttgcagtgttagaagcctccagtagcgaagatatgggtcgttggatcgggattttgttagcggaaaccgggagcagcacagatcctgaggctttacactatgactacattgacgtggagatgtctgcctccgttattcaaacggcgaagcagacattttgcttcatgaacaggcgagtaatctctgcgaacccctatctgggcggaactagtaacggttacgctcatccttctggcacagccctccattatgatgatgttccttgtatcaacggttcgctgaaaggaaagaagcccccagtcgcaagtaatggggtcaccgggaagggaaagacgctgagcagtcagcccaagaaggcagaccctgccgcagtggtgaagcgtaccggttccaacgcagctcagtacaaatatgggaagaatcgggtagaggccgatgcaaagcgactgcagacaaaggaagaagagcttctcaagcgaaaagaagcactccgcaatagactggcccagctacgaaaagagagaaaagacttacgtgcagcaatcgaggttaatgctgggcgtaagccccaagctattctcgaggaaaagcttaagcaacttgaggaagagtgtcggcagaaggaagctgaaagagtaagcttggaactggaattgacagaagtgaaggaatccctgaaaaaagccctggccggaggtgttactctaggacttgcaatcgaacctaagtctggtacaagttcgccccagagccctgtctttaggcatagaacgcttgagaattctccaatctccagctgtgacacatctgatacagagggtcccgtgccggtgaacagtgcagccgtgctgaaaaaatctcaggctgcacccggaagtagcccttgtagggggcatgttctgcgtaaggcaaaagagtgggagctaaagaacggtacctag

SEQ ID NO: 287472 - DNA, 2193 bp, Artificial Sequence
  derived and/or modified sequence
atggaggagctcattgtggagctacgcctgttccttgagctgctggatcacgaatatctgacctctacagtaagagaaaaaaaggctgtcattaccaatatcctcctgcggatccagtcctccaaagggtttgatgtaaaagaccacgcacagaagcaggaaaccgccaactcacttcccgctccgccacagatgccgctgcccgaaattcctcagccctggctgccacccgactctgggcctcccccactccctacttcctccttgccagaaggctactacgaagaagccgtaccactcagccctggcaaagccccagagtatatcacaagcaactatgacagcgatgctatgtccagcagctacgagtcttacgatgaggaggaggaagatggaaagggaaaaaagacacgacatcagtggccctccgaggaagcttctatggatctggtcaaggacgctaagatctgcgcatttctgctccgtaaaaaaagatttgggcaatggaccaaactgttatgcgtgattaaagacacaaagctgctttgttacaaaagtagcaaagatcagcaacctcaaatggaattgccccttcagggctgtaatatcacttatattccaaaggatagcaagaaaaaaaagcatgaactcaaaattacccagcagggaactgatccacttgtgttggccgtacagagcaaagagcaggcagaacagtggttaaaagtgatcaaggaggcttactccggctgtagtgggcctgtggattcggaatgtccaccccctccgagtagccccgttcataaggccgaacttgaaaagaaattgtcttcagagcgcccttcgagtgacggggaaggcgttgttgagaatggaattaccacatgtaatggcaaggagcaggtgaagcgaaagaagtcatcaaagtcggaagcaaaggggactgtgtccaaggtgactgggaaaaagatcacaaagatcatttcactggggaagaaaaaacctagcaccgacgagcagactagctctgccgaagaagacgtccctacatgtgggtacttaaacgtgctgtctaattccagatggcgcgagcggtggtgtcgggtcaaggacaacaaactcatctttcacaaggatagaaccgacttaaagacgcatattgtgtcaatccctctccgcggttgcgaagtcataccagggctggactctaagcaccccctcactttccgactactgagaaatggccaggaggtcgctgtcctagaggctagcagtagcgaagatatgggacggtggatcgggatcctcctggccgaaactgggtcatcaacagaccccgaggccctgcactacgactacattgacgtcgagatgtcagctagcgttatccagacggcaaagcagactttctgtttcatgaatagaagggtgatctccgccaacccgtacttggggggtacctccaacggatacgcccaccctagtggaactgccctgcactacgatgatgtaccatgcatcaatgggtccttaaagggtaaaaaaccaccagtggcctctaacggcgtcactggtaagggaaaaactctgtcatctcagccaaagaaggctgatcccgcagccgtggtgaagcggactggcagtaatgccgctcagtataagtacggaaaaaacagggttgaggccgacgctaaaaggcttcaaaccaaggaagaagagctgcttaagagaaaagaggcccttaggaatcgcctggcccagcttaggaaagaacggaaagacctgagagctgcaatagaagtaaacgccggacgtaagcctcaagccatacttgaggagaaactcaagcagctggaagaggaatgcagacaaaaggaggctgagcgggtaagcctggaattggagctgactgaagtcaaggagtcccttaagaaggcactggctggtggcgtgactctggggttggccatcgaacctaagtccggtacttctagccctcaaagccccgttttccgacatcgaaccctggagaattcgcctatttctagctgcgacaccagcgacacagagggcccagtgcccgtgaactcagcagcagtgttaaaaaagagccaagccgctccaggctcgtccccctgtaggggtcacgttctccggaaagcgaaggaatgggagctcaagaatggtacgtag

SEQ ID NO: 287473 - DNA, 7516 bp, Artificial Sequence
  derived and/or modified sequence
gggcgcccggctccgctgggggcgggacggcgggcggcgggcggggccgtgtgcgcctgcgtggtgtctgtcccggccgcagccccacgccggctgcagctccgcgagccgagccggatctcgagcggggtacacgggctgaggcggcggcggcggccccgccccggggctccattgttaaggcggctgcggctctgtcggctgttcagctgcgctccagtcggcccaggcgccgcggcgaggagcgagcgctgcgaggtggcggcctgagcaatggaagagttaatagttgaacttcgtctctttcttgaactcctggaccatgaatatctaacctcaactgtcagggagaaaaaggcagtgataaccaacattctgctaagaatacagtcatccaaaggttttgatgtgaaggaccatgctcagaagcaggagaccgctaacagcctgccagcccctcctcagatgcccctgccggagatccctcagccctggctgcctcctgacagtgggcctccaccattgccaacatcctccctcccagaaggttattatgaggaagctgtgccgctgagccccggaaaagctccggaatacatcacatcaaattatgattccgatgcgatgagcagctcttatgagtcgtatgatgaagaggaggaggatgggaaggggaagaaaacccggcaccagtggccctccgaggaggcctccatggacctggtcaaggacgccaaaatctgcgccttcctgctgcggaagaagcggttcggccagtggaccaagttgctctgcgtcatcaaagacaccaaactgctgtgctataaaagttccaaggaccagcagcctcagatggaactgccactccaaggctgtaacattacgtacatcccgaaagacagcaaaaagaagaagcacgagctgaagattactcagcagggcacggacccgcttgttctcgccgtccagagcaaggaacaggccgagcagtggctgaaggtgatcaaagaagcctacagtggttgtagtggccccgtggattcagagtgtcctcctccaccaagctccccggtgcacaaggcagaactggagaagaaactgtcttcagagagacccagctcagatggggagggtgttgtggaaaatggaattaccacatgtaatggaaaggagcaagtgaagaggaagaaaagttccaaatcagaggccaagggcactgtgtcgaaagtcactgggaaaaaaatcaccaagatcatcagtctgggaaagaaaaagccgtccacagacgagcagacctcctcagctgaggaagatgttcccacctgcggctatctgaacgtgctctccaacagccgctggcgagagcgctggtgccgagtgaaagataacaagctcattttccacaaggacaggaccgacctgaagacccatattgtgtctattccgctccgtggctgcgaggtgatcccgggtttggattctaaacatcctctgacgttccggctgctgcgcaacggccaggaggttgcagtattggaggcatcttcttctgaagacatgggcaggtggattgggattttactcgcagagacgggatcgtccacagacccggaggctctgcactatgactacattgatgtggagatgtctgcaagtgtcattcagacagccaaacagaccttctgtttcatgaacaggcgtgttatatctgctaacccatatctagggggcacctccaacggctatgcccaccccagcgggacggcacttcattatgacgatgtcccgtgcatcaacggctcgctcaagggtaaaaagccccccgtggcgtctaatggggtcacaggaaaagggaagactctgagcagtcagccaaagaaagcggatcccgcggctgttgtgaaaaggacgggttcgaatgctgcccagtacaagtatggcaagaaccgggtagaagcagatgccaagcggctacagaccaaagaggaggagctgctgaagaggaaagaggccctgcggaataggctggcccagctccgcaaggaaagaaaagaccttcgagcggctattgaagtgaacgccggcaggaagccgcaggcgatcctggaggagaagctgaagcagctggaggaggagtgccggcagaaggaggcggagcgtgtcagcctggagctggagctgacggaggtcaaggagagcctgaagaaagcgctggcgggcggagtcaccctggggctggccatcgagcccaagtcagggacatcgagtccacagtctccagtgttccggcaccggaccctggaaaactcgcccatctccagctgtgacaccagtgacaccgagggccccgtgccggtgaacagcgcggccgtcttgaagaagagccaggctgccccgggcagctccccctgccgagggcatgtgctgcggaaggccaaggaatgggaattgaagaacgggacctaggggacagcagcaccactccagcctcagagactgcacacccccttgcctgtatcctcatctgtgtgacggcaggaagctctgcccagagtggcctcagctgcacgactccagaggctccacgactgagctctgaggccagtgcctgtcccccaggcccacttgtattctttctactgtaaaatggcgcctttaaaaaagatgtaagactttggttcccaactttgttaaaaaacaaaaaaagtgatggaaaggtgtttgaaaggatgctatcaggcgaagtgacatctttctaaccagataggccattgctttcaccgattccaacccagccctggactgaggatggatggttccatgagcccccagatgaaaacctggattcgacagggaagagcttggatccccggctgccccgggcatgagtgtggctggccatgggcactgggctcgccttgcacgcccaccaggagggccaggggcatacgcagtcctgacgtggactttgtgtcttggcgtaccctctccacgtgcccgtccccctcgtcatcagaggtaaaggcatgagaaaatcgcgctgtgaaacgttttttaccttttattattattttttggacagatgcttttgtcaccaagacatgaaaagctgccattcttcttaacctgttttttaggaatgtctttttactgtgtgtcacacttagatcaaggagttttcagaggttccttattttattaattaattatttgtgctgcttttgacaggtagcagagggttttaatacttcactaacagtacaccctcctcccccttgggctagcatccccagcccttaatccacgtcggagccggcaggtgcttctcacaccaggagcctctgggggcaggggctggctcctcgccgctgtacaggacgtttactgctgcttggggccagggcagtcctttgaaagggaagcaagttccggaatttgttcgctcatggaactataacaccttagagcaagaggcaggaattccagggcctcctgcccctccccttcctccagcttgtcaagttaaaccactaatgtgttggtgggcctggccgtgctgcctctcctgagtagggtgggtgcaagtagggcctctttcccagctttcttgcttgccttctgtgcaatatttcttggagaatttggatgcctaaggcataaaggaaaaaaacagagttcatagtttgagctggtatttaccccctgggtttaaaaatcagattaacttcttggtctcccggaggctgctgtcaggaattctccagtacgggaagatgcagtcacttatgacgaaataagtcacccctgaacgcctccgcaggcagattcatggagaccagtcccagtagcaaccgccccttccccaagcatagaatacagaggtgccatacttggtgtaagccttccttctgtccactgtccagaatgtcctttttcacacagaggaagagatggcgggaaaacactgactgactccttgggtttcccccagacatactttcagagcgctagctgtgtggtgcacgggactttacagttaggattcatgtttaaggtggtggcgcttgaggcctgcaagggccacgttggattactgaagcggaaagcggtctcccatgtataagaaaaagttttacaacacgaattggaagctgcttgagtccacctgaacttgaattgattgcaaagccatctgctgggaacggttttgggttcctgagccatcagccagcctttctttcccctctgatgcacgttcctcccggcctagtccgtggaggcccatcacaccagcatccgtgacgccagcttcccactaggacatccaggcaggtcgggcggggacgccacacacctcagggccgtccgctgcattgccatagaggagccctccctccagtggtcacttcccaccattgcaggcagacttcccaccattgcaggcagctgggcccacttcatatcacacaaaatgaattttctataaagggaaaaaagtttgctcctccatagatttttgctgccttcgggtcaaatagtttccctggttgacactcttgggccactctgattggcagcctgctttgccaaagagaactgtgtgaggttttggtggttagtaagagaagggggagatggccagcctgaagtcacggtcctggcccagcacaggtgggcagcagcgagctggcaggtgaagtgtgagcagcacgcaaagtgtcacgtgggccttagccgtcacccaccagcttcctcaccaggcaaggaggccccggagccttagcagggacttgcccaacggcacagctgattggtgctcgactcccagcatgcatattttgttgtaaaaacccaggtttgtaattcacatccacaaccctaagccttttaaagcggaggcaaacgttaacaaaccccatcgtggtccatggagcctttcaaaatgggtgccctggaggggcctgacagtgggttccttccatggcggatactcccttgaaatttcacattccatcaaagtttaaagcatttacttcagaataagttatttatgtgtatatgttcaataaatatagtttttaatttatatctgtacatattagacacacgcgagccatcttgccagaattctgacagtgatgtcattttattcccctcccaaaacatgccccaggaacaagcaccccttgcctctgtggcagctgcgagtgtgtctgatttcataacgaagccaggctgagggcaagaggcccgacaggcaggccagggtccccggagaagccggatttcttcgcaatgtcactggtacttagcagatggtcgtgttcacaggggctagccacctgtactacggtgccgaccgcaatgcgaggaatgtggtggccacgcgatggagctggccggaggacaggtcaggtgagggggccgacccctgcggggctcagggctccttccattctaaccttgagccacagtgtcactcttcagggctctgctcctggctctattttgttaaggtgtcatcagccttcaacctccatttatatatttttataatgttaagccactgaccaactttttcatagaaacaactatcagattcgagggctccctttgtccccctgacctgggcacaggcatgggcgatggctccctcttcccagaatctgcggggaactggggcaaggcccatctgtctgcaaggctggtagctctctccctcggcttccagagtccacggcagttgcaaggtaaccagtgtggatctgctgagtcaccccaggcaccagacttaccccaggagcatgggccactgtccatggggccttccttgagaccttcccttggggctggcgggcggcggcttaccagctgggtcagtcccatctcgcccctctgtgcctatgccctggcgttgccaggcttaaccttcccctgtatcttactcatcccagaattattactggccatttctaaatagacaaaaactaccctaaaatgtggagatttactccttttgaaaagtctgtttcaaaaagtgtggcctcagctctggaggccacccccaggaaggagtttgaggttcattgtcattatggccacagtttggtgcttgtgcacgggactcaaagggcagcgtcgaagctggggttaggtgtagggttgtgagcaaagctcccctgtttgtggccacaccttccctttccaaaaaggctattaattctactcacccactatttggggggatgtaaattttgcccacagactttgccacccaggtgaggtgctgtgttcatgcacggaactgatgtcattagacaccatccaaggatgggcagcctgcagtgtggccggcgactgccatccagagaaaaggcaccttgtgccacagggcggggccgacaccctgagctcacaggtggcccctgcattcaggtggatgtccatccttgaaacagcctcttctgggaacacagcactggaggtctccaggcatcagggttggccggcagggtgccctgcagcttacataaaggtcgtggcaatgtttcaatgttaaactaaactattgccttcctcttacttttcctaaaatgattttctaatgggaacagtcacttcaagttcatgacatagtttgaaggaggataattcattttttcctggttgtcactgtcttcttatccccttggtgggctgggttcatactgtgaaataaactaaaatgaaaccaaaacgttcctgccgtaaatacgtggcacagcactgcagaaaaagcagtcacctctattcgtgagtccccaagccatagcagggcgtctgtaaaagaagggaaactgcacccaggaagtggtgggcgtcagacgcatcctttcgcccgtagttcatgaaatagttccggctttggtcttccagaaaatctcaacttcaccgtgcacaagtgttaccgggtctttttagtgtagccatggaagatactttcaaaaggacatcttcagatcataagtcttaggaccaaaggtgtttttaatgagataatctttttgattttctaacaagaaaggaaatattcactttacattttaacatcaacttttaagtgatattcagaattaattgaccatggtgatacgttgtaaaatgttttcatattaagaatgtaattatttccttattgtattttttaaaagctaaagtcatatttaaaattctctttgaaagaaacaggcaaagaaacagcaaagatttttttaaattaaatatgttagtagtgcccacttcaaatgactgtaaatatattttcactgtttctcaatgtatttaattcataaagtaaaaattttatgaaaagaaacttgcaaggaaaatcctagttttcagtccactcgccccactttgtagtagcttcactgaatttcctgctttcctggttgaattttctactgtttcacgtggtgtaaccctagactggcgcccttggcgtgcccctttgtgtatgaataaacttctctccccc

SEQ ID NO: 287474 - DNA, 7479 bp, Artificial Sequence
  derived and/or modified sequence
ctcccagttgaattttgctgccttaaagcagaagcaaaggagtagtgcatttgttaagaagaagacgcctgaatcttttagtggacctgctttcagcaaacttgttttttaggtcagaatactatatccaatgatcaagctaaacatgaaatgcttcgagtaagactcagtattcatactttgacatttgcaaatcactgggtctaataatactcttcctcttttgttgtcagcaatggaagagttaatagttgaacttcgtctctttcttgaactcctggaccatgaatatctaacctcaactgtcagggagaaaaaggcagtgataaccaacattctgctaagaatacagtcatccaaaggttttgatgtgaaggaccatgctcagaagcaggagaccgctaacagcctgccagcccctcctcagatgcccctgccggagatccctcagccctggctgcctcctgacagtgggcctccaccattgccaacatcctccctcccagaaggttattatgaggaagctgtgccgctgagccccggaaaagctccggaatacatcacatcaaattatgattccgatgcgatgagcagctcttatgagtcgtatgatgaagaggaggaggatgggaaggggaagaaaacccggcaccagtggccctccgaggaggcctccatggacctggtcaaggacgccaaaatctgcgccttcctgctgcggaagaagcggttcggccagtggaccaagttgctctgcgtcatcaaagacaccaaactgctgtgctataaaagttccaaggaccagcagcctcagatggaactgccactccaaggctgtaacattacgtacatcccgaaagacagcaaaaagaagaagcacgagctgaagattactcagcagggcacggacccgcttgttctcgccgtccagagcaaggaacaggccgagcagtggctgaaggtgatcaaagaagcctacagtggttgtagtggccccgtggattcagagtgtcctcctccaccaagctccccggtgcacaaggcagaactggagaagaaactgtcttcagagagacccagctcagatggggagggtgttgtggaaaatggaattaccacatgtaatggaaaggagcaagtgaagaggaagaaaagttccaaatcagaggccaagggcactgtgtcgaaagtcactgggaaaaaaatcaccaagatcatcagtctgggaaagaaaaagccgtccacagacgagcagacctcctcagctgaggaagatgttcccacctgcggctatctgaacgtgctctccaacagccgctggcgagagcgctggtgccgagtgaaagataacaagctcattttccacaaggacaggaccgacctgaagacccatattgtgtctattccgctccgtggctgcgaggtgatcccgggtttggattctaaacatcctctgacgttccggctgctgcgcaacggccaggaggttgcagtattggaggcatcttcttctgaagacatgggcaggtggattgggattttactcgcagagacgggatcgtccacagacccggaggctctgcactatgactacattgatgtggagatgtctgcaagtgtcattcagacagccaaacagaccttctgtttcatgaacaggcgtgttatatctgctaacccatatctagggggcacctccaacggctatgcccaccccagcgggacggcacttcattatgacgatgtcccgtgcatcaacggctcgctcaagggtaaaaagccccccgtggcgtctaatggggtcacaggaaaagggaagactctgagcagtcagccaaagaaagcggatcccgcggctgttgtgaaaaggacgggttcgaatgctgcccagtacaagtatggcaagaaccgggtagaagcagatgccaagcggctacagaccaaagaggaggagctgctgaagaggaaagaggccctgcggaataggctggcccagctccgcaaggaaagaaaagaccttcgagcggctattgaagtgaacgccggcaggaagccgcaggcgatcctggaggagaagctgaagcagctggaggaggagtgccggcagaaggaggcggagcgtgtcagcctggagctggagctgacggaggtcaaggagagcctgaagaaagcgctggcgggcggagtcaccctggggctggccatcgagcccaagtcagggacatcgagtccacagtctccagtgttccggcaccggaccctggaaaactcgcccatctccagctgtgacaccagtgacaccgagggccccgtgccggtgaacagcgcggccgtcttgaagaagagccaggctgccccgggcagctccccctgccgagggcatgtgctgcggaaggccaaggaatgggaattgaagaacgggacctaggggacagcagcaccactccagcctcagagactgcacacccccttgcctgtatcctcatctgtgtgacggcaggaagctctgcccagagtggcctcagctgcacgactccagaggctccacgactgagctctgaggccagtgcctgtcccccaggcccacttgtattctttctactgtaaaatggcgcctttaaaaaagatgtaagactttggttcccaactttgttaaaaaacaaaaaaagtgatggaaaggtgtttgaaaggatgctatcaggcgaagtgacatctttctaaccagataggccattgctttcaccgattccaacccagccctggactgaggatggatggttccatgagcccccagatgaaaacctggattcgacagggaagagcttggatccccggctgccccgggcatgagtgtggctggccatgggcactgggctcgccttgcacgcccaccaggagggccaggggcatacgcagtcctgacgtggactttgtgtcttggcgtaccctctccacgtgcccgtccccctcgtcatcagaggtaaaggcatgagaaaatcgcgctgtgaaacgttttttaccttttattattattttttggacagatgcttttgtcaccaagacatgaaaagctgccattcttcttaacctgttttttaggaatgtctttttactgtgtgtcacacttagatcaaggagttttcagaggttccttattttattaattaattatttgtgctgcttttgacaggtagcagagggttttaatacttcactaacagtacaccctcctcccccttgggctagcatccccagcccttaatccacgtcggagccggcaggtgcttctcacaccaggagcctctgggggcaggggctggctcctcgccgctgtacaggacgtttactgctgcttggggccagggcagtcctttgaaagggaagcaagttccggaatttgttcgctcatggaactataacaccttagagcaagaggcaggaattccagggcctcctgcccctccccttcctccagcttgtcaagttaaaccactaatgtgttggtgggcctggccgtgctgcctctcctgagtagggtgggtgcaagtagggcctctttcccagctttcttgcttgccttctgtgcaatatttcttggagaatttggatgcctaaggcataaaggaaaaaaacagagttcatagtttgagctggtatttaccccctgggtttaaaaatcagattaacttcttggtctcccggaggctgctgtcaggaattctccagtacgggaagatgcagtcacttatgacgaaataagtcacccctgaacgcctccgcaggcagattcatggagaccagtcccagtagcaaccgccccttccccaagcatagaatacagaggtgccatacttggtgtaagccttccttctgtccactgtccagaatgtcctttttcacacagaggaagagatggcgggaaaacactgactgactccttgggtttcccccagacatactttcagagcgctagctgtgtggtgcacgggactttacagttaggattcatgtttaaggtggtggcgcttgaggcctgcaagggccacgttggattactgaagcggaaagcggtctcccatgtataagaaaaagttttacaacacgaattggaagctgcttgagtccacctgaacttgaattgattgcaaagccatctgctgggaacggttttgggttcctgagccatcagccagcctttctttcccctctgatgcacgttcctcccggcctagtccgtggaggcccatcacaccagcatccgtgacgccagcttcccactaggacatccaggcaggtcgggcggggacgccacacacctcagggccgtccgctgcattgccatagaggagccctccctccagtggtcacttcccaccattgcaggcagacttcccaccattgcaggcagctgggcccacttcatatcacacaaaatgaattttctataaagggaaaaaagtttgctcctccatagatttttgctgccttcgggtcaaatagtttccctggttgacactcttgggccactctgattggcagcctgctttgccaaagagaactgtgtgaggttttggtggttagtaagagaagggggagatggccagcctgaagtcacggtcctggcccagcacaggtgggcagcagcgagctggcaggtgaagtgtgagcagcacgcaaagtgtcacgtgggccttagccgtcacccaccagcttcctcaccaggcaaggaggccccggagccttagcagggacttgcccaacggcacagctgattggtgctcgactcccagcatgcatattttgttgtaaaaacccaggtttgtaattcacatccacaaccctaagccttttaaagcggaggcaaacgttaacaaaccccatcgtggtccatggagcctttcaaaatgggtgccctggaggggcctgacagtgggttccttccatggcggatactcccttgaaatttcacattccatcaaagtttaaagcatttacttcagaataagttatttatgtgtatatgttcaataaatatagtttttaatttatatctgtacatattagacacacgcgagccatcttgccagaattctgacagtgatgtcattttattcccctcccaaaacatgccccaggaacaagcaccccttgcctctgtggcagctgcgagtgtgtctgatttcataacgaagccaggctgagggcaagaggcccgacaggcaggccagggtccccggagaagccggatttcttcgcaatgtcactggtacttagcagatggtcgtgttcacaggggctagccacctgtactacggtgccgaccgcaatgcgaggaatgtggtggccacgcgatggagctggccggaggacaggtcaggtgagggggccgacccctgcggggctcagggctccttccattctaaccttgagccacagtgtcactcttcagggctctgctcctggctctattttgttaaggtgtcatcagccttcaacctccatttatatatttttataatgttaagccactgaccaactttttcatagaaacaactatcagattcgagggctccctttgtccccctgacctgggcacaggcatgggcgatggctccctcttcccagaatctgcggggaactggggcaaggcccatctgtctgcaaggctggtagctctctccctcggcttccagagtccacggcagttgcaaggtaaccagtgtggatctgctgagtcaccccaggcaccagacttaccccaggagcatgggccactgtccatggggccttccttgagaccttcccttggggctggcgggcggcggcttaccagctgggtcagtcccatctcgcccctctgtgcctatgccctggcgttgccaggcttaaccttcccctgtatcttactcatcccagaattattactggccatttctaaatagacaaaaactaccctaaaatgtggagatttactccttttgaaaagtctgtttcaaaaagtgtggcctcagctctggaggccacccccaggaaggagtttgaggttcattgtcattatggccacagtttggtgcttgtgcacgggactcaaagggcagcgtcgaagctggggttaggtgtagggttgtgagcaaagctcccctgtttgtggccacaccttccctttccaaaaaggctattaattctactcacccactatttggggggatgtaaattttgcccacagactttgccacccaggtgaggtgctgtgttcatgcacggaactgatgtcattagacaccatccaaggatgggcagcctgcagtgtggccggcgactgccatccagagaaaaggcaccttgtgccacagggcggggccgacaccctgagctcacaggtggcccctgcattcaggtggatgtccatccttgaaacagcctcttctgggaacacagcactggaggtctccaggcatcagggttggccggcagggtgccctgcagcttacataaaggtcgtggcaatgtttcaatgttaaactaaactattgccttcctcttacttttcctaaaatgattttctaatgggaacagtcacttcaagttcatgacatagtttgaaggaggataattcattttttcctggttgtcactgtcttcttatccccttggtgggctgggttcatactgtgaaataaactaaaatgaaaccaaaacgttcctgccgtaaatacgtggcacagcactgcagaaaaagcagtcacctctattcgtgagtccccaagccatagcagggcgtctgtaaaagaagggaaactgcacccaggaagtggtgggcgtcagacgcatcctttcgcccgtagttcatgaaatagttccggctttggtcttccagaaaatctcaacttcaccgtgcacaagtgttaccgggtctttttagtgtagccatggaagatactttcaaaaggacatcttcagatcataagtcttaggaccaaaggtgtttttaatgagataatctttttgattttctaacaagaaaggaaatattcactttacattttaacatcaacttttaagtgatattcagaattaattgaccatggtgatacgttgtaaaatgttttcatattaagaatgtaattatttccttattgtattttttaaaagctaaagtcatatttaaaattctctttgaaagaaacaggcaaagaaacagcaaagatttttttaaattaaatatgttagtagtgcccacttcaaatgactgtaaatatattttcactgtttctcaatgtatttaattcataaagtaaaaattttatgaaaagaaacttgcaaggaaaatcctagttttcagtccactcgccccactttgtagtagcttcactgaatttcctgctttcctggttgaattttctactgtttcacgtggtgtaaccctagactggcgcccttggcgtgcccctttgtgtatgaataaacttctctccccca

SEQ ID NO: 287475 - DNA, 2193 bp, Artificial Sequence
  derived and/or modified sequence
atggaggagctgatcgtggagctgagactgttcctggagctgctggaccacgagtacctgaccagcaccgtgagagagaagaaggccgtgatcaccaacatcctgctgagaatccagagcagcaagggcttcgacgtgaaggaccacgcccagaagcaggagaccgccaacagcctgcccgcccccccccagatgcccctgcccgagatcccccagccctggctgccccccgacagcggccccccccccctgcccaccagcagcctgcccgagggctactacgaggaggccgtgcccctgagccccggcaaggcccccgagtacatcaccagcaactacgacagcgacgccatgagcagcagctacgagagctacgacgaggaggaggaggacggcaagggcaagaagaccagacaccagtggcccagcgaggaggccagcatggacctggtgaaggacgccaagatctgcgccttcctgctgagaaagaagagattcggccagtggaccaagctgctgtgcgtgatcaaggacaccaagctgctgtgctacaagagcagcaaggaccagcagccccagatggagctgcccctgcagggctgcaacatcacctacatccccaaggacagcaagaagaagaagcacgagctgaagatcacccagcagggcaccgaccccctggtgctggccgtgcagagcaaggagcaggccgagcagtggctgaaggtgatcaaggaggcctacagcggctgcagcggccccgtggacagcgagtgcccccccccccccagcagccccgtgcacaaggccgagctggagaagaagctgagcagcgagagacccagcagcgacggcgagggcgtggtggagaacggcatcaccacctgcaacggcaaggagcaggtgaagagaaagaagagcagcaagagcgaggccaagggcaccgtgagcaaggtgaccggcaagaagatcaccaagatcatcagcctgggcaagaagaagcccagcaccgacgagcagaccagcagcgccgaggaggacgtgcccacctgcggctacctgaacgtgctgagcaacagcagatggagagagagatggtgcagagtgaaggacaacaagctgatcttccacaaggacagaaccgacctgaagacccacatcgtgagcatccccctgagaggctgcgaggtgatccccggcctggacagcaagcaccccctgaccttcagactgctgagaaacggccaggaggtggccgtgctggaggccagcagcagcgaggacatgggcagatggatcggcatcctgctggccgagaccggcagcagcaccgaccccgaggccctgcactacgactacatcgacgtggagatgagcgccagcgtgatccagaccgccaagcagaccttctgcttcatgaacagaagagtgatcagcgccaacccctacctgggcggcaccagcaacggctacgcccaccccagcggcaccgccctgcactacgacgacgtgccctgcatcaacggcagcctgaagggcaagaagccccccgtggccagcaacggcgtgaccggcaagggcaagaccctgagcagccagcccaagaaggccgaccccgccgccgtggtgaagagaaccggcagcaacgccgcccagtacaagtacggcaagaacagagtggaggccgacgccaagagactgcagaccaaggaggaggagctgctgaagagaaaggaggccctgagaaacagactggcccagctgagaaaggagagaaaggacctgagagccgccatcgaggtgaacgccggcagaaagccccaggccatcctggaggagaagctgaagcagctggaggaggagtgcagacagaaggaggccgagagagtgagcctggagctggagctgaccgaggtgaaggagagcctgaagaaggccctggccggcggcgtgaccctgggcctggccatcgagcccaagagcggcaccagcagcccccagagccccgtgttcagacacagaaccctggagaacagccccatcagcagctgcgacaccagcgacaccgagggccccgtgcccgtgaacagcgccgccgtgctgaagaagagccaggccgcccccggcagcagcccctgcagaggccacgtgctgagaaaggccaaggagtgggagctgaagaacggcacctag

SEQ ID NO: 287476 - protein, 647 aa, Artificial Sequence
  derived and/or modified sequence
MEFSIKQSPLSVQSVVKCIKMKQAPEILGSANGKTPSCEVNRECSVFLSKAQLSSSLQEGVMQKFNGHDALPFIPADKLKDLTSRVFNGEPGAHDAKLRFESQEMKGIGTPPNTTPIKNGSPEIKLKITKTYMNGKPLFESSICGDSAADVSQSEENGQKPENKARRNRKRSIKYDSLLEQGLVEAALVSKISSPSDKKIPAKKESCPNTGRDKDHLLKYNVGDLVWSKVSGYPWWPCMVSADPLLHSYTKLKGQKKSARQYHVQFFGDAPERAWIFEKSLVAFEGEGQFEKLCQESAKQAPTKAEKIKLLKPISGKLRAQWEMGIVQAEEAASMSVEERKAKFTFLYVGDQLHLNPQVAKEAGIAAESLGEMAESSGVSEEAAENPKSVREECIPMKRRRRAKLCSSAETLESHPDIGKSTPQKTAEADPRRGVGSPPGRKKTTVSMPRSRKGDAASQFLVFCQKHRDEVVAEHPDASGEEIEELLRSQWSLLSEKQRARYNTKFALVAPVQAEEDSGNVNGKKRNHTKRIQDPTEDAEAEDTPRKRLRTDKHSLRKRDTITDKTARTSSYKAMEAASSLKSQAATKNLSDACKPLKKRNRASTAASSALGFSKSSSPSASLTENELLWEPTPVKLDLNPAALYCT

SEQ ID NO: 287477 - protein, 199 aa, Artificial Sequence
  derived and/or modified sequence
MEFSIKQSPLSVQSVVKCIKMKQAPEILGSANGKTPSCEVNRECSVFLSKAQLSSSLQEGVMQKFNGHDALPFIPADKLKDLTSRVFNGEPGAHDAKLRFESQEMKGIGTPPNTTPIKNGSPEIKLKITKTYMNGKPLFESSICGDSAADVSQSEENGQKPENKARRNRKRSIKYDSLLEQGLVEAALVSKISSPSDKK

SEQ ID NO: 287478 - DNA, 1944 bp, Artificial Sequence
  derived and/or modified sequence
atggagttcagcatcaagcagagccccctgagcgtgcagagcgtggtgaagtgcatcaagatgaagcaggcccccgagatcctgggcagcgccaacggcaagacccccagctgcgaggtgaacagagagtgcagcgtgttcctgagcaaggcccagctgagcagcagcctgcaggagggcgtgatgcagaagttcaacggccacgacgccctgcccttcatccccgccgacaagctgaaggacctgaccagcagagtgttcaacggcgagcccggcgcccacgacgccaagctgagattcgagagccaggagatgaagggcatcggcaccccccccaacaccacccccatcaagaacggcagccccgagatcaagctgaagatcaccaagacctacatgaacggcaagcccctgttcgagagcagcatctgcggcgacagcgccgccgacgtgagccagagcgaggagaacggccagaagcccgagaacaaggccagaagaaacagaaagagaagcatcaagtacgacagcctgctggagcagggcctggtggaggccgccctggtgagcaagatcagcagccccagcgacaagaagatccccgccaagaaggagagctgccccaacaccggcagagacaaggaccacctgctgaagtacaacgtgggcgacctggtgtggagcaaggtgagcggctacccctggtggccctgcatggtgagcgccgaccccctgctgcacagctacaccaagctgaagggccagaagaagagcgccagacagtaccacgtgcagttcttcggcgacgcccccgagagagcctggatcttcgagaagagcctggtggccttcgagggcgagggccagttcgagaagctgtgccaggagagcgccaagcaggcccccaccaaggccgagaagatcaagctgctgaagcccatcagcggcaagctgagagcccagtgggagatgggcatcgtgcaggccgaggaggccgccagcatgagcgtggaggagagaaaggccaagttcaccttcctgtacgtgggcgaccagctgcacctgaacccccaggtggccaaggaggccggcatcgccgccgagagcctgggcgagatggccgagagcagcggcgtgagcgaggaggccgccgagaaccccaagagcgtgagagaggagtgcatccccatgaagagaagaagaagagccaagctgtgcagcagcgccgagaccctggagagccaccccgacatcggcaagagcaccccccagaagaccgccgaggccgaccccagaagaggcgtgggcagcccccccggcagaaagaagaccaccgtgagcatgcccagaagcagaaagggcgacgccgccagccagttcctggtgttctgccagaagcacagagacgaggtggtggccgagcaccccgacgccagcggcgaggagatcgaggagctgctgagaagccagtggagcctgctgagcgagaagcagagagccagatacaacaccaagttcgccctggtggcccccgtgcaggccgaggaggacagcggcaacgtgaacggcaagaagagaaaccacaccaagagaatccaggaccccaccgaggacgccgaggccgaggacacccccagaaagagactgagaaccgacaagcacagcctgagaaagagagacaccatcaccgacaagaccgccagaaccagcagctacaaggccatggaggccgccagcagcctgaagagccaggccgccaccaagaacctgagcgacgcctgcaagcccctgaagaagagaaacagagccagcaccgccgccagcagcgccctgggcttcagcaagagcagcagccccagcgccagcctgaccgagaacgagctgctgtgggagcccacccccgtgaagctggacctgaaccccgccgccctgtactgcacctag

SEQ ID NO: 287479 - DNA, 1944 bp, Artificial Sequence
  derived and/or modified sequence
atggaattcagcataaagcagagtccactgagcgtgcaaagcgtcgtgaagtgcatcaaaatgaagcaggcccccgaaattctggggtcagccaatggaaaaacgccctcctgcgaggtcaacagagagtgctccgtgttcctgtcgaaggcccaactgagttcctcacttcaggagggcgtcatgcagaagttcaacgggcatgacgcattgccttttatccctgctgacaagcttaaggatctgacaagtcgcgtttttaacggcgagccaggagctcatgatgccaaactgagatttgaatctcaggagatgaagggcatcggtacaccaccaaataccactccaattaagaacgggtcgcccgaaatcaagttaaaaattactaaaacttatatgaacgggaagcctctgttcgagagcagcatatgcggtgactccgctgctgacgtgtcccagtcagaagagaatggacaaaagccagaaaataaggcccggagaaaccgaaagagatcaataaaatacgactccctgctcgagcaggggcttgttgaggcagcgctggtttccaaaattagctccccttccgataaaaagatccctgccaaaaaagagtcttgccctaacacaggacgggataaggatcatttgctgaagtacaatgttggggacctcgtgtggtcaaaggtgtccggatacccgtggtggccttgcatggtgtcagcggacccactgcttcattcttacaccaagcttaaaggacagaagaagtccgccaggcagtaccacgtgcagttcttcggggacgcccccgagcgcgcctggatcttcgaaaaatcgcttgtagcatttgagggagagggtcagttcgaaaaactctgccaggagagtgccaaacaggctcctactaaggccgagaagatcaaactgctgaaaccaatttccggaaagctccgagcgcaatgggagatgggtattgtgcaggcagaagaggctgccagcatgagcgttgaggagaggaaggcgaaatttacattcctgtatgtaggagaccagcttcatctcaatccccaggtagccaaggaagctggcattgctgccgaaagccttggagagatggcggagtcttcaggcgtttccgaggaggcggcggagaaccccaaatctgttcgggaggagtgcatacccatgaagcggcgccgtagagctaagctgtgttcctccgcagaaaccctggagtcccaccctgatattggaaaatccacccctcaaaaaaccgccgaggccgacccgaggaggggggtcggctctccccctggaaggaagaagaccacggtcagtatgcctaggtctaggaagggggacgctgcctcgcagtttctcgtattttgtcagaagcatcgggatgaagtggttgctgagcaccctgatgcaagtggtgaggaaatcgaggaactgctgcgttcccagtggagcttgctcagcgaaaagcagagggcacgctataacactaagtttgccctggtggcgcccgttcaagccgaagaagacagcgggaatgtcaatggcaaaaaaaggaaccatacgaaacggattcaagaccctactgaggatgctgaagccgaagacacgccccgcaaacggctgcgcaccgataaacatagtctgaggaagcgagataccatcactgacaagaccgcaaggaccagttcctacaaggcgatggaagcagctagtagtctcaaatcgcaagcagctacaaaaaacttgtccgacgcctgtaaacccctgaaaaaaagaaatcgggcttcaaccgctgccagctctgctcttgggttttccaagtctagctcgccttccgcgtcccttacggagaacgaactgctgtgggaacccacccctgtgaagctggacctcaatcccgctgcattgtattgcacttag

SEQ ID NO: 287480 - DNA, 1944 bp, Artificial Sequence
  derived and/or modified sequence
atggagttctccattaagcaaagccctctgagcgtccagagtgttgtaaagtgcataaagatgaaacaggcaccagaaatcctggggtctgctaatgggaagacgccctcatgtgaagtgaatagggagtgttcagttttcttaagtaaggcgcagctgtccagctcactgcaggagggggttatgcagaagtttaatggccacgatgcgttgccctttatcccagccgacaagctgaaggacctgacaagccgcgtcttcaacggcgaaccaggcgcccatgatgcgaaactgcggttcgaatcacaggagatgaaaggcattggcaccccccccaacactacaccaattaaaaacggcagcccggagataaaactgaaaatcactaagacctacatgaacggaaaaccgcttttcgaatcaagtatttgtggggatagtgccgccgacgtgtctcaatccgaggagaacgggcaaaaaccagagaacaaagccaggagaaacagaaaacgctctatcaagtatgattctctgttggaacaaggactggtggaagccgccctggtttctaaaatcagtagtcccagtgataagaaaattcccgctaaaaaagagagctgccccaacacaggtagagataaagatcatctgcttaagtacaacgtcggtgatctcgtctggagcaaggtgagtggctacccttggtggccgtgtatggtctctgccgatccactcttgcattcttataccaagcttaaaggccagaagaagagcgcaagacagtaccatgtgcagttttttggtgacgccccggagagagcctggatcttcgaaaagagtttggtggccttcgagggggagggacaatttgagaagctctgtcaggagtctgcgaagcaagctccaactaaggcggagaagatcaaactgctgaagcccatcagcggcaagctgcgagctcagtgggagatgggtattgtacaagccgaagaagcagccagcatgtctgtggaggagagaaaggctaagtttaccttcctgtatgttggtgatcagttgcatctcaatccccaagtagctaaagaggccggaatcgccgccgaatcacttggggagatggctgaaagttccggggtgagcgaggaggctgccgaaaacccgaaatccgtgcgggaggagtgcatccctatgaagcggagaaggcgcgccaagctctgcagctctgcagagactctcgagagccatcccgacatcggcaagtccactccacagaaaacggctgaggccgacccacggcgaggagttgggtctccacccgggagaaagaagacgacagtttctatgccacgaagcagaaagggcgacgccgctagtcaatttttagtgttttgtcagaaacaccgcgatgaagtcgtggctgagcacccagatgcatcgggggaagaaattgaggagttattgcgctcccagtggtcactcctgtccgaaaagcagagagcccggtataataccaagttcgccttggtggcaccagtgcaggcggaggaggactcaggcaacgtgaatggaaagaagcgaaaccataccaagagaatacaggaccctacagaagacgccgaggccgaagacactcctcggaagaggttgcgaactgacaagcatagcctgagaaagcgcgatacaattaccgacaagaccgcccgcacctccagctacaaagctatggaggccgcttcatcactgaagtctcaggcggcaactaaaaacctgagtgacgcatgcaagccactcaaaaagagaaatcgcgcctccactgccgcctcctcagcattgggtttctccaagagctcctccccttcagcttcattaacagaaaatgaacttctctgggaaccaacccctgtgaaactggaccttaatcctgcagcattgtactgcacctag

SEQ ID NO: 287481 - DNA, 1944 bp, Artificial Sequence
  derived and/or modified sequence
atggagttcagcatcaagcagagccccctgtctgtgcagagcgtggtgaagtgcatcaagatgaagcaggcccctgagatcctgggcagcgccaacgggaagacccccagctgtgaggtgaacagagaatgttctgtgttcctgagcaaggcccagctgagcagcagcctgcaggagggcgtgatgcagaagttcaacggccatgatgccctgcccttcatcccagctgacaagctgaaggacctgaccagcagggtcttcaacggggagcccggggcccatgatgccaagctgcgctttgagagccaggagatgaagggcatcggcaccccacccaacaccacccccatcaagaatggcagccctgagatcaagctgaagatcaccaagacctacatgaatggcaagcccctgtttgagagcagcatctgtggggacagcgctgctgatgtgtcccagagcgaggagaatggccagaagccagagaacaaggcccggaggaacaggaagaggagcatcaagtatgacagcctgctggagcagggcctggtggaggccgccctggtgtccaagatcagcagccccagcgacaagaagatcccagccaagaaggagagctgccccaacacaggccgggacaaggaccacctgctgaagtacaacgtgggggacctggtgtggagcaaggtgtctggctacccctggtggccctgcatggtgtctgctgaccccctgctgcacagctacaccaagctgaagggccagaagaagagcgcccggcagtaccacgtgcagttctttggagatgcccctgagcgggcctggatctttgagaagagcctggtggcctttgaaggagagggccagtttgagaagctgtgccaggagagcgccaagcaggcccccaccaaggccgagaagatcaagctgctgaagcccatcagcggcaagctgcgggcccagtgggagatgggcatcgtgcaggccgaggaggccgcctccatgtctgtggaggagaggaaggccaagttcaccttcctgtatgtgggggaccagctgcacctgaacccccaggtggccaaggaggccggcattgctgctgagagcctgggggagatggccgagagcagtggagtgtctgaggaggccgctgagaaccccaagtctgtgcgggaggagtgcatccccatgaagagaagaagaagagccaagctgtgcagcagcgctgagaccctggagagccacccagacatcggcaagagcaccccccagaagacagctgaggccgacccccggcggggcgtgggcagccccccaggcaggaagaagaccaccgtgtccatgcccaggagcaggaaaggagatgctgccagccagttcctggtgttctgccagaagcacagagatgaggtggtggccgagcacccagatgccagcggggaggagattgaggagctgctgcggagccagtggagcctgctgtctgagaagcagagggcccgctacaacaccaagtttgccctggtggcccctgtgcaggccgaggaggacagcggaaatgtgaatggcaagaagaggaaccacaccaagaggatccaggaccccacagaagatgctgaggccgaggacacccccaggaagaggctgaggacagacaagcacagcctgaggaagagggacaccatcacagacaagacagcccggaccagcagctacaaggccatggaggccgccagcagcctgaagagccaggccgccaccaagaacctgagtgatgcctgcaagcccctgaagaagaggaacagagccagcacagctgccagcagcgccctgggcttcagcaagagcagcagccccagcgccagcctgacagaaaatgagctgctgtgggagcccacccctgtgaagctggacctgaacccagctgccctgtactgcacctag

SEQ ID NO: 287482 - DNA, 1944 bp, Artificial Sequence
  derived and/or modified sequence
atggagttcagcatcaagcagagccccctgagcgtgcagagcgtggtgaaatgcattaagatgaaacaggctcctgaaatcctaggtagtgcgaacggcaagacaccctcctgtgaggtcaaccgcgagtgctcggtgttcctttctaaagcacagctgtcctctagtctccaggagggcgtcatgcagaagtttaacggtcacgatgcgctgccttttatacctgcagataagctgaaagacctgacttcccgcgtgttcaatggcgaaccaggcgcacacgacgccaaacttcgctttgaatcgcaagagatgaaagggattggcacccctccaaataccactcccatcaagaacgggagccccgagattaaactcaagattacgaagacttatatgaatggcaagcccctgtttgaatcaagtatttgcggtgacagtgctgccgatgtttctcaaagtgaagagaacggccaaaaacctgagaacaaagcccggcgtaataggaagaggagtatcaaatatgactccctgctcgaacagggccttgtggaggctgcgctcgtgagcaagatctccagtccgtctgacaaaaagatacctgcaaaaaaagagagttgcccgaatactggacgcgataaagatcatctgcttaagtacaacgtgggcgacctcgtatggtctaaggtgagcggctatccctggtggccctgtatggtatcggctgaccccctcttacattcctacaccaagctcaaaggtcagaagaagagcgccagacagtatcacgtccagttcttcggggacgcacccgaacgcgcgtggatcttcgagaagtctcttgtggccttcgagggcgaagggcaattcgaaaagttatgccaggagagcgctaaacaagctcccacaaaggcagaaaagatcaagctgctaaaacctatcagcgggaagcttagggcccagtgggagatggggattgtgcaggccgaggaagctgcaagcatgtccgtggaggaacgcaaagccaaattcaccttcctatatgttggagaccaattgcatctgaatccccaggtcgctaaggaagcaggcatcgctgctgaaagcctgggcgaaatggcagaatcctctggagtatccgaggaggctgcggagaatccgaagagtgtgcgggaggagtgcatcccaatgaagagacgacggcgcgcaaagctgtgtagttcggctgagaccctggagagtcatcccgacattggtaaatccaccccgcaaaagacagccgaagcggacccgcggcggggagtcgggtcaccacctggacgcaaaaaaactaccgtaagtatgccacggagccgcaagggcgacgcagcaagccagttcctagtgttctgccagaagcatcgagacgaggtcgtcgcagagcatccagacgcatctggagaagaaatcgaagagctgctgcgaagtcagtggtcactcctttcggaaaaacaaagggcccgctacaatacaaagtttgcgctagtagcgccggttcaagctgaggaggattctggcaacgtcaacggcaagaaaaggaatcacacaaaaaggatccaggatccgactgaggacgcagaggcagaagacactcctaggaagcgcctgcgcactgacaaacacagcctacggaaacgggataccattactgataaaacagccaggactagctcctataaggccatggaggctgctagctctctcaaaagccaagcggccacaaagaatctatccgatgcgtgcaaaccattgaaaaagcgcaatcgagcctcgacagcagcctctagcgctcttggcttctcaaagtcgtcatccccaagtgcgtccctgacggagaatgagttgctgtgggaacccaccccagttaagttggacttgaaccctgcagcactttactgtacgtag

SEQ ID NO: 287483 - DNA, 1944 bp, Artificial Sequence
  derived and/or modified sequence
atggagttcagcatcaagcagagccccctgagcgtgcagagcgtggtcaaatgcatcaagatgaaacaggctccagaaatactggggagtgccaacggcaagaccccatcatgtgaagtgaatagagagtgtagtgtctttctcagtaaagcccagctgtctagtagcctccaagagggggtgatgcagaaattcaatgggcacgatgcgctgcccttcattcccgctgacaagctgaaggatcttactagtcgggttttcaatggcgaacccggtgcccacgacgcaaagctgcgattcgagagccaggaaatgaaaggtataggaactcccccaaataccacgcccataaagaatgggtcgcctgagattaagcttaaaatcaccaaaacttacatgaacgggaaaccactttttgagagttccatttgtggagattcagcagcggatgtgagtcaaagtgaagagaacggacagaaacccgagaataaagctcgcaggaatcgcaaacgctcaatcaagtatgactcacttctggaacaggggctggttgaggctgccctggtctctaagatcagttctccttcagataagaagattcctgccaagaaagagtcatgccctaatactgggagagataaagatcaccttctgaaatacaatgtcggtgatctggtgtggtccaaggtctctgggtatccttggtggccgtgcatggttagcgctgacccactccttcatagttacaccaagcttaagggccagaagaaatctgccaggcagtatcatgttcagttctttggagacgcacctgaacgcgcctggatctttgaaaagagcctagtggcctttgaaggcgaaggacagtttgaaaagctctgccaagagtctgccaaacaggcccccaccaaggcagaaaagatcaaactacttaaaccaatctcaggcaagttgcgcgctcaatgggagatggggattgtgcaggcggaggaggccgcgtcaatgtctgtagaggaacgcaaggctaaatttacttttttgtatgttggggatcaattgcacttaaatccacaggttgcgaaggaagctggcatcgctgcggaaagtctgggggagatggccgagtcctccggggtctcagaggaggctgccgagaatccgaaaagcgtgagggaagaatgtatcccgatgaagcgaagacggcgggctaaactttgctctagcgcagagactctcgaaagccatccagacatcgggaaatccaccccccagaaaaccgcggaggcggaccctaggaggggtgttggatccccaccggggagaaaaaagactaccgtgtccatgcctcgatcgcggaagggggacgccgcttcgcaatttttagttttctgccagaaacatcgtgatgaagttgtggccgagcacccagacgccagtggagaagagattgaagaattgctgcgctctcagtggagcctgctgagcgaaaagcaacgcgctaggtataataccaagtttgcccttgtggccccagtacaggcggaggaggatagcgggaatgtgaatggcaaaaagcgcaatcatacaaagaggatccaagatcccaccgaggacgccgaagccgaggatactcctaggaaacgactccggaccgacaagcattccctacggaaaagagacactattactgataaaacagctcggacttcctcttataaagccatggaggcagctagcagcttgaagagccaagccgcgacaaaaaacctgagtgatgcctgcaaaccacttaaaaaaaggaaccgcgctagcaccgcagcctcctcagcccttggctttagcaaaagcagcagtccctctgcttcccttactgaaaacgaattattgtgggaacctacaccagtaaagctcgacctcaatcctgctgctctctactgcacatag

SEQ ID NO: 287484 - DNA, 1944 bp, Artificial Sequence
  derived and/or modified sequence
atggagttcagcataaaacaatctccactgtccgtgcagtctgtggtcaaatgcatcaagatgaaacaggccccagaaatcttgggtagcgctaatggtaagacacccagctgcgaggtgaaccgggagtgctccgtctttctgtctaaagctcagctgagttcctcccttcaagaaggagttatgcagaaatttaatgggcacgatgcactcccgttcatcccagctgataagctgaaggatctgaccagccgcgtgttcaatggggaaccaggggctcacgatgctaaactgaggttcgagtctcaggagatgaaaggaattgggacaccacccaacacaacgcctatcaagaacggatcacccgagataaagctgaaaatcacaaagacctacatgaatgggaagcccttgtttgagagtagcatatgtggggatagcgcagcggacgtctctcagagcgaggaaaatggccaaaagccagagaataaagctcggcgtaaccggaaacgaagcatcaaatacgacagcttgttggagcagggtctagtagaggctgccctagtctcaaaaatatccagccccagcgataaaaagattcctgccaagaaggagagttgtcctaacacgggcagggacaaagatcatctccttaaatacaacgtcggagatctggtatggagcaaagtctccgggtatccctggtggccttgcatggtttcagcggatccactcctgcacagctatacaaagctgaaaggacagaaaaaatcggccaggcaatatcacgtccagttctttggggatgctcctgagcgagcctggatcttcgagaaaagcctagtggcttttgaaggggagggacagtttgaaaaactgtgccaggaaagcgcgaagcaggcaccaaccaaggccgagaagattaaattgctgaaacctattagcggcaagctgcgggcacaatgggaaatgggtatcgtgcaggcggaggaagcagcttcgatgagcgtggaagaacggaaagcgaaattcacatttctctatgtcggtgatcagctgcacctcaacccgcaggttgcaaaagaggccggaatcgctgctgaatcactcggcgaaatggccgaaagcagcggcgtaagtgaggaggccgctgagaaccctaaatcagtccgagaggagtgtatccccatgaagcggagacgcagggcaaagctttgtagctcagccgagacactagaatcccacccggacataggaaagagcaccccacagaagaccgccgaagcggaccccaggaggggcgttggcagccccccaggtcgaaagaagacaacagtgagcatgcccaggtccaggaaaggcgatgccgcatcacagtttcttgtgttttgccagaaacatcgcgacgaggtcgtcgctgagcaccccgacgcctctggagaggaaatcgaagagctgctgcgcagtcaatggagcctgctgtccgaaaaacagcgcgcacgctataacaccaaatttgcactggttgctcctgtacaggccgaggaggattccggcaatgttaatgggaagaaaaggaatcatacgaaacgaatacaagaccctactgaggatgcagaggcggaggatactccgagaaaacggctgcgcaccgacaaacactcattgcggaagagggatacaattacagacaaaactgcccgaacctccagctacaaggcaatggaggccgcttctagccttaagtcccaagctgctactaagaacctgagcgatgcctgcaagccattaaaaaaaagaaatagagcttctacggccgcttccagcgcattaggctttagtaagagctcctctccctccgcctcccttactgaaaacgaacttctatgggagccgacgccagtgaagctggatctgaaccctgccgctctttactgcacttag

SEQ ID NO: 287485 - DNA, 1944 bp, Artificial Sequence
  derived and/or modified sequence
atggagtttagtatcaaacagtcacctctttccgtccagtccgtggtcaaatgtatcaaaatgaagcaggcacctgaaatactggggagcgccaatggaaagacgccttcgtgcgaggttaatcgggaatgctcagtctttcttagtaaggcacagctctcctcatcactgcaggaaggagtcatgcagaaatttaatgggcatgatgctctgccctttattcccgcagataagctaaaagatctgacaagtagagtgtttaatggggaacccggagctcacgacgccaagttaagattcgagagtcaggagatgaagggcattggcacaccaccaaacactactcctattaagaacggcagccccgaaatcaagctgaagataacaaaaacctatatgaacgggaaacccttgtttgaatcatctatctgtggagattcagccgcagatgtcagtcagtcggaagagaatgggcagaagcccgaaaacaaagcccgtcgcaaccgtaagaggtcaattaagtacgactctttgctggagcaaggccttgtcgaagcagcactggtttctaagatctcttccccatccgataaaaagattcccgctaaaaaagagtcatgccctaacacagggagagataaagaccacctgctcaagtacaatgttggagatctggtgtggtcaaaggtatctggttatccatggtggccatgtatggttagtgccgaccctttacttcactcttatacaaagctcaaggggcagaaaaaaagtgcccgacagtatcatgtgcagttcttcggcgatgcgcctgagcgagcctggatctttgaaaagagcttggtggccttcgaaggggaaggtcaatttgaaaagctctgccaggaatctgctaagcaggcacctaccaaggccgagaagattaaactcctgaaacctatttccgggaaactccgagctcagtgggagatgggaatagtacaggctgaggaagccgctagcatgtctgttgaggagcgtaaggctaagttcacatttctctatgtaggcgatcagctccatctgaatccccaagtggcaaaggaggctggaatcgccgctgagtccctaggtgagatggccgagtctagtggagtgagcgaggaggctgcagaaaatcctaaaagtgtgcgggaggaatgcattcccatgaaaaggagacgcagggccaaactatgctcaagcgccgagactctggagtcacatccagacattggcaagtctacacctcagaagaccgccgaagccgatccgagacggggagtgggctctccacccggaaggaaaaagacgacagtatctatgcccaggagcaggaaaggcgacgctgcttcccaatttctggtgttttgccagaagcacagagatgaggtagtcgcagagcatcccgacgcctccggagaagaaattgaagaactcctgaggagccaatggtcgctattgtctgagaagcaacgtgcaagatacaacactaaatttgctttggtcgcgcctgtgcaagccgaagaggactcaggaaatgtgaacggcaagaagagaaaccacacgaaaaggattcaggatccaactgaggacgcagaagccgaggacaccccgagaaaaagactgcgcaccgataagcacagccttcgaaagagggacacgatcactgacaagaccgccaggacgtctagctataaagccatggaagcggcttctagcttaaagtcccaggctgctaccaaaaacctatccgatgcctgcaaaccactcaagaaacgcaatcgcgcaagcactgccgctagtagcgccctgggcttttccaagagcagtagtccatcagctagtctgacggaaaacgagcttctctgggaacctacacccgtgaaactcgatctgaacccggctgcgctgtattgtacatag

SEQ ID NO: 287486 - DNA, 8390 bp, Artificial Sequence
  derived and/or modified sequence
tgttctaagaacggaagcatctgggctggatggaatttagcatcaagcagagtcccctttctgttcagagtgttgtaaagtgcataaagatgaagcaggcaccagaaatcctcggcagtgccaacgggaagactccgagctgcgaggtgaaccgcgagtgttctgtgttcctcagcaaagcccagctctccagtagcctgcaggagggggtcatgcagaagtttaacggccacgacgccctgccctttattccagccgacaagctgaaagatcttacttcccgggtgtttaatggagaacccggcgcacacgatgccaaactgcgttttgagtcccaggaaatgaaagggattgggacaccccctaacactacccctatcaaaaatggctctccagaaattaagctgaaaatcaccaaaacatacatgaatgggaagcctctctttgaatcttccatttgtggtgacagtgctgctgatgtgtctcagtcagaagaaaatggacaaaaaccagaaaacaaggcgagaaggaacaggaagaggagcataaaatatgactccttgctggagcagggccttgtcgaagcagctcttgtgtctaagatctcaagtccttcagataaaaagattccagctaagaaagagtcttgtccaaacactggaagagacaaagaccacctgttgaaatacaacgttggtgatttggtgtggtccaaagtgtcgggttacccttggtggccttgcatggtttctgcagatccactccttcacagctataccaaacttaaaggtcagaaaaagagtgcacgccagtatcacgtacagttctttggtgacgccccagaaagagcttggatatttgagaagagcctcgtagcttttgaaggagaaggacagtttgaaaaattatgccaggaaagtgccaagcaggcacccacgaaagctgagaaaattaagctattgaaaccaatttcagggaaattgagggcccagtgggaaatgggcattgttcaagcagaagaagctgcaagcatgtcagtggaggagcggaaagccaagttcacctttctctatgtgggggaccagcttcatctcaaccctcaagtagccaaggaggctggcattgctgcagagtctttgggagaaatggcagaatcctcaggagtcagtgaagaagctgctgaaaaccccaagtctgtgagagaagagtgcattcccatgaagagaaggcggagggccaaactgtgtagctctgcagagaccctggagagtcaccccgacatagggaagagtactcctcaaaagacggcagaggctgaccccagaagaggagtagggtctcctcctgggaggaagaagaccacagtctccatgccacgaagcaggaagggagatgcagcatcccagtttttggtcttctgtcaaaaacacagggatgaggtggtagctgagcacccagatgcttcaggtgaggagattgaagagctgctcaggtcacagtggagtctgctgagtgagaagcagagagcacgctacaacaccaagtttgccctggtggcccctgtccaggctgaagaagactctggtaatgtaaatgggaaaaaaagaaaccacacaaagaggatacaggaccctacagaagatgctgaagctgaggacacacccaggaaaagactcaggacggacaagcacagtcttcggaagagagacacaatcactgacaaaacggccagaacaagctcttacaaggccatggaggcagcctcctcgctcaagagccaggcagcaacgaaaaatctgtctgatgcatgtaaaccactgaagaagcgaaatcgggcttccacggcagcatcttcagctcttgggtttagcaaaagttcatctccttctgcatccttaactgagaatgagcttttgtgggagcccacaccagtcaagttggatttgaacccagctgctctgtactgcacttagaatgatgtaatattccaggatgctgctgcaggtggcgtatcatcgtacacactcagtgacatttctatcacaatcattttatggaagatgtgtgataatctgtttttactggtattaataaacacatacaatgaagaaaacagataacaaattttaagaccaaggtaagataactaatcaaggccatttaatccgtcacattcatctcataatagaaacacgttcatattccagtggtcaatgtagatttcaagttgaaaggcagtccctttagttgggggctgtccagagctgcagcagggctttgcacggaaggggtggccctgttagagttgcttctcctctagtttgtaacttactggacttttgtggaaaatatcagcgtcgctaccctcagaaacaaactaacagcacacgttaggaggagtcctcatcagctgttctcattgccagtgagatatattcagtattgtagatactacactaatttccaacataagaggcaggaagagttttgattctatccttttttactaaacagttttattatgacactagatacagtaaatttttagaaaaaaataccatttacagtattattgtgaaccatttaacccttttgatccaaggccccggaccaaggggatactgtaatcaggttatgtacaccaacctctgcatcagttgcttctatagagcatcagccctcatgtttcattgtcttaatgtcggggagcagcctggtgtcctgccccaggtgtccgcatttttgcatggtaaggaaaaggcttacttgcccttcagctcataaaagcagaaggtgtgctattcacagtaccatgcgagtagcccacagttaattcccggcagattctttggctgtgttttatctttaatgaacgtttctgactaatattttgttgtaaaccattaagtaatgtaacgcatgtaagatgcttagggtgcctggccaggactccgtggtttcctgttgtgacagtaataatggttataataataaaaatgataaaattgccatcattctatttttatccaaaagtataaattttgctttggcatgaaaagtggtcctcttgactgcattatgcatgcgaggatgaaataaacctagaagtggcagaacactggatttgtgtgtgtggcgctttagggtgctggactgtatggctgagggctggttgggttcctctattggctctgctcaaatgttgcaggatacatagccccaaagatggtctaggagcaatctaagctgtgttactccaaaggacatgaaaaagctcaagagtaaaattaaaattctcaaaaaaaaaccccacgaaatttaaagatggggaaaaaaagatggtataaaaatggctctggttcaataagcagtcacccaaagtaaagactctatcttgaaaggcttttggtgaaaatgaagggatttcatttgaaattacagcatgatgaattttgcatgggtggccagccagctagcccataactgatagatgcattagaagtcagccagcgcataggtgctccctctatattatggagaaagcaaaaccctgcaaatgaccaaatggtgtccaaagagcagcatgacattggcatcagctgaataaccaggggcacatgggggaacgtggatgggaatgatagtgtatctcagcggggggtggggtgacatcgttccctggggacattgggaaggtgggcaggggcaagtgaactcagcactctgcagtgagagggacagtcccatgtgtggcagcattgtcccacttcagatgccaggagtgggctcatcctagaggagcggagttttccgagaggaccatctcctggtttcctgaaggaggtgggtggaaacggctcttgtttgaaagaacttagggaggaccattggcttgccaagagtacagaaattcattatgctgctaatttaacgtggaattccttcatttcataagaacctcaaaataatggtgatacattctagccttaagacatttgaattgccggttgttgaggtgaattttgtttgtcatacatggaaccattttagtcccatttgactcacttcagaccatcttccacacactatgtctgtgcttggagaggggaggtggctctccagtgtaaaacttgaggcattcactagaggtgaaaacttgtcagaatatataaaagcttagattgtagctgttctaaaaacgtaagtactccattgtaatagggtggcatcttcaggtagtgcacatattggcaatagaggtcctgaattgtttttctaagactgatctgagagccattgggccatcaagcctttatatatctgcttctaaaattgccccacctgctctagatggatctttgggcctttcctcagtgttcatgcaaaaattaaatgtcttttttcagcatactgactccaggtgtagttacatctcagtgctgtcttgagtatatattttatctcttatacctgtatctcccaactagaaacagctccagtgtttttaagagaatgtttcttaaaaccaataggaaacttaagcgaggtttcatgacacaacctttcatgtcgtgaaaggcagagggtgactgtgtgtgatgtgcagagtccttggacaggagtcgggggctcctctgtcccactgctgcttcttgagtgggtggagtggtgcttagaggatctccgagaggtccccgcagctctagggagatctgattttgtgttttttgtttaagtacttcacacagaagcctaggtagatttaaaatggggtgctcagggactggggaacaagacggggtggggtggggagatgggcatttggagagtctcatgtagctggagacgttaagagctgagcacaccacaggaaaggagggaggatgctgtgtgagagccatgctgtcaggagcaagcttgctgctcctgtgctgccctggccctggccttgcttgcccatggtgtgtgtgtccagaggtgtgtgtgaggctgccagaacaagtgctgggtctgtcacagagaagtttaaaaaagaaaactaagattataaattagcatctagttccaaaaccaaaaaaagtgcctgtggatgtatataaaattaagatgataagaaagtgctcctgagaaggctcttgccagaagcctgatgtgagtgtgtggcacctgtgatggcagggctgtgagctgggcttctgtcctcctctgtgtcccggcatggaagccagtataagcatttccaaatgagggaaaagtccttggctcgtttgatccagttgagttgaaagggttgccttggcagcagaggctcctctgatggctgacatcagtcactgcgtctgggcctgagacgtgcatggagggctgtaaagccacggattcccctcgctggagaggctcctgtctgatagcggtagatgaaaaataaggtcgttatgactttggcaacttgcttcatttctttttcatttgacttacaacacacttctctaacatctagcccttttaaatttttaattaatttcaaagcttcctctggccaggtagacttttgtatacagaccaggtgagagcccttttgccttagtgtgaaaatgtaacattttatgcttttaaaatcaatagattcatcaccttagttttttaaaaaaaatctataaatagggtaattgctgaggtgtgcggtttatctttgagatgataaagctaaattatagtcttttgccagagaaactgaggtaactgtcattagaaaaggtttcttaaaatactcacaaagctgttattggcttcttaacttctaaaatttggggggtcttgcatttatttattatttatttatttatttatttagagacagagtctcaccctgttggccaggctggagtgcagtaagtggcacaatctcggctcactgcaacctccgcctccttggttccagcaattcttctgcctcagcctcccgagtagctgggactacaagcggctgccaccacacctggctatttttttttgtatttttagtagagacagggtttcgccatattggccaggctggtcttgaactcctgacctcgtgatccacccgcctcaccctcccaaaatgctgggattacaggcgtaagccactgcacctggcggggtcttgcttattttaaaagaaatattctgattcatattttaggactttttgtcaacgaaattggttttgatccctttgggtaccatttttattgttttatgtagaatgttagaaattaccactaatttacctggcagtgatgtcaaattgactgtaattagcaggtagaaaattatttgtattatattcatctgattcctatactggatgagcaaggagcatgcttcctttgggacattcttacagcagggtgtctctccaacagcccgacaggcctcatctttttggttggatacctttgaactccatggttacgtgttaggtccacatttgtgtttttttctagcctacctatagttgttggcctttttgcatataactctcgggtaatattttgaagcatgctgaccatccaggcatatagtattttcaagaaatgactgaggtaggggtgggggtcctggtccggctgatgggggtttgctcagcactgtgccagtggaagcaggtgtattgtgggcagttttgtcattgtcctcaagtccttcgcagacagtgcacagcctgctgtctgcagtcggccagaccaggctcctccccagcacactccctgtgggatggccgctgctcaggacacagtgggacaaagttgggttgataggatattttagattcattttacctttgacaagggcaggccttgaattgggagcagcagccacctggcctcactctggccacaggtgacacttggtccttgctgccacctgcttggggctatgtggctacggctacacaaaagcctgtgcaggttagaagacgactgtggtgtgcagtggtgctctgggagtggagacttcctctgttctcagagactcacccccagccctgaccctagaatttagggatagccaggaagtttctagtttgtgtaacctagaagggtcactttaataaaaattgttatgaactatagtattttagatgatgagtgacttattttaattccactttaacattttactgtgctgttaacttggaagacctgtttgaaattagtcttgatttcacactcatttaatctgctgagcacagggctgttgtcatttgtaaacgcaaacactgtggaggtacttctcgccatcagcttccttctttacaaaaccatcatttcaacatgaaaattatgtcagtttatagaaatatttattgttcaaggtctgtaattgtatttcaaaaacgatgtcgtattcaagttgtgaagggatttgttttgtcaaaaaattaaaaactcaatgtgtatgacgccactctgaagagtaggtgagcgctttgcagtcacagaaggtggcatctgactgcggctcatacaggtcaccctgaagggccacgtgcttttagcagttggctggaatgtgttcactaggttccgttatgtttggtaatatcatcttgaaaagtccctgtaatagatcaaggagactgcattccctgccctgaaggaatgtatttctaaggcaaataggcaacttggtactatcttattctgagtagagagtggagaaagtattttcagactgaagaaaactttgaaaagtcaggagctaagctgctcggagctcagtgccgcagcatggctgtggtggacgcgggaaacaacgggaaagttcttgacagagtctgtgtccgctcagtccctgcacttttcctttccaaatgcatctcgttggatatggaatagatcgtagatgttgtagactgagatttgggactatgttgggaccgtacaggtgaatgtgccacctccacaaatggcttctccgagtgagtcacgtcacctggtgcgtggaggtggagcctgcggctggagtaaggcttgctgtgggacgccctcgtactttgctctccttgcgggtggttgccgagccgagagcattggatcctccccgactgtggctagttgtctgtccggtggctgggagggggtgtggtgggaaaaagtcggaatctctgcaatctgtgtcatggactgtactattgtaaggtctatattctgtatgtgggtcccagaccctgatcaggaaatgagcctcatgtgtgtcgttaacatttatatatttccattcaaaatatgtattcagtgtttatttcctcaaaacagactttgttaatgtaggaaatctctccaagtggaaacgtgctaactttttctgtaaatctgaaataaaaggtgctgttccttcctctg

SEQ ID NO: 287487 - DNA, 8568 bp, Artificial Sequence
  derived and/or modified sequence
cagctgtctgcttttctgtggagactgcgggttgcagacaccagcagccccctattgctgcacgtcaggtgtcctccacctcagtactgtggacatctcgggccgcatagccctgttgcgcgggcatcctgtgcgttgcaggagatgcagcagcatccatgaccgcaacccatcagagtgttctaagaacggaagcatctgggctggatggaatttagcatcaagcagagtcccctttctgttcagagtgttgtaaagtgcataaagatgaagcaggcaccagaaatcctcggcagtgccaacgggaagactccgagctgcgaggtgaaccgcgagtgttctgtgttcctcagcaaagcccagctctccagtagcctgcaggagggggtcatgcagaagtttaacggccacgacgccctgccctttattccagccgacaagctgaaagatcttacttcccgggtgtttaatggagaacccggcgcacacgatgccaaactgcgttttgagtcccaggaaatgaaagggattgggacaccccctaacactacccctatcaaaaatggctctccagaaattaagctgaaaatcaccaaaacatacatgaatgggaagcctctctttgaatcttccatttgtggtgacagtgctgctgatgtgtctcagtcagaagaaaatggacaaaaaccagaaaacaaggcgagaaggaacaggaagaggagcataaaatatgactccttgctggagcagggccttgtcgaagcagctcttgtgtctaagatctcaagtccttcagataaaaagattccagctaagaaagagtcttgtccaaacactggaagagacaaagaccacctgttgaaatacaacgttggtgatttggtgtggtccaaagtgtcgggttacccttggtggccttgcatggtttctgcagatccactccttcacagctataccaaacttaaaggtcagaaaaagagtgcacgccagtatcacgtacagttctttggtgacgccccagaaagagcttggatatttgagaagagcctcgtagcttttgaaggagaaggacagtttgaaaaattatgccaggaaagtgccaagcaggcacccacgaaagctgagaaaattaagctattgaaaccaatttcagggaaattgagggcccagtgggaaatgggcattgttcaagcagaagaagctgcaagcatgtcagtggaggagcggaaagccaagttcacctttctctatgtgggggaccagcttcatctcaaccctcaagtagccaaggaggctggcattgctgcagagtctttgggagaaatggcagaatcctcaggagtcagtgaagaagctgctgaaaaccccaagtctgtgagagaagagtgcattcccatgaagagaaggcggagggccaaactgtgtagctctgcagagaccctggagagtcaccccgacatagggaagagtactcctcaaaagacggcagaggctgaccccagaagaggagtagggtctcctcctgggaggaagaagaccacagtctccatgccacgaagcaggaagggagatgcagcatcccagtttttggtcttctgtcaaaaacacagggatgaggtggtagctgagcacccagatgcttcaggtgaggagattgaagagctgctcaggtcacagtggagtctgctgagtgagaagcagagagcacgctacaacaccaagtttgccctggtggcccctgtccaggctgaagaagactctggtaatgtaaatgggaaaaaaagaaaccacacaaagaggatacaggaccctacagaagatgctgaagctgaggacacacccaggaaaagactcaggacggacaagcacagtcttcggaagagagacacaatcactgacaaaacggccagaacaagctcttacaaggccatggaggcagcctcctcgctcaagagccaggcagcaacgaaaaatctgtctgatgcatgtaaaccactgaagaagcgaaatcgggcttccacggcagcatcttcagctcttgggtttagcaaaagttcatctccttctgcatccttaactgagaatgagcttttgtgggagcccacaccagtcaagttggatttgaacccagctgctctgtactgcacttagaatgatgtaatattccaggatgctgctgcaggtggcgtatcatcgtacacactcagtgacatttctatcacaatcattttatggaagatgtgtgataatctgtttttactggtattaataaacacatacaatgaagaaaacagataacaaattttaagaccaaggtaagataactaatcaaggccatttaatccgtcacattcatctcataatagaaacacgttcatattccagtggtcaatgtagatttcaagttgaaaggcagtccctttagttgggggctgtccagagctgcagcagggctttgcacggaaggggtggccctgttagagttgcttctcctctagtttgtaacttactggacttttgtggaaaatatcagcgtcgctaccctcagaaacaaactaacagcacacgttaggaggagtcctcatcagctgttctcattgccagtgagatatattcagtattgtagatactacactaatttccaacataagaggcaggaagagttttgattctatccttttttactaaacagttttattatgacactagatacagtaaatttttagaaaaaaataccatttacagtattattgtgaaccatttaacccttttgatccaaggccccggaccaaggggatactgtaatcaggttatgtacaccaacctctgcatcagttgcttctatagagcatcagccctcatgtttcattgtcttaatgtcggggagcagcctggtgtcctgccccaggtgtccgcatttttgcatggtaaggaaaaggcttacttgcccttcagctcataaaagcagaaggtgtgctattcacagtaccatgcgagtagcccacagttaattcccggcagattctttggctgtgttttatctttaatgaacgtttctgactaatattttgttgtaaaccattaagtaatgtaacgcatgtaagatgcttagggtgcctggccaggactccgtggtttcctgttgtgacagtaataatggttataataataaaaatgataaaattgccatcattctatttttatccaaaagtataaattttgctttggcatgaaaagtggtcctcttgactgcattatgcatgcgaggatgaaataaacctagaagtggcagaacactggatttgtgtgtgtggcgctttagggtgctggactgtatggctgagggctggttgggttcctctattggctctgctcaaatgttgcaggatacatagccccaaagatggtctaggagcaatctaagctgtgttactccaaaggacatgaaaaagctcaagagtaaaattaaaattctcaaaaaaaaaccccacgaaatttaaagatggggaaaaaaagatggtataaaaatggctctggttcaataagcagtcacccaaagtaaagactctatcttgaaaggcttttggtgaaaatgaagggatttcatttgaaattacagcatgatgaattttgcatgggtggccagccagctagcccataactgatagatgcattagaagtcagccagcgcataggtgctccctctatattatggagaaagcaaaaccctgcaaatgaccaaatggtgtccaaagagcagcatgacattggcatcagctgaataaccaggggcacatgggggaacgtggatgggaatgatagtgtatctcagcggggggtggggtgacatcgttccctggggacattgggaaggtgggcaggggcaagtgaactcagcactctgcagtgagagggacagtcccatgtgtggcagcattgtcccacttcagatgccaggagtgggctcatcctagaggagcggagttttccgagaggaccatctcctggtttcctgaaggaggtgggtggaaacggctcttgtttgaaagaacttagggaggaccattggcttgccaagagtacagaaattcattatgctgctaatttaacgtggaattccttcatttcataagaacctcaaaataatggtgatacattctagccttaagacatttgaattgccggttgttgaggtgaattttgtttgtcatacatggaaccattttagtcccatttgactcacttcagaccatcttccacacactatgtctgtgcttggagaggggaggtggctctccagtgtaaaacttgaggcattcactagaggtgaaaacttgtcagaatatataaaagcttagattgtagctgttctaaaaacgtaagtactccattgtaatagggtggcatcttcaggtagtgcacatattggcaatagaggtcctgaattgtttttctaagactgatctgagagccattgggccatcaagcctttatatatctgcttctaaaattgccccacctgctctagatggatctttgggcctttcctcagtgttcatgcaaaaattaaatgtcttttttcagcatactgactccaggtgtagttacatctcagtgctgtcttgagtatatattttatctcttatacctgtatctcccaactagaaacagctccagtgtttttaagagaatgtttcttaaaaccaataggaaacttaagcgaggtttcatgacacaacctttcatgtcgtgaaaggcagagggtgactgtgtgtgatgtgcagagtccttggacaggagtcgggggctcctctgtcccactgctgcttcttgagtgggtggagtggtgcttagaggatctccgagaggtccccgcagctctagggagatctgattttgtgttttttgtttaagtacttcacacagaagcctaggtagatttaaaatggggtgctcagggactggggaacaagacggggtggggtggggagatgggcatttggagagtctcatgtagctggagacgttaagagctgagcacaccacaggaaaggagggaggatgctgtgtgagagccatgctgtcaggagcaagcttgctgctcctgtgctgccctggccctggccttgcttgcccatggtgtgtgtgtccagaggtgtgtgtgaggctgccagaacaagtgctgggtctgtcacagagaagtttaaaaaagaaaactaagattataaattagcatctagttccaaaaccaaaaaaagtgcctgtggatgtatataaaattaagatgataagaaagtgctcctgagaaggctcttgccagaagcctgatgtgagtgtgtggcacctgtgatggcagggctgtgagctgggcttctgtcctcctctgtgtcccggcatggaagccagtataagcatttccaaatgagggaaaagtccttggctcgtttgatccagttgagttgaaagggttgccttggcagcagaggctcctctgatggctgacatcagtcactgcgtctgggcctgagacgtgcatggagggctgtaaagccacggattcccctcgctggagaggctcctgtctgatagcggtagatgaaaaataaggtcgttatgactttggcaacttgcttcatttctttttcatttgacttacaacacacttctctaacatctagcccttttaaatttttaattaatttcaaagcttcctctggccaggtagacttttgtatacagaccaggtgagagcccttttgccttagtgtgaaaatgtaacattttatgcttttaaaatcaatagattcatcaccttagttttttaaaaaaaatctataaatagggtaattgctgaggtgtgcggtttatctttgagatgataaagctaaattatagtcttttgccagagaaactgaggtaactgtcattagaaaaggtttcttaaaatactcacaaagctgttattggcttcttaacttctaaaatttggggggtcttgcatttatttattatttatttatttatttatttagagacagagtctcaccctgttggccaggctggagtgcagtaagtggcacaatctcggctcactgcaacctccgcctccttggttccagcaattcttctgcctcagcctcccgagtagctgggactacaagcggctgccaccacacctggctatttttttttgtatttttagtagagacagggtttcgccatattggccaggctggtcttgaactcctgacctcgtgatccacccgcctcaccctcccaaaatgctgggattacaggcgtaagccactgcacctggcggggtcttgcttattttaaaagaaatattctgattcatattttaggactttttgtcaacgaaattggttttgatccctttgggtaccatttttattgttttatgtagaatgttagaaattaccactaatttacctggcagtgatgtcaaattgactgtaattagcaggtagaaaattatttgtattatattcatctgattcctatactggatgagcaaggagcatgcttcctttgggacattcttacagcagggtgtctctccaacagcccgacaggcctcatctttttggttggatacctttgaactccatggttacgtgttaggtccacatttgtgtttttttctagcctacctatagttgttggcctttttgcatataactctcgggtaatattttgaagcatgctgaccatccaggcatatagtattttcaagaaatgactgaggtaggggtgggggtcctggtccggctgatgggggtttgctcagcactgtgccagtggaagcaggtgtattgtgggcagttttgtcattgtcctcaagtccttcgcagacagtgcacagcctgctgtctgcagtcggccagaccaggctcctccccagcacactccctgtgggatggccgctgctcaggacacagtgggacaaagttgggttgataggatattttagattcattttacctttgacaagggcaggccttgaattgggagcagcagccacctggcctcactctggccacaggtgacacttggtccttgctgccacctgcttggggctatgtggctacggctacacaaaagcctgtgcaggttagaagacgactgtggtgtgcagtggtgctctgggagtggagacttcctctgttctcagagactcacccccagccctgaccctagaatttagggatagccaggaagtttctagtttgtgtaacctagaagggtcactttaataaaaattgttatgaactatagtattttagatgatgagtgacttattttaattccactttaacattttactgtgctgttaacttggaagacctgtttgaaattagtcttgatttcacactcatttaatctgctgagcacagggctgttgtcatttgtaaacgcaaacactgtggaggtacttctcgccatcagcttccttctttacaaaaccatcatttcaacatgaaaattatgtcagtttatagaaatatttattgttcaaggtctgtaattgtatttcaaaaacgatgtcgtattcaagttgtgaagggatttgttttgtcaaaaaattaaaaactcaatgtgtatgacgccactctgaagagtaggtgagcgctttgcagtcacagaaggtggcatctgactgcggctcatacaggtcaccctgaagggccacgtgcttttagcagttggctggaatgtgttcactaggttccgttatgtttggtaatatcatcttgaaaagtccctgtaatagatcaaggagactgcattccctgccctgaaggaatgtatttctaaggcaaataggcaacttggtactatcttattctgagtagagagtggagaaagtattttcagactgaagaaaactttgaaaagtcaggagctaagctgctcggagctcagtgccgcagcatggctgtggtggacgcgggaaacaacgggaaagttcttgacagagtctgtgtccgctcagtccctgcacttttcctttccaaatgcatctcgttggatatggaatagatcgtagatgttgtagactgagatttgggactatgttgggaccgtacaggtgaatgtgccacctccacaaatggcttctccgagtgagtcacgtcacctggtgcgtggaggtggagcctgcggctggagtaaggcttgctgtgggacgccctcgtactttgctctccttgcgggtggttgccgagccgagagcattggatcctccccgactgtggctagttgtctgtccggtggctgggagggggtgtggtgggaaaaagtcggaatctctgcaatctgtgtcatggactgtactattgtaaggtctatattctgtatgtgggtcccagaccctgatcaggaaatgagcctcatgtgtgtcgttaacatttatatatttccattcaaaatatgtattcagtgtttatttcctcaaaacagactttgttaatgtaggaaatctctccaagtggaaacgtgctaactttttctgtaaatctgaaataaaaggtgctgttccttcctctg

SEQ ID NO: 287488 - protein, 393 aa, Artificial Sequence
  derived and/or modified sequence
MLPLECQYLNKNALTTLAGPLTPPVKHFQLKRKPKSATLRAELLQKSTETAQQLKRSAGVPFHAKGRGLLRKMDTTTPLKGIPKQAPFRSPTAPSVFSPTGNRTPIPPSRTLLRKERGVKLLDISELDMVGAGREAKRRRKTLDAEVVEKPAKEETVVENATPDYAAGLVSTQKLGSLNNEPALPSTSYLPSTPSVVPASSYIPSSETPPAPSSREASRPPEEPSAPSPTLPAQFKQRAPMYNSGLSPATPTPAAPTSPLTPTTPPAVAPTTQTPPVAMVAPQTQAPAQQQPKKNLSLTREQMFAAQEMFKTANKVTRPEKALILGFMAGSRENPCQEQGDVIQIKLSEHTEDLPKADGQGSTTMLVDTVFEMNYATGQWTRFKKYKPMTNVS

SEQ ID NO: 287489 - DNA, 228 bp, Artificial Sequence
  derived and/or modified sequence
atgtaccccatctgcaccgtggtggtggacggcctgcccagcgagagcagcagcagcagctaccccggccccgtgagcgtgagcgagatgagcctgctgcacgccctgggccccgtgcagacctggctgggccaggagctggagaagtgcggcatcgacgccatgatctacaccagatacgtgctgagcctgctgctgcacgacagctacgactacgacctgcagtag

SEQ ID NO: 287490 - DNA, 228 bp, Artificial Sequence
  derived and/or modified sequence
atgtaccctatctgcactgtcgtggttgacggacttccatctgagagttcgagttctagctaccccggccctgtgtccgtcagtgagatgtctcttttgcacgctctgggccctgtgcagacttggttgggccaggaactcgaaaagtgcggcattgatgcaatgatctacactcgatacgtgctttcacttttgctgcacgattcctacgattacgacctgcagtag

SEQ ID NO: 287491 - DNA, 228 bp, Artificial Sequence
  derived and/or modified sequence
atgtaccccatctgcaccgtggtggtggatggcctgcccagcgagagcagcagcagcagctacccaggccctgtgtctgtgtctgagatgagcctgctgcacgccctgggccctgtgcagacctggctgggccaggagctggagaagtgtggcattgatgccatgatctacacccgctacgtgctgagcctgctgctgcatgacagctatgactatgacctgcagtag

SEQ ID NO: 287492 - DNA, 228 bp, Artificial Sequence
  derived and/or modified sequence
atgtaccccatctgcaccgtggtggtggacggcctgcccagcgagtcttcatctagttcttatcccgggcccgttagcgtctccgagatgagcctcctccacgccctgggaccagtccagacatggttgggccaggaacttgagaagtgcggcattgacgctatgatctatacgcgttacgtgctctctcttctgctgcatgactcatatgactacgacctccaatag

SEQ ID NO: 287493 - DNA, 228 bp, Artificial Sequence
  derived and/or modified sequence
atgtacccaatctgcactgtggttgtcgacggccttccaagtgaaagtagttcctccagctaccccggacctgtatcagtgtccgagatgtcactgttgcatgctctaggacccgtgcagacctggttgggtcaggagctggaaaaatgtggaatcgatgcaatgatctacacccgatacgttttgagcttgcttctgcacgactcctacgactatgatctgcagtag

SEQ ID NO: 287494 - DNA, 700 bp, Artificial Sequence
  derived and/or modified sequence
ggccagttgccgggtaacggagcggagcggctcccggcgcgccgcctcccgccctccgcggagtggcgctggggccgccgccgccgctttacgtaaggcgcaggccagggccgcccggcgctcggcagccgcccgcagcccctcggagccagaggagaggcgcccccgccggccgccgcgccgcccggcagcctcggcaggttctgccggagacttccatttggcctcaatgtgaaattaaagtagaaaatcacatctacatgcatgttgctatcaggatgttgattcattagtcatgcctgaagagggaaagtctgttttaggtggctgactaccagcaaaaataaatgcttatcctacatgtcaagcatctctactttttactggagtgaaaatcccctccagataccaacagaatatcaactgcagaaaatgcttcacattttaaggatgtcggcaacctaaattcatgtaccctatctgtacagttgttgtggatggtttgccatctgaaagctcctcaagttcttatccaggccctgtgtctgtttctgaaatgtctctgcttcatgctttgggtccagtgcagacctggctgggacaagagctcgagaaatgtggcattgatgccatgatttacactcggtatgtcctcagtcttctgctgcatgacagctatgactacgacctgcaggaacag

SEQ ID NO: 287495 - DNA, 432 bp, Artificial Sequence
  derived and/or modified sequence
atgaggaactatttgaaggagagaggggatcagacagtactgattttgcatgctaaagtcgcacagaagtcctatgggaatgaaaagcgcttcttctgcccccccccatgcgtctatctgatggggagtggctggaaaaagaagaaagagcagatggaaagggacgggtgttcagagcaggaaagccagccatgtgccttcattggtataggcaactctgaccaggaaatgcaacaactgaatctggagggcaagaattactgtacagccaagaccctgtatataagtgatagcgacaagcgaaaacacttcatgctgagtgtaaagatgttctatggcaactccgatgacattggggtctttctttctaagagaatcaaggtgatcagcaagccaagtaagaagaagcaatctctcaaaaatgcagactag

SEQ ID NO: 287496 - DNA, 474 bp, Artificial Sequence
  derived and/or modified sequence
atgcggaactacttaaaagagcgcggcgatcagactgtcctgattctgcacgctaaggtggctcagaagagctatggaaacgaaaagagattcttttgtcctccaccatgcgtttacctgatgggttccggatggaagaagaaaaaggagcagatggaaagagacggatgttcagagcaagagagtcagccctgtgcttttatcggaattggtaattctgatcaggagatgcagcagctgaatctggaagggaaaaactattgtactgctaagactctatatatttccgatagcgacaagcggaaacatttcatgctgtcggtgaaaatgttttatggcaattcagacgacattggtgttttcttgtcaaagaggatcaaggttatttcaaaaccatcaaagaagaagcaatcactgaaaaacgctgacctgtgtattgcttcgggcacaaaggttgcactgtttaaccgctag

SEQ ID NO: 287497 - DNA, 570 bp, Artificial Sequence
  derived and/or modified sequence
atgaggaactacctcaaggaacgtggcgaccagacggtcttaatactccatgcaaaagtcgcccagaagtcttacgggaacgaaaaacggttcttttgccctcccccgtgcgtttatctgatgggttcaggctggaagaagaaaaaggagcagatggagcgtgatggctgctcggaacaggaaagtcagccctgtgcattcataggaatcggcaactctgatcaagagatgcagcagcttaatctggaggggaaaaactactgcactgctaagaccctgtatatcagcgattccgacaaacgcaaacattttatgctcagcgtcaagatgttctacgggaactctgacgacataggagtgtttctgtctaagcgcatcaaagtgatcagcaaaccatcgaaaaaaaagcagagtctgaaaaatgccgatttatgcattgcgtccggcacgaaggttgccctttttaatcgtctaagatcacagactgtctccacaaggtatttgcacgtcgagggcggcaacttccacgcttcatctcagcagtggggggctttctttatccacctctag

SEQ ID NO: 287498 - DNA, 432 bp, Artificial Sequence
  derived and/or modified sequence
atgaggaactacctgaaggagcggggggaccagacagtgctgatcctgcacgccaaggtggcccagaagagctatggaaatgagaagcgcttcttctgccccccaccctgtgtgtacctgatgggcagcggctggaagaagaagaaggagcagatggagagagatggctgcagcgagcaggagagccagccctgtgccttcatcggcatcggcaacagcgaccaggagatgcagcagctgaacctggagggcaagaactactgcacagccaagaccctgtacatcagtgacagcgacaagaggaagcacttcatgctgtctgtgaagatgttctacggcaacagtgatgacatcggggtcttcctgagcaagaggatcaaggtgatcagcaagcccagcaagaagaagcagagcctgaagaatgctgactag

SEQ ID NO: 287499 - DNA, 474 bp, Artificial Sequence
  derived and/or modified sequence
atgaggaactacctgaaggagcggggggaccagacagtgctgatcctgcacgccaaggtggcccagaagagctatggaaatgagaagcgcttcttctgccccccaccctgtgtgtacctgatgggcagcggctggaagaagaagaaggagcagatggagagagatggctgcagcgagcaggagagccagccctgtgccttcatcggcatcggcaacagcgaccaggagatgcagcagctgaacctggagggcaagaactactgcacagccaagaccctgtacatcagtgacagcgacaagaggaagcacttcatgctgtctgtgaagatgttctacggcaacagtgatgacatcggggtcttcctgagcaagaggatcaaggtgatcagcaagcccagcaagaagaagcagagcctgaagaatgctgacctgtgcatcgccagcggcaccaaggtggccctcttcaacagatag

SEQ ID NO: 287500 - DNA, 570 bp, Artificial Sequence
  derived and/or modified sequence
atgaggaactacctgaaggagcggggggaccagacagtgctgatcctgcacgccaaggtggcccagaagagctatggaaatgagaagcgcttcttctgccccccaccctgtgtgtacctgatgggcagcggctggaagaagaagaaggagcagatggagagagatggctgcagcgagcaggagagccagccctgtgccttcatcggcatcggcaacagcgaccaggagatgcagcagctgaacctggagggcaagaactactgcacagccaagaccctgtacatcagtgacagcgacaagaggaagcacttcatgctgtctgtgaagatgttctacggcaacagtgatgacatcggggtcttcctgagcaagaggatcaaggtgatcagcaagcccagcaagaagaagcagagcctgaagaatgctgacctgtgcatcgccagcggcaccaaggtggccctcttcaaccggctgcggagccagacagtgtccacccgctacctgcacgtggagggcggcaacttccacgccagcagccagcagtggggcgccttcttcatccacctgtag

SEQ ID NO: 287501 - DNA, 432 bp, Artificial Sequence
  derived and/or modified sequence
atgcggaactacctgaaggagcggggcgaccagaccgtgctgatcttgcatgccaaggttgcacaaaagtcctacggcaacgagaagcgcttcttctgcccacccccgtgtgtttatctgatgggctctggctggaagaagaaaaaggaacagatggagcgagacggctgttcagagcaggaaagccagccctgtgcctttataggcataggtaacagcgatcaggagatgcagcagctgaacctcgaaggcaagaattattgcacagccaagacattatacattagcgactccgacaaacgcaagcacttcatgctgtcagtaaaaatgttttatggaaacagcgatgatattggggtgtttctcagcaagcggatcaaagtgatttctaagccaagtaagaagaagcaatctctgaaaaatgcagattag

SEQ ID NO: 287502 - DNA, 474 bp, Artificial Sequence
  derived and/or modified sequence
atgcggaactacctgaaggagcggggcgaccagaccgtgctgatcctacacgccaaagttgcacagaaaagctatggaaatgagaagcggttcttctgtcccccaccttgcgtgtatttgatggggtcagggtggaagaagaaaaaagagcaaatggaacgggacggctgtagcgagcaggaaagtcagccctgcgcattcatcgggatcggaaacagtgaccaggagatgcaacaattgaacctcgaaggcaagaactattgtaccgctaagaccctgtacatttcagattctgacaagcggaaacactttatgttaagcgtcaaaatgttttatggcaattccgacgacattggcgtgttcctctccaagcgtattaaagtgataagcaagccaagtaagaaaaagcaatccctgaaaaatgctgacctatgtatcgccagtggcactaaggtagccctgtttaaccgctag

SEQ ID NO: 287503 - DNA, 570 bp, Artificial Sequence
  derived and/or modified sequence
atgcggaactacctgaaggagcggggcgaccagaccgtgctgatcctgcacgccaaggtagcgcagaaaagttatggaaacgagaagcggttcttttgccctcctccatgcgtgtacctgatgggaagcgggtggaagaagaagaaggagcagatggaaagggacgggtgctctgagcaggaaagtcagccctgtgcctttatcggcattggcaactccgatcaagaaatgcagcaacttaatctcgaggggaagaattattgtactgccaaaactttgtatatcagtgactctgacaaacggaagcactttatgttgtctgtaaagatgttctacgggaattccgacgacataggagtcttcctctcaaaaaggattaaggtgatttccaaaccgagtaagaaaaagcagagcctcaaaaacgccgacctctgcatcgccagtggcacaaaggttgccctcttcaacaggctaaggtcccagactgtctcgacaaggtatctgcacgtggagggaggcaattttcacgcgtcaagccagcagtggggtgcgttcttcattcatctgtag

SEQ ID NO: 287504 - DNA, 432 bp, Artificial Sequence
  derived and/or modified sequence
atgcgcaattatttgaaagagcgcggagatcagaccgttctcatcctgcacgccaaggtcgcccaaaagtcttacggaaacgagaagcgctttttttgtccacctccgtgcgtctatttgatgggatcaggatggaaaaagaaaaaagagcagatggagagagacgggtgcagcgaacaggagtctcagccttgtgcttttattggaatcggtaactccgatcaggagatgcagcagttgaatctagaaggcaagaattactgtacagcaaagactctatacatctccgactcagataagagaaagcacttcatgctttccgtgaaaatgttttacggaaacagcgacgacatcggagtctttctgtctaaaagaatcaaggtgatttctaagccatcaaaaaagaagcagtctttgaaaaatgcagactag

SEQ ID NO: 287505 - DNA, 474 bp, Artificial Sequence
  derived and/or modified sequence
atgagaaattatcttaaagagcggggagaccaaaccgtgctgattctacatgcgaaggttgcccaaaaatcctacgggaacgagaagcgatttttctgtccgcctccttgtgtctacctgatgggaagcggatggaagaaaaaaaaggaacagatggagcgtgacggctgtagtgagcaggagagccaaccgtgcgcattcatcggcattggtaactcagaccaggagatgcagcagctgaatcttgaaggcaagaactactgtactgccaagaccctttatatcagtgacagcgacaagcgtaaacactttatgctgtccgtcaaaatgttttacggaaacagtgacgacattggtgtctttctctcaaaacggataaaagtgatatctaaacccagtaagaagaagcagtcacttaaaaacgccgatctgtgcatcgcctccggtacgaaggttgctttattcaatcgctag

SEQ ID NO: 287506 - DNA, 570 bp, Artificial Sequence
  derived and/or modified sequence
atgcgaaattacttgaaggagaggggtgatcaaactgtcctgattctgcatgcaaaagtggcccagaaatcatatggcaacgaaaagagatttttttgtcctcctccgtgtgtgtatttgatggggagcgggtggaagaagaaaaaagaacagatggagcgggatggctgctctgaacaggagtctcaaccctgcgccttcatcggaattgggaacagtgaccaggagatgcaacaactcaacctagagggcaagaactattgcaccgctaaaacgctgtacatctccgattctgataagcgtaaacactttatgctatctgtcaagatgttctatggcaactcagacgacataggggtgttccttagcaaaaggattaaggtcatatcaaagccttcaaaaaaaaaacagagcctcaagaatgcagacctctgcattgctagcgggacgaaggtggcactgttcaacaggttaaggagccagactgtatctacacggtacctccacgttgaggggggaaacttccacgcatctagtcaacagtggggtgcattctttatccacctgtag

SEQ ID NO: 287507 - DNA, 432 bp, Artificial Sequence
  derived and/or modified sequence
atgagaaactacctgaaggagagaggcgaccagaccgtgctgatcctgcacgccaaggtggcccagaagagctacggcaacgagaagagattcttctgcccccccccctgcgtgtacctgatgggcagcggctggaagaagaagaaggagcagatggagagagacggctgcagcgagcaggagagccagccctgcgccttcatcggcatcggcaacagcgaccaggagatgcagcagctgaacctggagggcaagaactactgcaccgccaagaccctgtacatcagcgacagcgacaagagaaagcacttcatgctgagcgtgaagatgttctacggcaacagcgacgacatcggcgtgttcctgagcaagagaatcaaggtgatcagcaagcccagcaagaagaagcagagcctgaagaacgccgactag

SEQ ID NO: 287508 - DNA, 474 bp, Artificial Sequence
  derived and/or modified sequence
atgagaaactacctgaaggagagaggcgaccagaccgtgctgatcctgcacgccaaggtggcccagaagagctacggcaacgagaagagattcttctgcccccccccctgcgtgtacctgatgggcagcggctggaagaagaagaaggagcagatggagagagacggctgcagcgagcaggagagccagccctgcgccttcatcggcatcggcaacagcgaccaggagatgcagcagctgaacctggagggcaagaactactgcaccgccaagaccctgtacatcagcgacagcgacaagagaaagcacttcatgctgagcgtgaagatgttctacggcaacagcgacgacatcggcgtgttcctgagcaagagaatcaaggtgatcagcaagcccagcaagaagaagcagagcctgaagaacgccgacctgtgcatcgccagcggcaccaaggtggccctgttcaacagatag

SEQ ID NO: 287509 - DNA, 570 bp, Artificial Sequence
  derived and/or modified sequence
atgagaaactacctgaaggagagaggcgaccagaccgtgctgatcctgcacgccaaggtggcccagaagagctacggcaacgagaagagattcttctgcccccccccctgcgtgtacctgatgggcagcggctggaagaagaagaaggagcagatggagagagacggctgcagcgagcaggagagccagccctgcgccttcatcggcatcggcaacagcgaccaggagatgcagcagctgaacctggagggcaagaactactgcaccgccaagaccctgtacatcagcgacagcgacaagagaaagcacttcatgctgagcgtgaagatgttctacggcaacagcgacgacatcggcgtgttcctgagcaagagaatcaaggtgatcagcaagcccagcaagaagaagcagagcctgaagaacgccgacctgtgcatcgccagcggcaccaaggtggccctgttcaacagactgagaagccagaccgtgagcaccagatacctgcacgtggagggcggcaacttccacgccagcagccagcagtggggcgccttcttcatccacctgtag

SEQ ID NO: 287510 - protein, 198 aa, Artificial Sequence
  derived and/or modified sequence
MKLSKKDRGEDEESDSAKKKLDWSCSLLVASLAGAFGSSFLYGYNLSVVNAPTPYIKAFYNESWERRHGRPIDPDTLTLLWSVTVSIFAIGGLVGTLIVKMIGKVLGRKHTLLANNGFAISAALLMACSLQAGAFEMLIVGRFIMGIDGGVALSVLPMYLSEISPKEIRGSLGQVTAIFICIGVFTGQLLGLPELLGK

SEQ ID NO: 287511 - DNA, 597 bp, Artificial Sequence
  derived and/or modified sequence
atgaaactgagtaagaaggacagaggcgaggacgaagagagcgactcggctaagaagaagctggattggagctgttctcttctggtcgcttccctagccggggcctttgggtcttccttcctgtatggatacaacctctccgttgtaaatgcgcctaccccctatattaaggctttctataacgaaagctgggaacggcggcacggccgtcctatcgatccagatacccttacgctcctgtggtccgtgacagtctccatcttcgcgattggcggtcttgtggggacgctgatcgtcaaaatgattggcaaggtgctgggacggaagcacacactgttggcaaacaatggattcgcaatttccgcagcccttcttatggcgtgttcccttcaggctggcgcttttgaaatgctgatcgtggggaggtttatcatgggcattgatggaggagtcgctctgtctgtgctgcccatgtatctctctgagattagtcccaaggagatcagggggtctttgggccaagtcaccgcaatattcatttgtataggtgtctttactggccagctcctcggcctccctgaactgctcggcaagtag

SEQ ID NO: 287512 - DNA, 597 bp, Artificial Sequence
  derived and/or modified sequence
atgaagctgagcaagaaggacagaggagaagatgaggagagtgacagcgccaagaagaagctggactggagctgcagcctgctggtggccagcctggccggggccttcggcagcagcttcctgtatggctacaacctgtctgtggtgaatgcccccaccccctacatcaaggccttctacaatgaatcctgggagcggcggcacggccggcccatcgaccctgacaccctgaccctgctgtggagcgtgacagtgtccatctttgccatcggcggcctggtgggcaccctcatcgtgaagatgattggcaaggtgctgggcaggaagcacaccctgctggccaacaacggctttgccatctctgctgccctgctgatggcctgcagcctgcaggccggggcctttgagatgctgattgtgggccgcttcatcatgggcattgatggcggcgtggccctgtctgtgctgcccatgtacctgtctgagatcagccccaaggagatccggggcagcctgggccaggtgacagccatcttcatctgcatcggggtcttcaccggccagctgctgggcctgcctgagctgctgggcaagtag

SEQ ID NO: 287513 - DNA, 597 bp, Artificial Sequence
  derived and/or modified sequence
atgaagctgagcaagaaggaccggggcgaggacgaggagagcgactcagcaaagaagaaactggactggagctgtagtctcctcgtagcctcgctggcgggggccttcgggtcctccttcctctacgggtacaatctgtcggtagtgaatgcccccaccccatatatcaaggctttctacaatgaatcctgggagagacggcatggtcgcccaattgatccggacactctcaccctgttgtggtcggttaccgttagtatctttgccatcgggggcctcgtgggaaccttgatcgtcaaaatgatcggaaaggtcttaggcagaaaacatacgttactggccaacaatggatttgccataagtgcagctttactgatggcttgttccctccaggccggagctttcgagatgctaattgtggggcgcttcataatgggcatcgatgggggggtggccctcagtgtgctgcctatgtatctttctgagatctctcccaaagaaattagagggtcccttggacaggtgacggcaatctttatttgtattggcgtgttcactgggcagctgctgggtttgcctgaattgctaggcaagtag

SEQ ID NO: 287514 - DNA, 597 bp, Artificial Sequence
  derived and/or modified sequence
atgaaactttcaaaaaaggacaggggtgaggatgaggaatctgattccgctaagaaaaaactggactggtcatgctctctgcttgtcgccagcttggcgggagcttttggtagctcctttctgtacggctataacttaagcgtggttaacgcgccaacaccatacattaaggccttctacaatgaatcatgggagcggaggcatggtcgacccatagacccggatacactgacgctcctgtggtctgtgactgtaagtatatttgcaattggcggactggtgggcacactaattgtgaagatgatcggaaaggtccttggaagaaagcacacccttctcgcgaacaacggatttgccattagtgctgctctactgatggcttgtagtcttcaggccggagcgtttgagatgctaattgtggggagattcataatgggcatcgacggaggggtggctctgtctgtgctgcccatgtacctgtcagaaataagcccaaaggagatccgcggttcgctcgggcaggtcaccgctattttcatctgtattggcgtgtttacaggacaattgctgggtttacccgaactgctgggcaagtag

SEQ ID NO: 287515 - DNA, 738 bp, Artificial Sequence
  derived and/or modified sequence
catggacatgaatgtgtggcttaaattacattgctgtgtgggcatgaatcagacgctctgcccatgaagagttctagcaccaagtcagtgcaagacccgaggtgaaacaataacaacaaaagttcaaaacctgaaaagtgaaccatgaagctcagtaaaaaggaccgaggagaagatgaagaaagtgattcagcgaaaaagaaattggactggtcctgctcgctcctcgtggcctccctcgcgggcgccttcggctcctccttcctctacggctacaacctgtcggtggtgaatgcccccaccccgtacatcaaggccttttacaatgagtcatgggaaagaaggcatggacgtccaatagacccagacactctgactttgctctggtctgtgactgtgtccatattcgccatcggtggacttgtggggacgttaattgtgaagatgattggaaaggttcttgggaggaagcacactttgctggccaataatgggtttgcaatttctgctgcattgctgatggcctgctcgctccaggcaggagcctttgaaatgctcatcgtgggacgcttcatcatgggcatagatggaggcgtcgccctcagtgtgctccccatgtaccttagtgagatctcacccaaggagatccgtggctctctggggcaggtgactgccatctttatctgcattggcgtgttcactgggcagcttctgggcctgcccgagctgctgggaaag

SEQ ID NO: 287516 - DNA, 597 bp, Artificial Sequence
  derived and/or modified sequence
atgaagctgagcaagaaggacagaggcgaggacgaggagagcgacagcgccaagaagaagctggactggagctgcagcctgctggtggccagcctggccggcgccttcggcagcagcttcctgtacggctacaacctgagcgtggtgaacgcccccaccccctacatcaaggccttctacaacgagagctgggagagaagacacggcagacccatcgaccccgacaccctgaccctgctgtggagcgtgaccgtgagcatcttcgccatcggcggcctggtgggcaccctgatcgtgaagatgatcggcaaggtgctgggcagaaagcacaccctgctggccaacaacggcttcgccatcagcgccgccctgctgatggcctgcagcctgcaggccggcgccttcgagatgctgatcgtgggcagattcatcatgggcatcgacggcggcgtggccctgagcgtgctgcccatgtacctgagcgagatcagccccaaggagatcagaggcagcctgggccaggtgaccgccatcttcatctgcatcggcgtgttcaccggccagctgctgggcctgcccgagctgctgggcaagtag

SEQ ID NO: 287517 - protein, 189 aa, Artificial Sequence
  derived and/or modified sequence
MVTQHGKPMFTKVCTEGRLILEFTFDDLMRIKTWHFTIRQYRELVPRSILAMHAQDPQVLDQLSKNITRMGLTNFTLNYLRLCVILEPMQELMSRHKTYNLSPRDCLKTCLFQKWQRMVAPPAEPTRQPTTKRRKRKNSTSSTSNSSAGNNANSTGSKKKTTAANLSLSSQVPIASIARSPVSGCALRT

SEQ ID NO: 287518 - protein, 441 aa, Artificial Sequence
  derived and/or modified sequence
MLTWVWYLIMTSVLQASVSSVDHSRFVNCVRFSPDGNRFATASADGQIYIYDGKTGEKVCALGGSKAHDGGIYAISWSPDSTHLLSASGDKTSKIWDVSVNSVVSTFPMGSTVLDQQLGCLWQKDHLLSVSLSGYINYLDRNNPSKPLHVIKGHSKSIQCLTVHKNGGKSYIYSGSHDGHINYWDSETGENDSFAGKGHTNQVSRMTVDESGQLISCSMDDTVRYTSLMLRDYSGQGVVKLDVQPKCVAVGPGGYAVVVCIGQIVLLKDQRKCFSIDNPGYEPEVVAVHPGGDTVAIGGVDGNVRLYSILGTTLKDEGKLLEAKGPVTDVAYSHDGAFLAVCDASKVVTVFSVADGYSENNVFYGHHAKIVCLAWSPDNEHFASGGMDMMVYVWTLSDPETRVKIQDAHRLHHVSSLAWLDEHTLVTTSHDASVKEWTITY

SEQ ID NO: 287519 - DNA, 1326 bp, Artificial Sequence
  derived and/or modified sequence
atgctgacctgggtgtggtacctgatcatgaccagcgtgctgcaggccagcgtgagcagcgtggaccacagcagattcgtgaactgcgtgagattcagccccgacggcaacagattcgccaccgccagcgccgacggccagatctacatctacgacggcaagaccggcgagaaggtgtgcgccctgggcggcagcaaggcccacgacggcggcatctacgccatcagctggagccccgacagcacccacctgctgagcgccagcggcgacaagaccagcaagatctgggacgtgagcgtgaacagcgtggtgagcaccttccccatgggcagcaccgtgctggaccagcagctgggctgcctgtggcagaaggaccacctgctgagcgtgagcctgagcggctacatcaactacctggacagaaacaaccccagcaagcccctgcacgtgatcaagggccacagcaagagcatccagtgcctgaccgtgcacaagaacggcggcaagagctacatctacagcggcagccacgacggccacatcaactactgggacagcgagaccggcgagaacgacagcttcgccggcaagggccacaccaaccaggtgagcagaatgaccgtggacgagagcggccagctgatcagctgcagcatggacgacaccgtgagatacaccagcctgatgctgagagactacagcggccagggcgtggtgaagctggacgtgcagcccaagtgcgtggccgtgggccccggcggctacgccgtggtggtgtgcatcggccagatcgtgctgctgaaggaccagagaaagtgcttcagcatcgacaaccccggctacgagcccgaggtggtggccgtgcaccccggcggcgacaccgtggccatcggcggcgtggacggcaacgtgagactgtacagcatcctgggcaccaccctgaaggacgagggcaagctgctggaggccaagggccccgtgaccgacgtggcctacagccacgacggcgccttcctggccgtgtgcgacgccagcaaggtggtgaccgtgttcagcgtggccgacggctacagcgagaacaacgtgttctacggccaccacgccaagatcgtgtgcctggcctggagccccgacaacgagcacttcgccagcggcggcatggacatgatggtgtacgtgtggaccctgagcgaccccgagaccagagtgaagatccaggacgcccacagactgcaccacgtgagcagcctggcctggctggacgagcacaccctggtgaccaccagccacgacgccagcgtgaaggagtggaccatcacctactag

SEQ ID NO: 287520 - DNA, 1326 bp, Artificial Sequence
  derived and/or modified sequence
atgctaacatgggtatggtacttaatcatgactagtgtcttacaagcatctgtctcttctgtcgatcattcccggttcgtcaactgcgtcaggttctctcccgacggaaataggtttgctacggccagtgccgacggacagatctatatttacgatggcaagacgggagagaaagtgtgtgcgctgggtggaagcaaggcccacgacggcggcatttatgctatttcatggagtccagacagcactcatctgctgagcgcatctggtgataagacctctaagatctgggacgtgtctgtgaactctgtggttagcacgtttcctatgggatctacagtgttggatcaacaactgggctgcctgtggcagaaggaccacctcctgagcgtgagtctctctgggtacatcaattatctggacaggaacaacccttccaagcccttacacgtcatcaaaggacactctaagtcgattcagtgccttacagtgcacaaaaacggcgggaaatcatacatttattcaggaagccacgacgggcatatcaactactgggattctgaaaccggtgagaacgacagttttgctggtaagggccatacaaaccaggtgtctcgaatgacagttgatgagtccggacaactgatctcctgcagcatggacgacacagtcaggtacactagtcttatgttacgagattattcagggcagggagtagtgaagctcgatgtacaacccaagtgtgtggccgtcgggccaggcggttatgcagtcgttgtctgcattggtcagattgtgctgctgaaggaccaaagaaaatgtttcagcatcgacaatcctggctacgagcccgaggttgtcgcagtgcacccaggaggtgacactgtggcgattggcggggtcgatggcaacgtgcgcctatattcaatcctgggcacaacgcttaaagacgaaggaaagctcctcgaggccaaaggccctgtgaccgacgtggcctattcccatgacggcgcatttctggccgtctgcgacgcatccaaggtggtgactgtttttagtgtggccgatggctactctgagaacaacgtgttctacggacatcatgccaagatcgtttgtcttgcttggagccctgataatgagcactttgcttccggaggcatggacatgatggtgtatgtctggaccctcagcgatccagaaacgagagtcaagattcaggatgcccatcgcctgcatcacgtgagttcgctcgcctggctggacgagcataccctcgtgaccacctctcatgatgcatcggtgaaggagtggacaatcacatactag

SEQ ID NO: 287521 - DNA, 1326 bp, Artificial Sequence
  derived and/or modified sequence
atgctgacctgggtgtggtacctgatcatgacctctgtgctgcaggcctctgtgtcctctgtggaccacagcagatttgtgaactgtgtgcgcttctccccagatggcaacagatttgccacagccagcgcagatggccagatctacatctatgatggcaagacaggagagaaggtgtgtgccctgggcggcagcaaggcccatgatggcggcatctatgccatctcctggagcccagacagcacccacctgctgagcgccagcggggacaagaccagcaagatctgggatgtgtctgtgaacagcgtggtgtccaccttccccatgggcagcacagtgctggaccagcagctgggctgcctgtggcagaaggaccacctgctgtctgtgtccctgagcggctacatcaactacctggacaggaacaaccccagcaagcccctgcacgtgatcaagggccacagcaagagcatccagtgcctgactgtgcacaagaatggaggcaagagctacatctacagcggcagccatgatggccacatcaactactgggacagcgagaccggggagaatgacagctttgctgggaagggccacaccaaccaggtgtccaggatgacagtggatgaaagtggccagctgatcagctgcagcatggatgacacagtgcgctacaccagcctgatgctgcgggactacagcggccagggcgtggtgaagctggatgtgcagcccaagtgtgtggccgtgggccctgggggctatgctgtggtggtgtgcatcggccagatcgtgctgctgaaggaccagaggaagtgcttcagcattgacaaccctggctatgagcctgaggtggtggccgtgcaccctggaggagacacagtggccatcggcggcgtggatggaaatgtgcggctgtacagcatcctgggcaccaccctgaaggatgagggcaagctgctggaggccaagggccctgtgacagatgtggcctacagccatgatggagccttcctggccgtgtgtgatgccagcaaggtggtgacagtgttttctgtggctgatggctacagtgaaaataatgtgttctacggccaccacgccaagatcgtgtgcctggcctggagcccagacaatgagcactttgccagcggcggcatggacatgatggtgtatgtgtggaccctgagtgaccctgagaccagggtgaagatccaggatgcccaccggctgcaccacgtgagcagcctggcctggctggatgagcacaccctggtgaccaccagccatgatgcctctgtgaaggagtggaccatcacctactag

SEQ ID NO: 287522 - DNA, 1326 bp, Artificial Sequence
  derived and/or modified sequence
atgctgacctgggtgtggtacctgatcatgaccagcgtgctgcaggccagtgtatcctccgtggaccattcaaggtttgtaaactgtgtgcggttcagccctgacggcaatcgcttcgccacagcttccgccgacggacagatatatatttatgacggaaaaaccggcgaaaaagtttgcgccctcggaggaagcaaggcccatgatgggggaatctacgccatcagctggagccccgacagcacacacttactgtccgcttccggcgataagacatcaaagatatgggacgtaagcgtgaattcggtggtgagcaccttcccgatggggtcaaccgtgctagatcaacagctcggttgcctatggcagaaggaccatcttttgtcggtatccttatcaggctatataaattacttggaccgaaataacccttcgaagcccctgcatgtgattaagggccattctaagtccatacagtgcctgaccgtgcataaaaatggcggaaagtcatacatttattctggctcacacgatggccatatcaattactgggactccgaaacaggagagaacgattcctttgccgggaaaggacacactaatcaagtgagtcggatgactgtcgatgagtctgggcagttaatctcttgttctatggacgacacagtgcgttatactagcctcatgttgagggattacagtgggcagggcgtcgtgaagcttgatgtgcagcccaagtgtgttgccgtcggccccggtgggtacgctgtggtggtgtgcataggccaaatcgtcttgctgaaagatcaacgtaaatgcttcagcattgataaccccggatacgagcccgaagtcgtggcagtccatcctggcggagataccgtggccattgggggggtggatggcaatgttaggctgtattcaatcctgggcactacactgaaggacgagggcaaattgcttgaagcaaagggccctgtaaccgatgtggcatactcccatgatggagctttcctcgctgtgtgcgatgccagcaaagtggtcacagttttttccgtggccgacggctattcagagaacaacgtgttctatggccatcacgcaaagattgtgtgcctcgcatggtccccagacaacgagcattttgcgagtggggggatggacatgatggtgtacgtgtggaccttgtctgacccagaaacccgcgtcaagatacaagatgctcaccggctgcaccacgtgtcctccctagcctggctggacgaacacaccttagtgacgactagtcacgacgcctccgtgaaggagtggacgatcacatattag

SEQ ID NO: 287523 - DNA, 1326 bp, Artificial Sequence
  derived and/or modified sequence
atgttgacatgggtatggtacctcataatgaccagtgttctacaagcaagtgtttccagtgttgatcatagtcgcttcgtcaattgcgtgcgatttagccctgacggtaatagattcgctaccgcttcagccgatggccagatatacatctatgatggcaagaccggggagaaggtgtgcgccctcggcggatctaaggcccacgacggtggaatctatgcaatcagctggagcccagacagcacccatctgttgtctgccagtggcgacaagacctctaagatctgggacgtgtcagtgaattcggtggtctctaccttccctatgggatctaccgtgctggaccagcagctgggctgcttgtggcagaaagaccatctgctttccgtctcactgtctgggtatataaattacctggatagaaacaatccaagtaagccactgcacgttattaaggggcactccaaatctatccagtgccttactgtgcacaagaatgggggaaagtcctacatttactcaggatcgcatgacggacacattaattactgggatagcgaaactggggagaatgatagctttgcaggaaaaggacacaccaatcaggtgtcacgaatgactgtagatgagtctggccagctgatctcctgcagcatggatgacaccgtacgttatacaagtttaatgctgcgggactacagtggacagggcgttgtgaagttagacgtgcagccgaagtgtgttgccgtgggtcccggtggatatgccgtggtcgtttgcataggacagatcgtcctccttaaggaccaacgcaaatgcttttctattgataaccccggttacgaaccggaggttgttgcggtccatcctggcggtgataccgtagctatcgggggtgtggatggtaatgtacggctgtattctatccttgggacgacattaaaggatgagggcaaactgctggaagccaaggggccagtgactgacgtggcgtactcccacgacggtgccttcctggctgtatgcgatgcaagtaaagtcgtgacagttttctcagtggcggatggctacagtgagaataacgtgttttacggccaccacgccaaaatcgtgtgtcttgcttggagccctgataacgagcactttgcaagcggaggaatggatatgatggtttacgtctggacactctcagatcctgaaacccgcgtgaagatccaggacgcacatcggttgcaccacgtctcatctttagcttggctggatgagcatactctagttacaactagtcacgacgccagcgtgaaggagtggactatcacttattag

SEQ ID NO: 287524 - DNA, 1411 bp, Artificial Sequence
  derived and/or modified sequence
gtgtgctggagacaggccagctggggcctgcagcgctctgtcgctctgtgatgttgacatgggtgtggtacttaattatgacctcagtgcttcaagcctcggtttcctcggtggaccacagccgctttgtcaactgtgtgcgattctctcctgatgggaacagatttgccacagccagtgctgacggccagatatacatctatgacgggaagactggggagaaggtgtgcgcgctgggcggaagcaaggcccacgacggtgggatttacgcaattagttggagtcccgacagcacccatttgctttctgcttctggggacaaaacttccaagatttgggacgtcagcgtgaactccgtggtcagcacatttcccatgggctccacggttctggaccagcagctgggctgcctatggcagaaggaccacctgctcagtgtctccctgtccgggtacatcaactatctggacagaaacaaccccagcaagcccctgcacgtcatcaagggtcacagtaaatcgatccagtgtctgacggtgcataaaaacggcggcaagtcctacatttactctgggagccacgacggacacattaattactgggattcagagacgggggagaacgactccttcgctgggaaaggccacacgaaccaggtgtccaggatgaccgtggatgagtcggggcagctcatcagctgcagcatggacgacaccgtgcggtacaccagcctcatgctgcgggactacagcggacaaggagttgtgaaactggacgttcagccaaagtgcgtagccgtcggccccgggggatacgccgtggtcgtgtgcattggacagattgtcctgctgaaggatcagaggaagtgcttcagcatcgacaaccccggctacgagcccgaagttgtggcagtgcaccccggcggggacacggtggcaattgggggtgtggacggcaacgtccgcctgtattccatcctgggcaccacgctgaaggatgagggcaagctcctagaggccaagggccccgtgaccgacgtggcctactcccacgacggcgccttcctcgcggtgtgcgacgccagcaaggtggtcacagtgttcagcgttgctgacggctactcggagaacaatgttttttatggacaccatgcaaaaatcgtctgcctggcctggtccccagacaatgaacactttgcctccggtggcatggacatgatggtgtatgtttggaccctgagtgacccggaaaccagagtcaagatccaagatgcacaccggctgcaccatgtcagcagcctggcctggctggacgagcacacgctggtcacgacctcccatgatgcctctgtcaaggagtggacaatcacctactgaggagccccacccccgcctctggatggaccgaatca

SEQ ID NO: 287525 - DNA, 2411 bp, Artificial Sequence
  derived and/or modified sequence
ccggccgagaccgagaaggtgttcgccagcctcccgcaggtggagaggggcgtctccaagatcatcggcggcgaccctaagggcaacaattttctgtacaccaatggaaagtgcgtcatcctaaggaacatcgacgaccacagccgctttgtcaactgtgtgcgattctctcctgatgggaacagatttgccacagccagtgctgacggccagtgtctgcctgctcccgtgactgctcagagccgcaggctgcctaatgctagtcctgacatgcagaacttagacatcgccctccccacatctgcagactcgtcgtcagagcccaagccacagtccatggagaaactgcctccgtggtcagcacatttcccatgggctccacggttctggaccagcagctgggctgcctatggcagaaggaccacctgctcagtgtctccctgtccgggtacatcaactatctggacagaaacaaccccagcaagcccctgcacgtcatcaagggtcacagtaaatcgatccagtgtctgacggtgcataaaaacggcggcaagtcctacatttactctgggagccacgacggacacattaattactgggattcagagacgggggagaacgactccttcgctgggaaaggccacacgaaccaggtgtccaggatgaccgtggatgagtcggggcagctcatcagctgcagcatggacgacaccgtgcggtacaccagcctcatgctgcgggactacagcggacaaggagttgtgaaactggacgttcagccaaagtgcgtagccgtcggccccgggggatacgccgtggtcgtgtgcattggacagattgtcctgctgaaggatcagaggaagtgcttcagcatcgacaaccccggctacgagcccgaagttgtggcagtgcaccccggcggggacacggtggcaattgggggtgtggacggcaacgtccgcctgtattccatcctgggcaccacgctgaaggatgagggcaagctcctagaggccaagggccccgtgaccgacgtggcctactcccacgacggcgccttcctcgcggtgtgcgacgccagcaaggtggtcacagtgttcagcgttgctgacggctactcggagaacaatgttttttatggacaccatgcaaaaatcgtctgcctggcctggtccccagacaatgaacactttgcctccggtggcatggacatgatggtgtatgtttggaccctgagtgacccggaaaccagagtcaagatccaagatgcacaccggctgcaccatgtcagcagcctggcctggctggacgagcacacgctggtcacgacctcccatgatgcctctgtcaaggagtggacaatcacctactgaggagccccacccccgcctctggatggaccgaatcagggactagagtttaactgcagcggaacatgtcatttctctatttctgtgacgcgcccccatgcccccaccccaccacaagaggcaggagggcccagtcatgaccctcgtctctgcagggtgtctgtacacgttcttctgaaagctttagacagtaacagtttgcacatgaaaaataaagcgagcacctaaacaatgtgtggagcataactaaaacccacagcccaaccaaaccttgagaatgcgaaacattccagaggcagtagcctccaaagcacacagagcccctggccccgccgcggctctcactatctgtcaggggaggttgtacaggtgaatgagccggggggctcatgttcctgcctgcagaacatttctgtactagtgagaagagggaatatgcattgcagttcagcaaagccggaattctgtgttgaacagatgtctgtctccctagtgtgtgactcacaccttgtggctgccttcagagcgccacctccagatcagatggggacacacaacccctggatatgtttcattgtcagattttgtgcttgattttaagaatggaattgtgggtatctttcctttttttttaatgtatcttaactgttgcctgtcagtgtttacaaactagtgcgttgacggcaccgtgtccaagtttttagaacccttgttagccagaccgaggtgtcctggtcaccgtttcaccatcatgctttgatgttcccctgtctttccctcttctgctctcaagagcaaaggttaatttaaggacaaagatgaagtcactgtaaactaatctgtcattgtttttaccttccttttctttttcagtgcagaaattaaaagtaagtataaagcaccgtgattgggagtgtttttgcgtgtgtcggaatcactggtaaatgttggctgagaacaatccctccccttgcacttgtgaaaacactttgagcgctttaagagattagcctgagaaataattaaatatcttttctcttc

SEQ ID NO: 287526 - DNA, 33 bp, Artificial Sequence
  derived and/or modified sequence
atgtcagaagtgctcccagccgatagtggctag

SEQ ID NO: 287527 - DNA, 84 bp, Artificial Sequence
  derived and/or modified sequence
atgtcggaggtgctgcctgcagactcgggcgttgacactctggctgtctttatggcctcctctggtactacagacgttacgtag

SEQ ID NO: 287528 - DNA, 33 bp, Artificial Sequence
  derived and/or modified sequence
atgtctgaggtgctgcctgctgacagcggctag

SEQ ID NO: 287529 - DNA, 84 bp, Artificial Sequence
  derived and/or modified sequence
atgtctgaggtgctgcctgctgacagcggcgtggacaccctggccgtgttcatggccagcagcggcaccacagatgtgacctag

SEQ ID NO: 287530 - DNA, 84 bp, Artificial Sequence
  derived and/or modified sequence
atgagcgaggtgctgcccgccgacagcggcgtggacaccctggccgtgttcatggcctcgagcggtacaacagatgtgacctag

SEQ ID NO: 287531 - DNA, 33 bp, Artificial Sequence
  derived and/or modified sequence
atgagtgaagtgctgccagccgattccggatag

SEQ ID NO: 287532 - DNA, 84 bp, Artificial Sequence
  derived and/or modified sequence
atgagcgaagtgctacccgctgattctggagttgacactttggccgtgttcatggctagctccggcacaactgacgttacgtag

SEQ ID NO: 287533 - DNA, 33 bp, Artificial Sequence
  derived and/or modified sequence
atgagcgaggtgctgcccgccgacagcggctag

SEQ ID NO: 287534 - DNA, 84 bp, Artificial Sequence
  derived and/or modified sequence
atgagcgaggtgctgcccgccgacagcggcgtggacaccctggccgtgttcatggccagcagcggcaccaccgacgtgacctag

SEQ ID NO: 287535 - protein, 27 aa, Artificial Sequence
  derived and/or modified sequence
MSEVLPADSGVDTLAVFMASSGTTDVT

SEQ ID NO: 287536 - DNA, 1274 bp, Artificial Sequence
  derived and/or modified sequence
aacttgagcccggggcagtgcgcgcggctgcttgagcgacggcaccgctggctggtgccggcaccctggggcttgtcgtagcacctggggcggcatccccgcccgacttcggaaggaccgggaggcaaaggtgaggaagttggcgaaggaacggctctcctttgtttgcagagagagggattttgcttatgtagcaagagataaagatacaagaattttgaaatgtcatgtatttcgatgtgacacaccagcaaaagccattgccacaagtctccacgagatctgctccaagattatggctgaacggaagaatgccaaagcgctggcctgcagctccttacaggaaagggccaatgtgaacctcgatgtccctttgcaagtagattttccaacaccaaagactgagctggtccagaagttccacgtgcagtacttgggcatgttacctgtagacaaaccagtcggaatggatattttgaacagtgccatagaaaatcttatgacctcatccaacaaggaggactggctgtcagtgaacatgaacgtggctgatgccactgtgactgtcatcagtgaaaagaatgaagaggaagtcttagtggaatgtcgtgtgcgattcctgtccttcatgggtgttgggaaggacgtccacacatttgccttcatcatggacacggggaaccagcgctttgagtgccacgttttctggtgcgagcctaatgctggtaacgtgtctgaggcggtgcaggccgcctgcatgttacgatatcagaagtgcttggtagccaggccgccttctcagaaagttcgaccacctccaccgccagcagattcagtaaccagaagagtcacaaccaatgtaaaacgaggggtcttatccctcattgacactttgaaacagaaacgccctgtcaccgaaatgccatagctgcacatgcaaaaggactcggctatttacctgaagattgactagctacactaaagaaaatgaactccgccatccgaccttccatccagttgctgatgctttgtcttcagagaatttacccttaaccaagcagtgttagacaagcatgttctctcgtcttgccaccatcatgtgatatgaaaagaagcatgaataattttttttgctgtaagttacatcatgcgcagtggaaggtctttttcttattgtaaatattgtgaacattacttaacttcacacacacacagagaagagtgtggccccacccctcctagtgaactaacgctgcgtccttggaatgaatgat

SEQ ID NO: 287537 - DNA, 6992 bp, Artificial Sequence
  derived and/or modified sequence
aacttgagcccggggcagtgcgcgcggctgcttgagcgacggcaccgctggctggtgccggcaccctggggcttgtcgtagcacctggggcggcatccccgcccgacttcggaaggaccgggaggcaaaggtgaggaagttggcgaaggaacggctctcctttgtttgcaggcacagggattttgcttatgtagcaagagataaagatacaagaattttgaaatgtcatgtatttcgatgtgacacaccagcaaaagccattgccacaagtctccacgagatctgctccaagattatggctgaacggaagaatgccaaagcgctggcctgcagctccttacaggaaagggccaatgtgaacctcgatgtccctttgcaagtagattttccaacaccaaagactgagctggtccagaagttccacgtgcagtacttgggcatgttacctgtagacaaaccagtcggaatggatattttgaacagtgccatagaaaatcttatgacctcatccaacaaggaggactggctgtcagtgaacatgaacgtggctgatgccactgtgactgtcatcagtgaaaagaatgaagaggaagtcttagtggaatgtcgtgtgcgattcctgtccttcatgggtgttgggaaggacgtccacacatttgccttcatcatggacacggggaaccagcgctttgagtgccacgttttctggtgcgagcctaatgctggtaacgtgtctgaggcggtgcaggccgcctgcatgttacgatatcagaagtgcttggtagccaggccgccttctcagaaagttcgaccacctccaccgccagcagattcagtaaccagaagagtcacaaccaatgtaaaacgaggggtcttatccctcattgacactttgaaacagaaacgccctgtcaccgaaatgccatagctgcacatgcaaaaggactcggctatttacctgaagattgactagctacactaaagaaaatgaactccgccatccgaccttccatccagttgctgatgctttgtcttcagagaatttacccttaaccaagcagtgttagacaagcatgttctctcgtcttgccaccatcatgtgatatgaaaagaagcatgaataattttttttgctgtaagttacatcatgcgcagtggaaggtctttttcttattgtaaatattgtgaacattacttaacttcacacacacacagagaagagtgtggccccacccctcctagtgaactaacgctgcgtccttggaatgaatgatgcgtgagttagtttcactgtcttcttggctggacctgtcacaagcaacctttaagtcctacagcactttgccctgttttcaacattggagtaggcactgcatagcagataccattgaattgctgtaaaaataggatggcgagtttgtgttttaatttttcataaaattgaacctgttggttgacaaaattggctgttggcatcagtatagaaaccaactggcagctttccctgacaagctctttgacacatggacaccatttcatgtctacagctgtttgtgggatgttggaaaaaaatgaaacttcaaaattgatgaaaaactaaattcgaggaattaaaatcgaacaaaacatagcctttcttttccgatggttttcaaactgattatttttaaaagagattaataaaatcataatgcattttgggtgggacatatttcaaacttctgccttatattgtacggtgcagctagagaattatagttcactatggccattctctacataaacattaagatgaaatactcctcatcagcctttcatccttagtttgagaattagctgatatgcaatttgaagttgaggaaatatcattgatatttctatcatgcacgattattttagatttctaccaccgtgtgatttttgctagtccatgtgctagaggtaaacgttctgctggaattctgcatccagctctatccccctctgatgctttttgcccagaaagctgtctgtccatcatgtattgtccatggcaacaaattacattaggttgaacctttccttgattttatgtatttaatattagaatttgttggactcaactagatatattttttaatttatattttttccattttactttgaagatttgaaatgttcatacctgagcaaagtctacacaggagtaatggactgtttaacaagtttcccaaaacagcattttcctgctccttcgtatgtaggtgagaaacttagctggaaagacatacaaatttagactctcgttgacattgtcgttttaaaaggaagttgctaaggcgatcaatctcaatattagtcttgtttacttcttcttaatgtcaaaattaacatttacaacatccaattataaaagtaatgctttatgtttatacactgctatgtacttgtcaaaatggtttccacattcttatcacatctgagccttaccaggtagagaaggtactaaatacactttagaagtaaaaatatgaagtaccgagaggctaaacccactggcctaagatctcaccaaagttcatgaaaaccaggactaggacccacggctcccaaagcccgttcttgctgtgttgtgctgcctccatatccgtcaggaagagcctttccagaatgattctgggcatatactaagaagagcaggtatggaaagatctattgtcagggaatcttagaattccctacacgagtgggagaaagatgtccaaattccttacgcagtggtattcatgatggtgccctatctaagtccaggactgttttcctacagcgtgcctcaaaagtgttgtagagggcaggattctacattcacagcctgttccatctacgagattttccagatgctacttgtggtagacattcctaactcatggtacttagccaccagagatcatgatggaatgagtgggtggcttttctacctgccattccctcagaattcatgaggggtgggggacagggggaccggaattgtcttagcaccccaatgttatgacaaaactatgctactttagaaacgcagtctgtttttcaccaattgacatactactgatctgaagtaaccagtgccatcataagaaattactgcattaagaaaatccttgctgtgccctttgaaaagctgttcagaaatcatttacagtgatctttcatctcggtcgctgtagtgaaacattttagtgtgataaatttcaaaattctaaacaaattacccacttttatattggaaatctctaccagaactccctcttcattttttaaggcatacatttgcttgttttcaagatcaagaattctgagctagctttaagtagcaaactgatttatatgtgcaattataggatgcattaagatgaatgatagcctttacatattgaaaactttgcagacgttttgttttgaaaatggcattgtatagtaaatgcaaattaattttgtaaaattatgttaaagagtatgttcagacactttctgccatggccaaaaagtatgtatgaaagtatgtgtgtatttgtttgtaaaaggatgccaatgttttacctgatatcttagtgacacttcagttatctatgcattctttagatctgtgattcggtaaacaggcagccatgttcacgatgccttctatgtcttaccatatttttaattaacctgttaaatacagcttaaaatatttttattttatttattctatttttactgaaatatactgcattattgtgttaatgtattatctttcctggatattatctcccagtgtatccagatctaagtaatctcagtgaactatacattgcctaaaaagtggttttgtaatgatttgtagtcacatttctattgggatatgtagaagaaaaggcaaaatgcttaaagttccttttattttttaaaagcagctagatagacacagacttgccacctcatacatctgctccttggcaacatcaaggggaacgactagccaacatgcctatggctaaaaactttcctttgcagactaaagcactgcttggtgcttcgtttttctacccttcacaacatgtgtgatttcatctaagagatatatacatgtacacatgccctttgtttccacctggatacaagatcactcatagctaattaggaccattgttttttgttcatctgtcttgttgcatgaagggacattagacccatttccattaaaataagttcttggtgataaactgtggcactgctacttctttttaaatccactttatgatttcaagatggacacttgtaagatgactcgacacaaggccattgcctggaagccccagagctttcctctgtttgtatggcccgttcatgtcccaggcattgcaacacaaactcctcaagatttcaccacaacatgacaagcattttcctaactgatattagcacaatttaactaataagccccttcgctctctagttggccaggcttaacctaatacacatctaacgtgtgtgccacacggccagtagaaagtttaacttcagcttcagggcaaagatacccactcacaccgtgtcaacgcaagcagtagttcctggcctccagagcagcttacttcccctgaaagaacgctttgttttcctttatgcccttttcctgttgaccacttttacacatttaaatgtaatttgttgtgagaataaatttagctgcataaaacgttcggctcatttatctgacatcttagtcacatatacaaggaatagaaatagaaactcggtgtctctagttatttttaaattattcttacctcagacttcttagaaatcactttagtaatggagcattttgctttgattagttactacatatttctgcctggtaagaactaggaagtaacttcaaattttgagtaatcaccctgtacttatttggtgatcaggaaggccagctggccttccggacatagaagcctatttagtcaccaactcgagtcttttgtaagcggtcttgctaggattgtgatattttagcacgaagaagtttatcacttcctttaagaacctgacatcaaagaataaagaatagaggtgtacacacactaaatccaaaatgaaaggtaactagagaaatcagttgaatctggtttagcttaactgttaggcgcaggaaggcagataaacagaatttaaagtatgtccccgctttttgttcatcttgcacttccacagtggtttctctctagtcagtaacaaaatttcattatggtttcaggcattatatggtggtaaataatttcagattaaaaatgtgtttgctattggagtatctgaatactagtaatttcattatttagaattttgcagcacttttatctcaagaagaagtccaagaatgtaaaatgccaaatgaaacatgtcagtggaatcaatattctccttcattagaattccctcatattgctttttttttttttcttcagacagaggagtcttactctggagtgcagtggtgtaatttcagctcaccacaacctccacctcccaagttcaagcaattctcgcctcagcctcctgagtagctgggattacaggcatgcaccgccacgcctggccaatttgtatatttttagtagagacagggtttcgccacgttggccaggctggtctcgaactcctgacctcaggtgatccgcccgccccaacctcccaaagtatgtgagccaccacgtccggcctcatattgcttttatccaaaattcttttcccttttcactctaccaaagtatttaaataatcctgtccttcatagaagattctcaaagaagaaaactgcagtgtaattaatgaatggtttaattcagaatcttcatatacttctaaagagaaaaataatttagtgccaaatgcatgttaggagataatcaatgtaagtggcaacaaattgtgacttcacatgctactgtagagatcagaaaattatcctaaactattccataacaatgagacaacatcacagaaaatacacttgaaaataaaaatctcaagaccagctacttctggacaatggaatacttttcagtctggtatggtggagggcccgaaaaggataagggattcttatgatacacaatgggattctttactgaacaatatgttaaattaagctgcaccgccttccttgaggcatggactaccctaaccaaccagatagaaatctgggtgggataagaggatgagccacacgctataattttagggcaaggagatagtgtttgattttcaaaatcagcaaaataagctgagcactttatatctttctgtacaagagtgataacatgaagaattcttcttcagggatttaaaatacaataagcctggttcaactataaaaagtcttgtttcctttcttcattgacacttttttttttttttttttttttttgaggcaaggtctcactctgcttcccaggctggagtgcagtggggcaatattggctcactgcaacctgcacctcctggactcaagagatcctcgtacctcagcctcctaagtagctgggactacaggcgtgtcccaccacacccagctaatttttgtattttttgtagagatggggttttggggtttcgccatgttgtccaggctcgtctggaactccggtgctcaagtggcgtgcccacctcagcctcccaaactgctgagattacagatgtgagccactgcacccagcccactgacacgttttactgataaatgtaaatctaagctaaaataaaaataatgtattaccgctataatacaattcaccattctcttttctcacttcaagtaagaaagtaaaaatagaatatcagagctgaagtagacctaagtattcatcttgaagaagataatattctaaaaatcatgccacctgaattgagcatttaggaatttatgtaacatttctatacaactgaattgcaaaaataaaactttaaattcaaacttt

SEQ ID NO: 287538 - protein, 616 aa, Artificial Sequence
  derived and/or modified sequence
MCLEKRYLDVLSDVTGPQVSCYITAPSYVLQQLECRIINHMSSLIVGDNEELVSNVITIECSDKEKRVPFPIGIAIPFTARYRGNYRDIMVKVCDINLQSSYLNPNSLEGMKGGYKGTCASVKVYKLGIFSVVSCLKKESFTVTKKGLALKSSMDSRISLNYPPGVFTSPVLVQLKIQPVDPALVAHLKAQQDTFYSVQSTSPLIHIQHPSTYPFQKPVTLFLPCSPYLDKNNLGSEIDHKRRASATINRITPSYFNRTKIASIRKPRKNASECLKLLGFRSQDSGWCGLDDVVKTIQSGLVSVELYEHLERFIVLHLSSTMDNSHLVTFVKSLEEAMLSTTACIVLSHQKDNPHRIAVLVVPSKDLSQVLKDLHLEGFGGPPEPSRHFQVREGEQLLLRFTGNIFASSNGKDYGKDYTLIFHLQRKPRLELQIKEVDEFGNYSCPHYKGTIVVYKVPKGKIVPNLNQSLVINENHSQLPICKLPLKLPKHKKLINRPQSTKRVSKDPVEALWDNLLHWLAEELSEENAESLSSTLPLRRSTIQLIKLKNPDDLTEQIHEFLCFWKKSLPTFTDKLRLLARHLRKIGRSDLAEELKFKWENKVFTEPQQCFDVAPE

SEQ ID NO: 287539 - protein, 781 aa, Artificial Sequence
  derived and/or modified sequence
MHDECTPQQTMSSIQDTKAADIAARGELNVIETATVSPTNGEESHYTNQVQLEKNKTHMSSALVEKENNTSLNGRVLGQEESQNKMFPDNAENEDDKQIEHMTVENINGNREETHGIIQTTETEIQETSESPREEMTTSSIICDISKKYINSTLPNDSENIKHKNNIMEKEYLDVLSDVTGPQVSCYITAPSYVLQQLECRIINHMSSLIVGDNEELVSNVITIECSDKEKRVPFPIGIAIPFTARYRGNYRDIMVKVCDINLQSSYLNPNSLEGMKGGYKGTCASVKVYKLGIFSVVSCLKKESFTVTKKGLALKSSMDSRISLNYPPGVFTSPVLVQLKIQPVDPALVAHLKAQQDTFYSVQSTSPLIHIQHPSTYPFQKPVTLFLPCSPYLDKNNLGSEIDHKRRASATINRITPSYFNRTKIASIRKPRKNASECLKLLGFRSQDSGWCGLDDVVKTIQSGLVSVELYEHLERFIVLHLSSTMDNSHLVTFVKSLEEAMLSTTACIVLSHQKDNPHRIAVLVVPSKDLSQVLKDLHLEGFGGPPEPSRHFQVREGEQLLLRFTGNIFASSNGKDYGKDYTLIFHLQRKPRLELQIKEVDEFGNYSCPHYKGTIVVYKVPKGKIVPNLNQSLVINENHSQLPICKLPLKLPKHKKLINRPQSTKRVSKDPVEALWDNLLHWLAEELSEENAESLSSTLPLRRSTIQLIKLKNPDDLTEQIHEFLCFWKKSLPTFTDKLRLLARHLRKIGRSDLAEELKFKWENKVFTEPQQCFDVAPE

SEQ ID NO: 287540 - DNA, 4335 bp, Artificial Sequence
  derived and/or modified sequence
ggggagcactgctgcacttctaaagaaagaagaaaaggagatttgtaatttatgcggcatgcatgatgaatgtactccacagcagacaatgtcctccattcaagataccaaagcagcagacattgctgcaagaggggaactaaatgtcatagaaacagctactgtttctcccacaaatggagaggaaagtcattacacaaaccaggtccagttagaaaaaaataaaacacatatgagttcagcattagtggaaaaagaaaacaatacatcactgaatggacgtgtactggggcaagaagagtcacagaataaaatgttcccagataatgcagaaaatgaagatgataaacaaatagaacacatgactgttgagaacataaatggcaacagggaagagactcatggcataattcagacaacagagacagaaattcaagagacttcagaaagcccaagagaagagatgaccacatcctcaataatatgtgatatctccaagaaatatataaatagtactcttcccaatgattcagagaatataaagcacaagaataacataatggaaaaggagtatcttgatgtgctgagtgatgttactggcccccaagtgtcttgttatattacagcaccatcatatgttctacaacaactagaatgccggataataaatcacatgagttctttaatagtgggtgataatgaagagttagttagcaacgtcataactattgaatgctcagataaggaaaagagagttccatttccaataggcattgcaattccatttactgcacgttacagaggaaattacagagatatcatggtgaaagtgtgtgacataaaccttcaatcaagttacctaaacccaaattcactagaaggaatgaagggaggttataaggggacctgtgcttcagtaaaagtttacaaattgggtatcttttctgttgtgtcttgtttaaagaaagagtcgttcacagtaacaaagaaaggcctcgctcttaagtcaagcatggattcccgaatatccttaaattaccctccaggagtttttacctctccagtgctggtgcagttaaagatccaaccagttgacccagctctggtggcacatttaaaagcacagcaagatactttctactcagtccaatccacaagccctctgattcacattcagcacccatcaacttatccttttcagaagccagtcactttgtttttaccttgttctccataccttgataaaaacaaccttggttctgagatagatcataaaagaagagcaagtgccacaataaataggattacaccttcgtatttcaaccggacaaaaattgcctccataagaaaacctaggaaaaatgccagtgaatgtttgaaattactgggattcagaagccaagacagtggttggtgtgggcttgatgatgttgtgaaaaccatacagagcggcttggtatcagttgaattgtatgaacatttggagaggtttattgtacttcacctctcttccaccatggacaatagtcatttggttacttttgtgaaatctttagaggaagccatgctcagcaccactgcctgcatagtactgtctcaccagaaggacaatccacatagaatagctgttttagtggtgccttccaaagatttaagccaggtgcttaaggacctgcacttggaagggtttggaggacctccagagccatctcgtcatttccaagttcgagaaggagaacaacttcttttaagatttactggaaacatatttgcttcaagcaacgggaaggattatggaaaagactacacacttatttttcacttgcaaagaaaacctaggctggaactccaaatcaaagaagtggacgaatttggaaactatagttgccctcattacaaaggcaccattgtcgtttataaagtacctaaaggaaagatagtccccaacttgaatcaatctctcgtaattaatgaaaaccattctcagttgccaatttgcaaattaccattgaaattgccaaagcataagaaattaatcaaccgtccacagagtaccaaaagagtttctaaggatcctgtagaagccctttgggataacttgctccattggctggctgaggagctctcagaagaaaatgctgagtctctttcctcaactctccctctgcgccgtagcaccattcagctcatcaaactcaagaaccctgatgatctcacagaacagatccacgagtttctttgcttctggaaaaaatcgcttccaactttcaccgacaaacttcgcctcctggctcgacatctccgcaagattggcaggagtgatcttgcagaagagctcaaattcaagtgggaaaataaagtgttcactgaaccacagcagtgttttgatgtagcccctgagtaaaagcctgatctctcttcctttacccctaggaaaaggcacacggtgggtttttgtttctgtcaacattttcctggaagtttccgaatgatattatttgaagtcagtctatttaatgatgtgctatttaatgatgtgagacaaagggagaagcacggatcagataatagaaagcattcctgggtgtgagcgctcctctctggttgagtgattatgttttgcaaccatgactgtcttgagtttggcctcacttaatagcatttgcaattgagtttgacttgttcacattttaaaagctaagtgtgaagaaaagatctgatatatgtaattacttattaattggtatctacataaaattaaactagttttctgtgacttcaagtgtgagcccaaaaatatctgagacagttctcaatcaatttagaaagattattttgccaaggttaaggacaggcccgtaacagcctcagaagatcctgatgacatatgcccaaggtgttcggggtagagcttgcttttatgcattttagggagttataatatatcaatcaatacatgtaaggtgtacattggctcaatctggaaaggtaggacaactcaaagcaggggcttccagatcacaggtagatttaaagattcttgattggcattgattgaacagttattatctaaagacctggaatcaataggaaggaaatgcctgggctatgataagaagttatggagaccaaagttttataatgcagatgaagcctccaggtagcagactttagagggaatagattgtaaatatttctgatcagtcctaaggtctgttgaaatttatgctggccagcttttcctgaattccaaaagagaggagggtattatggagtcatgtccaacctccccttcccagcatggcctaaactagtttttcaggataactttgaaatgcccttggctgagagaaggggcttgttcagatagttgggagacttagaattttatttttggttgactcaggcaaccaattcaagttacatagataccatagagcctacagtaaacaatacaaaataaattggactgaaagacttgatgtcggtggtagtaactcactttaaaaaaacctttctaagctcgaaataaattaaaaatagaataacacttcagccatttactggcacagacttttcctttataaaaatataacttggaagagggaaaattccatattttgttattagcgaaatgaggcagtgcagagaaaataagttatcagtgaaagaattcaaggcctatttcttctacttaggaagaaaacctgctttaaaattagttaacagaagccttattacataagccctagatatacatcattaaaaataaacaaaacatctgtaaatagaacattaaaatgaaagaaaaaattaaaacttatctaaacccctctttctattgataatcgctattaatgtctagtataagctttgagtttttggaaagcctaacgccctttagctctctgaagcagttggatataaatgggacattgaactagtttcactgactcattaatgcaaaaaccattaggtcgttggcttgaaaacatcggtagcaattagtttcagttattgaatacctaggaattaattgagttatattacaaaattaaatgttttaatctctttcaaatttaaacgcaagacttccttctacaaattaaccagggatttagatatctattcaggtatatatcaaaaaaggcgattcccattttcaaacatagtcccataaaggaatattttattagtcaagattttttacatgctgccaaaaaggtacaatatgtattttcatgtattcttggggcaaagaaaacagactaaaatgttcattgttttcctgattacaatcgaacaaaaaagtaaagaaaatgaaagttgcttctt

SEQ ID NO: 287541 - DNA, 1071 bp, Artificial Sequence
  derived and/or modified sequence
atgctgagcgccatcaccaacgtggtgcagaacaccggcaagagcgtgctgaccggcggcctggacgccctggagttcatcggcaagaagaccatgaacgtgctggccgagagcgaccccggcttcaagagaaccaagaccctgatggagagaaccgtgagcctgagccagatgctgagagaggccaaggagaaggagaagcagagactggcccagcagctgaccatggagagaaccgcccactacggcatgctgttcgacgagtaccagggcctgagccacctggaggccctggagatcctgagcaacgagagcgagagcaaggtgcagagcttcctggccagcctggacggcgagaagctggagctgctgaagaacgacctgatcagcatcaaggacatcttcgccgccaaggagctggagaacgaggagaaccaggaggagcagggcctggaggagaagggcgaggagttcgccagaatgctgaccgagctgctgttcgagctgcacgtggccgccacccccgacaagctgaacaaggccatgaagagagcccacgactgggtggaggaggaccagaccgtggtgagcgtggacgtggccaaggtgagcgaggaggagaccaagaaggaggagaaggaggagaagagccaggacccccaggaggacaagaaggaggagaagaagaccaagaccatcgaggaggtgtacatgagcagcatcgagagcctggccgaggtgaccgccagatgcatcgagcagctgcacaaggtggccgagctgatcctgcacggccaggaggaggagaagcccgcccaggaccaggccaaggtgctgatcaagctgaccaccgccatgtgcaacgaggtggccagcctgagcaagaagttcaccaacagcctgaccaccgtgggcagcaacaagaaggccgaggtgctgaaccccatgatcagcagcgtgctgctggagggctgcaacagcaccacctacatccaggacgccttccagctgctgctgcccgtgctgcaggtgagccacatccagaccagctgcctgaaggcccagccctag

SEQ ID NO: 287542 - DNA, 2561 bp, Artificial Sequence
  derived and/or modified sequence
tgtctgatgatgctggtgacaccttagccactggagacaaagcagaagttactgaaaacggagtccctgaaagtgagtgaaagcccacccacttccccttcatcagcctctcggggtatgctgtctgccatcaccaatgtggttcaaaacacaggtaaaagtgtcttaactggaggccttgatgcgttggaattcatcggcaagaaaaccatgaatgtccttgcagaaagtgacccgggctttaagcggaccaagacgctcatggagagaactgtttccttgtctcagatgttaagggaagctaaggagaaggagaagcagagactggcacagcagctcacgatggagagaaccgcgcactacgggatgctgtttgatgaatatcaaggcttgtcacacctggaagccctggaaattctgtccaatgaaagcgaaagcaaggttcagtcatttttagcatcacttgatggagagaagctggaactcttaaaaaatgacctaatttccattaaagacatctttgcagccaaagaattagagaatgaagaaaatcaagaagaacaaggcttagaagaaaagggagaagaatttgctcgcatgcttacagagcttctctttgaattacatgtggcggccacacctgacaaactcaataaggccatgaagagggctcatgactgggtggaagaggatcaaaccgtggtgtcagtagatgtggcaaaagtgtccgaagaagaaacaaagaaggaagaaaaggaagagaaatctcaagaccctcaagaagacaaaaaggaggaaaagaaaactaagaccatagaggaagtatacatgtcgtccattgaaagtctggcggaggtaacagcgcgctgtattgagcagcttcataaagtagcagaattaattcttcatggacaagaagaggaaaaaccagctcaggaccaagcaaaagttctaataaaattaactactgcaatgtgcaatgaagtggcctctttatcaaagaagtttacgaattctttaaccactgttgggagcaacaagaaggccgaggtccttaaccccatgatcagtagtgtattgttagagggctgcaacagtacaacgtacatacaggatgccttccagctgctgctgcctgttctgcaggtctcacatatccagaccagttgtttgaaagcacagccgtgacctggccagactccatctagttaaaggagacagctggccgccttgcctcaatatgtaccatttaaggggatgttctctgtgcgcctggccacagacatccatttgaggacactacaagcaattttgcacagacaatattgagaatgcaaatttagagagagttatcatttctctcaatgtgtataattgtttttacaaacaattgtgttttctttatgttaatttaaacttacacagcttatattgaaaatttcctttcatctgaaatttatttacaaatattcgtgttcattttcctggttaagcatgctatatttagaaactcatggggagaccttagacttttgtttaatcctttatgtttcaacctttaaatgttccattcttatagtattactttaaatcaattctaaaactgaactttgttttgttacataaatgtcgcaggcaaaaataacactacttatagattttacctattatggtaaaaaataggaacatattgtcattctttttttttttttttttttgagacagagtctcactctgtcgccaggctggagtgcgttggcacaatctcggctcactgcaacctccgcctcctgggttcaatcgattctcctgcctcagcctcctgagtagctgggactacaggtgtgtgccaccacgcccagccaattttttttgtatttttagtagagacagggtttcaccatgttggccaggatggtctcgatctcctgacctcgtgatctgcccgcctcagcctcccaaagtgctgggattacaggcttgagccaccgcgcccggccggtcattcattcttgcaacaagcatttattgagcacctactgtgtgctcacagtaaagaaacgtgatcttatcccagtagaggtagatattctgaaaaagaataattcttaaactgcttaaaacaggggtccccacccccaggccacagaccagtaccagtccgtggcactggttaggaaccaggccacacagcagggggtgagcggtgggtgagtgagcacagcttcatctgtatttacagctgctccccagagcttgcattactgcctgagctctgcctcccgtcaggtcagcagcagcattagagtctcatgggagtgcgaaccctgttgtgaactgcacatgcgagggatctaggttgtgcactccttatgagaatctaatgcctgatgaatctaatgcctcatgatctgaggttgaatagcttcgtgccgaaaccatcccccacccccatcccgctaccccgagtccgtgaaaaaattgtcttccatgaaaccggtccctggtaccagaaaggttggggaccactggcttaaaataccaataaatttttgaacctt

SEQ ID NO: 287543 - DNA, 1071 bp, Artificial Sequence
  derived and/or modified sequence
atgttgtctgctatcacgaacgtggttcagaacacaggcaaatccgtcctgacaggcggtctagatgcccttgaatttattggaaagaagacaatgaatgtgctagccgaaagtgatccaggcttcaagcggactaaaactctgatggagcggaccgtcagtttgtctcagatgcttcgcgaagcaaaggagaaagagaagcagaggttagcccagcaactaaccatggagcggacagctcactatggcatgctctttgacgaatatcaggggttgtcgcatttggaagccctagaaattctgagcaatgagagcgaatccaaagtgcagagcttcctggcttcgcttgacggtgagaaactcgaattgctgaagaatgatctgattagtatcaaggatatttttgccgccaaggagctggaaaacgaggagaatcaggaggaacagggtctagaggagaaaggtgaagagtttgcaaggatgctcaccgaattactgtttgagttacatgtggctgcaacgccagacaaactcaacaaagccatgaaaagggcgcatgattgggtcgaggaagaccagactgtagtgtctgtggacgtcgccaaggttagcgaagaggaaacaaaaaaagaggaaaaagaagagaagagccaggatccccaggaggacaagaaagaagaaaagaaaactaagacgatcgaagaggtgtatatgagctcaatagagtcgctcgcggaagtcactgcccgctgcattgagcaacttcataaagtggctgagttgatcctgcatggccaagaggaagagaaaccggcacaagaccaggccaaagtgctgataaagttgaccacagccatgtgcaacgaggtggcgtccctgtccaaaaagtttacaaattctctcacaaccgtcggctccaataagaaggctgaagttctgaatcccatgatctcatcagtcttattagaggggtgcaattcgacgacttatattcaggacgctttccagctgttgctccccgtgctgcaagtgagccacattcaaacctcgtgccttaaggcccagccttag

SEQ ID NO: 287544 - DNA, 1071 bp, Artificial Sequence
  derived and/or modified sequence
atgctgagcgccatcaccaacgtggtgcagaacacaggcaagtctgtgctgaccggcggcctggatgccctggagttcatcggcaagaagaccatgaatgtgctggccgagagtgaccccggcttcaagaggaccaagaccctgatggagaggacagtgtccctgagccagatgctgcgggaggccaaggagaaggagaagcagaggctggcccagcagctgaccatggagaggacagcccactacggcatgctgtttgatgagtaccagggcctgagccacctggaggccctggagatcctgagcaatgaaagtgagagcaaggtgcagagcttcctggccagcctggatggagagaagctggagctgctgaagaatgacctgatcagcatcaaggacatctttgctgccaaggagctggagaatgaggagaaccaggaggagcagggcctggaggagaagggggaggagtttgccaggatgctgacagagctgctgtttgagctgcacgtggccgccaccccagacaagctgaacaaggccatgaagagggcccatgactgggtggaggaggaccagacagtggtgtctgtggatgtggccaaggtgtctgaggaggagaccaagaaggaggagaaggaggagaagagccaggacccccaggaggacaagaaggaggagaagaagaccaagaccatcgaggaggtgtacatgagcagcattgagagcctggccgaggtgacagcccgctgcatcgagcagctgcacaaggtggccgagctgatcctgcacggccaggaggaggagaagccagcccaggaccaggccaaggtgctgatcaagctgaccacagccatgtgcaatgaggtggccagcctgagcaagaagttcaccaacagcctgaccaccgtgggcagcaacaagaaggccgaggtgctgaaccccatgatcagctctgtgctgctggagggctgcaacagcaccacctacatccaggatgccttccagctgctgctgcctgtgctgcaggtgagccacatccagaccagctgcctgaaggcccagccctag

SEQ ID NO: 287545 - DNA, 1071 bp, Artificial Sequence
  derived and/or modified sequence
atgctgagcgccatcaccaacgtggtgcagaacaccggcaagagcgtgttgaccggcggactggacgcgctggagtttattggaaaaaaaacaatgaatgttctggcagaatccgatccaggtttcaaaagaaccaagacgcttatggagaggactgttagtttatcccagatgctgcgagaagctaaggaaaaggagaaacagcggttggcccagcagctgacaatggagaggaccgcccattacggcatgctgttcgatgagtaccaggggctttcccatctggaggctctcgagatccttagtaatgagtccgagtcgaaggtgcaatcattcctcgccagtttggatggggaaaaacttgagctcctgaaaaacgatttgatttctattaaggatattttcgcggctaaagagctggaaaacgaggagaatcaggaggaacagggcctagaagagaaaggcgaggaatttgcccggatgttaaccgaattactgttcgaacttcacgttgccgcgacacccgacaagctgaataaagccatgaagcgcgcccatgactgggtggaagaggaccagacggtcgtgtctgtggatgttgccaaagtttcagaggaggaaactaagaaggaggagaaggaggaaaagagccaggatccgcaagaagataagaaggaggagaaaaaaactaaaaccattgaagaggtttacatgtcaagcattgaatctttagcggaggtcactgccaggtgcatagaacagttacacaaggtggccgaactcattctgcacggacaggaggaggagaagccggcccaggatcaggccaaagttttgattaaacttaccacagctatgtgcaatgaagtagcgagcctgagcaagaagttcaccaactcactcaccacagtgggctcgaacaagaaagctgaagttcttaatcccatgatcagtagcgtgttgttagaaggatgtaattctaccacgtacatacaggacgccttccaattactgctgcctgtcttgcaggtatcacatattcaaacaagctgcttgaaggcccagccctag

SEQ ID NO: 287546 - DNA, 1071 bp, Artificial Sequence
  derived and/or modified sequence
atgctgtcggccatcactaatgtcgtgcagaacaccggcaaatcagtgctgacaggcggtctcgatgctctggagttcatcggcaagaaaaccatgaatgtgctggccgaaagcgaccccggattcaagaggacaaaaacccttatggaaagaactgtttccttatctcagatgctgcgggaggccaaagaaaaggagaaacagcggctggctcaacagctaaccatggaacggaccgctcactatgggatgctgttcgacgagtatcagggcctctcacatctggaggctctggagatcctgagcaacgagtccgaatccaaggtccagagtttcctcgcaagtctggatggcgagaaactggaactactgaaaaacgatctgatttctatcaaagacatttttgctgcaaaggaactggagaatgaagagaaccaggaggagcagggcctcgaggaaaaaggagaggaattcgcacggatgctgacagaattactgtttgaactccatgtggccgctacccccgacaaattaaacaaagcaatgaagcgtgcccacgattgggtggaagaggaccaaaccgtcgtgtccgtggacgtggcaaaagtatctgaggaggaaacaaagaaggaggagaaggaggaaaagagtcaggatccccaagaggacaaaaaggaggagaaaaagacaaaaacaatagaggaagtgtatatgtcctctattgagtccttagccgaggtgaccgctagatgtatagagcagttgcataaagtcgctgaacttatactgcatggccaggaagaagaaaaacccgcacaggatcaggccaaagttctgatcaagctcacaacagcaatgtgtaatgaagtcgccagtctttccaagaagttcactaactccctgaccaccgtcgggagcaataagaaggccgaagttcttaaccccatgattagctcagttctgctggaggggtgtaacagcaccacctatatccaagacgccttccagttgcttttacctgttcttcaggtctcccacatccagacttcttgcttgaaggcccagccttag

SEQ ID NO: 287547 - DNA, 6576 bp, Artificial Sequence
  derived and/or modified sequence
aagagcaaaaagcgaaggcgcaatctggacactgggagattcggagcgcagggagtttgagagaaacttttattttgaagagaccaaggttgagggggggcttatttcctgacagctatttacttagagcaaatgattagttttagaaggatggactataacattgaatcaattacaaaacgcggtttttgagcccattactgttggagctacagggagagaaacagaggaggagactgcaagagatcattggaggccgtgggcacgctctttactccatgtgtgggacattcattgcggaataacatcggaggagaagtttcccagagctatggggacttcccatccggcgttcctggtcttaggctgtcttctcacagggctgagcctaatcctctgccagctttcattaccctctatccttccaaatgaaaatgaaaaggttgtgcagctgaattcatccttttctctgagatgctttggggagagtgaagtgagctggcagtaccccatgtctgaagaagagagctccgatgtggaaatcagaaatgaagaaaacaacagcggcctttttgtgacggtcttggaagtgagcagtgcctcggcggcccacacagggttgtacacttgctattacaaccacactcagacagaagagaatgagcttgaaggcaggcacatttacatctatgtgccagacccagatgtagcctttgtacctctaggaatgacggattatttagtcatcgtggaggatgatgattctgccattataccttgtcgcacaactgatcccgagactcctgtaaccttacacaacagtgagggggtggtacctgcctcctacgacagcagacagggctttaatgggaccttcactgtagggccctatatctgtgaggccaccgtcaaaggaaagaagttccagaccatcccatttaatgtttatgctttaaaagcaacatcagagctggatctagaaatggaagctcttaaaaccgtgtataagtcaggggaaacgattgtggtcacctgtgctgtttttaacaatgaggtggttgaccttcaatggacttaccctggagaagtgaaaggcaaaggcatcacaatgctggaagaaatcaaagtcccatccatcaaattggtgtacactttgacggtccccgaggccacggtgaaagacagtggagattacgaatgtgctgcccgccaggctaccagggaggtcaaagaaatgaagaaagtcactatttctgtccatgagaaaggtttcattgaaatcaaacccaccttcagccagttggaagctgtcaacctgcatgaagtcaaacattttgttgtagaggtgcgggcctacccacctcccaggatatcctggctgaaaaacaatctgactctgattgaaaatctcactgagatcaccactgatgtggaaaagattcaggaaataaggtatcgaagcaaattaaagctgatccgtgctaaggaagaagacagtggccattatactattgtagctcaaaatgaagatgctgtgaagagctatacttttgaactgttaactcaagttccttcatccattctggacttggtcgatgatcaccatggctcaactgggggacagacggtgaggtgcacagctgaaggcacgccgcttcctgatattgagtggatgatatgcaaagatattaagaaatgtaataatgaaacttcctggactattttggccaacaatgtctcaaacatcatcacggagatccactcccgagacaggagtaccgtggagggccgtgtgactttcgccaaagtggaggagaccatcgccgtgcgatgcctggctaagaatctccttggagctgagaaccgagagctgaagctggtggctcccaccctgcgttctgaactcacggtggctgctgcagtcctggtgctgttggtgattgtgatcatctcacttattgtcctggttgtcatttggaaacagaaaccgaggtatgaaattcgctggagggtcattgaatcaatcagcccagatggacatgaatatatttatgtggacccgatgcagctgccttatgactcaagatgggagtttccaagagatggactagtgcttggtcgggtcttggggtctggagcgtttgggaaggtggttgaaggaacagcctatggattaagccggtcccaacctgtcatgaaagttgcagtgaagatgctaaaacccacggccagatccagtgaaaaacaagctctcatgtctgaactgaagataatgactcacctggggccacatttgaacattgtaaacttgctgggagcctgcaccaagtcaggccccatttacatcatcacagagtattgcttctatggagatttggtcaactatttgcataagaatagggatagcttcctgagccaccacccagagaagccaaagaaagagctggatatctttggattgaaccctgctgatgaaagcacacggagctatgttattttatcttttgaaaacaatggtgactacatggacatgaagcaggctgatactacacagtatgtccccatgctagaaaggaaagaggtttctaaatattccgacatccagagatcactctatgatcgtccagcctcatataagaagaaatctatgttagactcagaagtcaaaaacctcctttcagatgataactcagaaggccttactttattggatttgttgagcttcacctatcaagttgcccgaggaatggagtttttggcttcaaaaaattgtgtccaccgtgatctggctgctcgcaacgtcctcctggcacaaggaaaaattgtgaagatctgtgactttggcctggccagagacatcatgcatgattcgaactatgtgtcgaaaggcagtacctttctgcccgtgaagtggatggctcctgagagcatctttgacaacctctacaccacactgagtgatgtctggtcttatggcattctgctctgggagatcttttcccttggtggcaccccttaccccggcatgatggtggattctactttctacaataagatcaagagtgggtaccggatggccaagcctgaccacgctaccagtgaagtctacgagatcatggtgaaatgctggaacagtgagccggagaagagaccctccttttaccacctgagtgagattgtggagaatctgctgcctggacaatataaaaagagttatgaaaaaattcacctggacttcctgaagagtgaccatcctgctgtggcacgcatgcgtgtggactcagacaatgcatacattggtgtcacctacaaaaacgaggaagacaagctgaaggactgggagggtggtctggatgagcagagactgagcgctgacagtggctacatcattcctctgcctgacattgaccctgtccctgaggaggaggacctgggcaagaggaacagacacagctcgcagacctctgaagagagtgccattgagacgggttccagcagttccaccttcatcaagagagaggacgagaccattgaagacatcgacatgatggatgacatcggcatagactcttcagacctggtggaagacagcttcctgtaactggcggattcgaggggttccttccacttctggggccacctctggatcccgttcagaaaaccactttattgcaatgcagaggttgagaggaggacttggttgatgtttaaagagaagttcccagccaagggcctcggggagcgttctaaatatgaatgaatgggatattttgaaatgaactttgtcagtgttgcctcttgcaatgcctcagtagcatctcagtggtgtgtgaagtttggagatagatggataagggaataataggccacagaaggtgaactttgtgcttcaaggacattggtgagagtccaacagacacaatttatactgcgacagaacttcagcattgtaattatgtaaataactctaaccaaggctgtgtttagattgtattaactatcttctttggacttctgaagagaccactcaatccatccatgtacttccctcttgaaacctgatgtcagctgctgttgaactttttaaagaagtgcatgaaaaaccatttttgaaccttaaaaggtactggtactatagcattttgctatcttttttagtgttaaagagataaagaataataattaaccaaccttgtttaatagatttgggtcatttagaagcctgacaactcattttcatattgtaatctatgtttataatactactactgttatcagtaatgctaaatgtgtaataatgtaacatgatttccctccagagaaagcacaatttaaaacaatccttactaagtaggtgatgagtttgacagtttttgacatttatattaaataacatgtttctctataaagtatggtaatagctttagtgaattaaatttagttgagcatagagaacaaagtaaaagtagtgttgtccaggaagtcagaatttttaactgtactgaataggttccccaatccatcgtattaaaaaacaattaactgccctctgaaataatgggattagaaacaaacaaaactcttaagtcctaaaagttctcaatgtagaggcataaacctgtgctgaacataacttctcatgtatattacccaatggaaaatataatgatcagcaaaaagactggatttgcagaagttttttttttttttttcttcatgcctgatgaaagctttggcgaccccaatatatgtattttttgaatctatgaacctgaaaagggtcagaaggatgcccagacatcagcctccttctttcaccccttaccccaaagagaaagagtttgaaactcgagaccataaagatattctttagtggaggctggatgtgcattagcctggatcctcagttctcaaatgtgtgtggcagccaggatgactagatcctgggtttccatccttgagattctgaagtatgaagtctgagggaaaccagagtctgtatttttctaaactccctggctgttctgatcggccagttttcggaaacactgacttaggtttcaggaagttgccatgggaaacaaataatttgaactttggaacagggttggcattcaaccacgcaggaagcctactatttaaatccttggcttcaggttagtgacatttaatgccatctagctagcaattgcgaccttaatttaactttccagtcttagctgaggctgagaaagctaaagtttggttttgacaggttttccaaaagtaaagatgctacttcccactgtatgggggagattgaactttccccgtctcccgtcttctgcctcccactccataccccgccaaggaaaggcatgtacaaaaattatgcaattcagtgttccaagtctctgtgtaaccagctcagtgttttggtggaaaaaacattttaagttttactgataatttgaggttagatgggaggatgaattgtcacatctatccacactgtcaaacaggttggtgtgggttcattggcattctttgcaatactgcttaattgctgataccatatgaatgaaacatgggctgtgattactgcaatcactgtgctatcggcagatgatgctttggaagatgcagaagcaataataaagtacttgactacctactggtgtaatctcaatgcaagccccaactttcttatccaactttttcatagtaagtgcgaagactgagccagattggccaattaaaaacgaaaacctgactaggttctgtagagccaattagacttgaaatacgtttgtgtttctagaatcacagctcaagcattctgtttatcgctcactctcccttgtacagccttattttgttggtgctttgcattttgatattgctgtgagccttgcatgacatcatgaggccggatgaaacttctcagtccagcagtttccagtcctaacaaatgctcccacctgaatttgtatatgactgcatttgtgtgtgtgtgtgtgttttcagcaaattccagatttgtttccttttggcctcctgcaaagtctccagaagaaaatttgccaatctttcctactttctatttttatgatgacaatcaaagccggcctgagaaacactatttgtgactttttaaacgattagtgatgtccttaaaatgtggtctgccaatctgtacaaaatggtcctatttttgtgaagagggacataagataaaatgatgttatacatcaatatgtatatatgtatttctatatagacttggagaatactgccaaaacatttatgacaagctgtatcactgccttcgtttatatttttttaactgtgataatccccacaggcacattaactgttgcacttttgaatgtccaaaatttatattttagaaataataaaaagaaagatacttacatgttcccaaaacaatggtgtggtgaatgtgtgagaaaaactaacttgatagggtctaccaatacaaaatgtattacgaatgcccctgttcatgtttttgttttaaaacgtgtaaatgaagatctttatatttcaataaatgatatataatttaaagttata

SEQ ID NO: 287548 - DNA, 480 bp, Artificial Sequence
  derived and/or modified sequence
atgggcaccagccaccccgccttcctggtgctgggctgcctgctgaccggcctgagcctgatcctgtgccagctgagcctgcccagcatcctgcccaacgagaacgagaaggtggtgcagctgaacagcagcttcagcctgagatgcttcggcgagagcgaggtgagctggcagtaccccatgagcgaggaggagagcagcgacgtggagatcagaaacgaggagaacaacagcggcctgttcgtgaccgtgctggaggtgagcagcgccagcgccgcccacaccggcctgtacacctgctactacaaccacacccagaccgaggagaacgagctggagggcagacacatctacatctacgtgcccgaccccgacgtggccttcgtgcccctgggcatgaccgactacctggtgatcgtggaggacgacgacagcgccatcatcccctgcagaaccaccgaccccgagacccccgtgtag

SEQ ID NO: 287549 - DNA, 477 bp, Artificial Sequence
  derived and/or modified sequence
atgggcaccagccaccccgccttcctggtgctgggctgcctgctgaccggcctgagcctgatcctgtgccagctgagcctgcccagcatcctgcccaacgagaacgagaaggtggtgcagctgaacagcagcttcagcctgagatgcttcggcgagagcgaggtgagctggcagtaccccatgagcgaggaggagagcagcgacgtggagatcagaaacgaggagaacaacagcggcctgttcgtgaccgtgctggaggtgagcagcgccagcgccgcccacaccggcctgtacacctgctactacaaccacacccagaccgaggagaacgagctggagggcagacacatctacatctacgtgcccgaccccgacgtggccttcgtgcccctgggcatgaccgactacctggtgatcgtggaggacgacgacagcgccatcatcccctgcagaaccaccgaccccgagaccccctag

SEQ ID NO: 287550 - DNA, 657 bp, Artificial Sequence
  derived and/or modified sequence
atgggcaccagccaccccgccttcctggtgctgggctgcctgctgaccggcctgagcctgatcctgtgccagctgagcctgcccagcatcctgcccaacgagaacgagaaggtggtgcagctgaacagcagcttcagcctgagatgcttcggcgagagcgaggtgagctggcagtaccccatgagcgaggaggagagcagcgacgtggagatcagaaacgaggagaacaacagcggcctgttcgtgaccgtgctggaggtgagcagcgccagcgccgcccacaccggcctgtacacctgctactacaaccacacccagaccgaggagaacgagctggagggcagacacatctacatctacgtgcccgaccccgacgtggccttcgtgcccctgggcatgaccgactacctggtgatcgtggaggacgacgacagcgccatcatcccctgcagaaccaccgaccccgagacccccgtgaccctgcacaacagcgagggcgtggtgcccgccagctacgacagcagacagggcttcaacggcaccttcaccgtgggcccctacatctgcgaggccaccgtgaagggcaagaagttccagaccatccccttcaacgtgtacgccctgaagggcacctgcatcatcagcttcctgctgtag

SEQ ID NO: 287551 - DNA, 465 bp, Artificial Sequence
  derived and/or modified sequence
atgggcaccagccaccccgccttcctggtgctgggctgcctgctgaccggcctgagcctgatcctgtgccagctgagcctgcccagcatcctgcccaacgagaacgagaaggtggtgcagctgaacagcagcttcagcctgagatgcttcggcgagagcgaggtgagctggcagtaccccatgagcgaggaggagagcagcgacgtggagatcagaaacgaggagaacaacagcggcctgttcgtgaccgtgctggaggtgagcagcgccagcgccgcccacaccggcctgtacacctgctactacaaccacacccagaccgaggagaacgagctggagggcagacacatctacatctacgtgcccgaccccgacgtggccttcgtgcccctgggcatgaccgactacctggtgatcgtggaggacgacgacagcgccatcatcccctgcagaaccaccgactag

SEQ ID NO: 287552 - DNA, 480 bp, Artificial Sequence
  derived and/or modified sequence
atgggcaccagtcatcccgcctttctcgtgttaggttgtttgttgacagggctgagtctaattttgtgccagctgtcactgcctagcattctcccaaacgaaaatgaaaaggtggttcagctgaattcctcattctccttacgttgtttcggagagtctgaggtatcatggcagtatcccatgagcgaggaagagtctagcgatgtcgagattagaaatgaggaaaacaattccggtctttttgtgactgtacttgaagtgtccagcgcatccgccgcccatacaggcctctatacctgctactacaaccatactcagacagaggagaacgaactggagggacggcatatttacatctacgtgcccgacccggacgtggctttcgtgccccttggaatgacggactacctggtcatagtggaggatgacgatagcgctataattccttgcaggactaccgatcctgaaacccctgtgtag

SEQ ID NO: 287553 - DNA, 477 bp, Artificial Sequence
  derived and/or modified sequence
atgggtaccagtcatcctgccttcctcgtgttggggtgcctgctgacgggcttgtccctgattctatgtcagctatcgttaccaagcattctgccaaacgagaacgaaaaagtggtgcagttgaatagtagcttcagcttacgctgtttcggcgaaagtgaagtgagttggcagtatccaatgtctgaagaggagtccagcgacgttgagatcaggaatgaggaaaataattctgggctctttgtgactgtacttgaggtatcgagtgcctctgccgcccacaccggactgtatacttgttactacaatcatacccagacggaggagaacgaactggagggaagacacatttacatctacgtgcccgatcccgacgtagcctttgttccactcggtatgaccgactacttggtgatagtggaagatgacgattccgccatcattccctgtcgcaccaccgaccccgaaaccccctag

SEQ ID NO: 287554 - DNA, 657 bp, Artificial Sequence
  derived and/or modified sequence
atgggtacttcccacccggctttcctcgtccttgggtgtctgttgaccgggctgtctcttatcctctgtcagctttccctgccaagtatcttgcccaacgagaatgagaaagtggtgcagttgaattcaagtttttcactaagatgcttcggggagtctgaggtttcatggcagtatccaatgtctgaggaggagagttctgacgttgagattcggaacgaagagaataacagcgggctgtttgtgaccgtattggaagtcagcagcgccagcgccgcacacaccgggctgtacacatgttattacaatcacacccagaccgaagaaaacgaactggagggtcgtcatatctacatctacgtgcctgatccagacgtagccttcgtgcccctgggaatgactgattatcttgtgattgtagaggatgatgacagtgcgattattccttgtcgtacaaccgacccggagactcccgtgacactgcacaattctgagggcgtcgtgccggccagctatgacagtcggcagggcttcaatggcactttcacggtcggtccatacatttgcgaagcaaccgtaaaggggaagaagtttcagaccataccattcaatgtgtacgccctgaagggcacctgcatcataagcttcttgttgtag

SEQ ID NO: 287555 - DNA, 465 bp, Artificial Sequence
  derived and/or modified sequence
atgggaacgagccatcccgcattcttggtgctgggctgtctattgactggtctctctttgatactatgccagttaagcttgccctcaatactgcctaacgagaacgagaaagtcgttcaactgaattcctcctttagcctgaggtgcttcggtgagagcgaggtgtcatggcagtaccctatgagtgaagaagagtcctctgacgtggagattcggaacgaagaaaataactccgggttatttgtcactgttctggaggtcagctccgcatccgccgcccacacaggactgtacacatgttattataaccacacacaaacagaggaaaacgagttagagggacgccacatctacatatacgtaccggacccggacgtggcttttgttccactgggtatgacggactacctcgtgatcgtagaagacgacgactccgcgatcataccatgcagaacaacagattag

SEQ ID NO: 287556 - DNA, 480 bp, Artificial Sequence
  derived and/or modified sequence
atgggcaccagccacccagccttcctggtgctgggctgcctgctgaccggcctgagcctcatcctgtgccagctgagcctgcccagcatcctgcccaatgaaaatgagaaggtggtgcagctgaacagcagcttcagcctgcgctgcttcggggagagcgaggtgtcctggcagtaccccatgtctgaggaggagagcagtgatgtggagatcagaaatgaggagaacaacagcggcctgtttgtgacagtgctggaggtgtcctctgccagcgctgcccacacaggcctgtacacctgctactacaaccacacccagacagaagaaaatgagctggagggccgccacatctacatctacgtgcctgaccctgatgtggcctttgtgcccctgggcatgacagactacctggtgattgtggaggatgatgattctgccatcatcccctgcaggaccacagatcctgagacccctgtgtag

SEQ ID NO: 287557 - DNA, 477 bp, Artificial Sequence
  derived and/or modified sequence
atgggcaccagccacccagccttcctggtgctgggctgcctgctgaccggcctgagcctcatcctgtgccagctgagcctgcccagcatcctgcccaatgaaaatgagaaggtggtgcagctgaacagcagcttcagcctgcgctgcttcggggagagcgaggtgtcctggcagtaccccatgtctgaggaggagagcagtgatgtggagatcagaaatgaggagaacaacagcggcctgtttgtgacagtgctggaggtgtcctctgccagcgctgcccacacaggcctgtacacctgctactacaaccacacccagacagaagaaaatgagctggagggccgccacatctacatctacgtgcctgaccctgatgtggcctttgtgcccctgggcatgacagactacctggtgattgtggaggatgatgattctgccatcatcccctgcaggaccacagatcctgagaccccctag

SEQ ID NO: 287558 - DNA, 657 bp, Artificial Sequence
  derived and/or modified sequence
atgggcaccagccacccagccttcctggtgctgggctgcctgctgaccggcctgagcctcatcctgtgccagctgagcctgcccagcatcctgcccaatgaaaatgagaaggtggtgcagctgaacagcagcttcagcctgcgctgcttcggggagagcgaggtgtcctggcagtaccccatgtctgaggaggagagcagtgatgtggagatcagaaatgaggagaacaacagcggcctgtttgtgacagtgctggaggtgtcctctgccagcgctgcccacacaggcctgtacacctgctactacaaccacacccagacagaagaaaatgagctggagggccgccacatctacatctacgtgcctgaccctgatgtggcctttgtgcccctgggcatgacagactacctggtgattgtggaggatgatgattctgccatcatcccctgcaggaccacagatcctgagacccctgtgaccctgcacaacagcgagggcgtggtgcctgccagctatgacagccggcagggcttcaacggcaccttcaccgtgggcccctacatctgtgaggccaccgtgaagggcaagaagttccagaccatccccttcaacgtgtatgccctgaagggcacctgcatcatctccttcctgctgtag

SEQ ID NO: 287559 - DNA, 465 bp, Artificial Sequence
  derived and/or modified sequence
atgggcaccagccacccagccttcctggtgctgggctgcctgctgaccggcctgagcctcatcctgtgccagctgagcctgcccagcatcctgcccaatgaaaatgagaaggtggtgcagctgaacagcagcttcagcctgcgctgcttcggggagagcgaggtgtcctggcagtaccccatgtctgaggaggagagcagtgatgtggagatcagaaatgaggagaacaacagcggcctgtttgtgacagtgctggaggtgtcctctgccagcgctgcccacacaggcctgtacacctgctactacaaccacacccagacagaagaaaatgagctggagggccgccacatctacatctacgtgcctgaccctgatgtggcctttgtgcccctgggcatgacagactacctggtgattgtggaggatgatgattctgccatcatcccctgcaggaccacagactag

SEQ ID NO: 287560 - DNA, 480 bp, Artificial Sequence
  derived and/or modified sequence
atgggcaccagccaccccgccttcctggtgctgggctgcctgctgactggtctttccttgatcctgtgccagctgtccctgccttcaatactcccaaacgagaacgagaaagtagtacagctcaattcctccttctcactccgctgtttcggcgagtcagaagtctcatggcagtatccgatgtccgaagaggagagttctgatgttgagattagaaacgaggagaacaacagtggactgtttgtgaccgttctggaggtgagtagcgcatccgctgctcataccggcttgtatacatgttattataaccacactcagactgaagaaaatgagcttgaagggaggcacatttacatttacgtgcctgatccagatgttgcatttgtaccacttggcatgacagactatcttgtcatcgtggaggatgatgactctgcaattatcccttgtagaaccactgacccagaaacaccagtgtag

SEQ ID NO: 287561 - DNA, 477 bp, Artificial Sequence
  derived and/or modified sequence
atgggcaccagccaccccgccttcctggtgctgggctgcctgctgacgggcctctcactgattctgtgccagctttcgcttcctagtatccttccaaacgagaatgagaaggtggtgcagctgaacagctcctttagtcttcgatgtttcggggagtcagaggtttcctggcagtaccctatgagtgaggaggaaagtagcgacgtggagatccgcaatgaggagaataacagtggcctctttgttactgtcctggaggtctcttccgcctctgcagctcacacaggactgtacacatgctactataaccacacccagaccgaagagaatgaattagaaggcagacatatatatatctacgtccccgacccagacgtcgcctttgttccgctcggaatgacagactaccttgtgatagtggaagatgacgattccgctatcataccttgtaggacgacagatcctgagacaccctag

SEQ ID NO: 287562 - DNA, 657 bp, Artificial Sequence
  derived and/or modified sequence
atgggcaccagccaccccgccttcctggtgctgggctgcctgctgacaggcctcagcctgatcctgtgtcagttatccctcccgtcaattttgcctaacgaaaacgagaaggttgtccagttgaattcatccttttcacttaggtgctttggagagtctgaagtgtcttggcagtacccgatgagcgaagaggagagttctgacgtggaaattcgcaacgaggaaaacaattcaggcctgttcgtaaccgtcctcgaggtgtcctctgcttcagcggctcatactggcctctatacatgttattataaccacacacagaccgaggaaaacgaacttgaaggcagacacatctacatctacgtcccagatcccgatgttgcctttgttccactaggcatgacagattacctggtgattgtagaagacgatgattctgcgatcataccctgtcgcaccaccgaccctgaaacacccgtgacactccataattcagagggtgttgttccagctagctatgattcccggcaggggtttaacggaacctttactgtcggcccatatatttgcgaagccaccgtcaaaggaaaaaagttccagaccatcccctttaatgtctacgcgcttaaaggtacttgtatcatctccttcctgctttag

SEQ ID NO: 287563 - DNA, 465 bp, Artificial Sequence
  derived and/or modified sequence
atgggcaccagccaccccgccttcctggtgctgggctgcctgctgacaggcctctccctaatcctgtgccaactatcactcccgagcatcctccccaatgagaatgaaaaggttgtacaactgaatagttcgttctccctacgatgtttcggggagagtgaggtctcatggcagtatccaatgtccgaagaggagtcatctgatgtcgagatcagaaatgaggaaaacaattctggactattcgtcaccgtacttgaagtcagcagcgccagtgccgcacatacaggattgtatacgtgctactacaatcatacccagactgaagaaaacgagctcgagggacgccacatctatatttatgtacctgatcccgacgtcgcatttgtgccgttaggtatgactgattacctggtgatagtagaggatgacgactctgcaatcatcccatgcagaaccacagattag

SEQ ID NO: 287564 - DNA, 480 bp, Artificial Sequence
  derived and/or modified sequence
atggggacttctcaccctgcatttttagtgctcggctgcctgctcaccggcctttccctcatattgtgccagttgagtcttccttctattctcccgaacgagaacgaaaaggtcgtgcagttgaattcttccttttccttgagatgctttggagagtccgaggtgtcctggcagtaccctatgtcagaagaggagtctagtgacgtggaaatacggaacgaggaaaataactctggactgtttgtaaccgttctggaggtgtctagcgcatctgcagcacatacgggactttacacatgttactacaatcacacccagacagaagagaatgaactggaaggtagacacatctatatttacgtgcccgatccagacgtagcatttgttcctttgggcatgactgattaccttgtcatcgtggaggacgatgattcagccattataccttgtcggacaacagaccctgagacacctgtgtag

SEQ ID NO: 287565 - DNA, 477 bp, Artificial Sequence
  derived and/or modified sequence
atggggacatcacaccccgcattcctggtccttggatgcctgctaactggcctgtcacttatcttgtgccagctgtctttgccatctatcctgcccaacgaaaatgagaaggtggtgcaactgaattcgtcgtttagcctgaggtgtttcggcgaatcggaagtgagttggcagtacccaatgtccgaagaggaatcttctgacgtggagatcagaaacgaagaaaataactctggtctgttcgttaccgtgctggaggtgtctagcgcttctgcggctcacaccgggttgtacacctgctactacaaccacactcaaactgaggaaaacgagctggaggggagacatatttacatttatgtccccgacccagatgtcgcttttgtcccactcggaatgaccgactacctggtgattgttgaggatgatgattctgccattattccttgcagaacaactgatcctgagactccttag

SEQ ID NO: 287566 - DNA, 657 bp, Artificial Sequence
  derived and/or modified sequence
atggggacctctcatcctgccttcctggtgctcgggtgcctcctcaccggtcttagcctgattctctgccagctttctctgccctctattctcccgaatgagaatgaaaaagttgtacagctgaacagctcttttagtttacgctgcttcggggaatctgaagtgagttggcagtacccaatgagtgaggaagagtcctcagacgtagagattcggaatgaagaaaacaacagcggcctatttgtgactgtcctggaggtgagtagtgcatccgctgcccacaccggcttatacacatgttactataatcacacccagactgaagaaaacgaactggaaggcagacacatctatatctacgtgcccgatcctgacgttgctttcgtacccttaggtatgaccgattacctggtcatagttgaagacgacgactcagcgattatcccttgccgaactactgatccagaaacacctgtcacgctgcataattccgagggggttgtgccagcctcctatgattctcgccaggggttcaatggcacattcacagtggggccttacatctgtgaggctacagtgaaagggaagaagtttcagactatccctttcaacgtgtatgcactcaaaggcacgtgcatcatttcgtttctgctctag

SEQ ID NO: 287567 - DNA, 465 bp, Artificial Sequence
  derived and/or modified sequence
atgggcactagccatccagccttcctggtgctcggctgtctgctcaccgggctgtccctcattctgtgccagctatcccttccaagcatactgcccaacgagaatgaaaaagttgttcaactgaacagtagtttttccctgcgctgtttcggtgagagcgaagttagctggcagtaccccatgtcagaagaggagtcctccgacgtggaaatacgcaacgaggagaacaattcgggcctgttcgtgactgtccttgaggtgtcctccgcatcagcggctcacactgggctttacacatgctattataatcatactcaaactgaagaaaacgagctagaggggcgtcacatttacatctacgtgcccgacccagatgtggcgtttgtgcctctggggatgaccgattatctggttattgtagaggacgacgatagcgccatcattccctgcagaaccaccgactag

SEQ ID NO: 287568 - DNA, 586 bp, Artificial Sequence
  derived and/or modified sequence
gacaggttttaaatgagtgttttcattcctcgcctgcggtttggcgggacagcgctgcagcccatggtgtggagcgcggctgggggaccagggggagtttcccagagctatggggacttcccatccggcgttcctggtcttaggctgtcttctcacagggctgagcctaatcctctgccagctttcattaccctctatccttccaaatgaaaatgaaaaggttgtgcagctgaattcatccttttctctgagatgctttggggagagtgaagtgagctggcagtaccccatgtctgaagaagagagctccgatgtggaaatcagaaatgaagaaaacaacagcggcctttttgtgacggtcttggaagtgagcagtgcctcggcggcccacacagggttgtacacttgctattacaaccacactcagacagaagagaatgagcttgaaggcaggcacatttacatctatgtgccagacccagatgtagcctttgtacctctaggaatgacggattatttagtcatcgtggaggatgatgattctgccattataccttgtcgcacaactgatcccgagactcctgta

SEQ ID NO: 287569 - DNA, 771 bp, Artificial Sequence
  derived and/or modified sequence
catttggccctgagtgaagaagtcgtcgtcgcctcgcattccagcaactgggatttgaggaatttcgaaccgcacaccaaggggccctcattgtgctccgtggcccccgcccccgcctgtcttcccgcgccccctcctcggtggaatcatttctgcattgcccgggggctctgctttcgctcagttctggccgcaggcaggaagagaggaaaggtctccaggaaggtgccgaacttcttgtgaggaagttagggacgacttggaactggggaaacttgtttgcagtttcccagagctatggggacttcccatccggcgttcctggtcttaggctgtcttctcacagggctgagcctaatcctctgccagctttcattaccctctatccttccaaatgaaaatgaaaaggttgtgcagctgaattcatccttttctctgagatgctttggggagagtgaagtgagctggcagtaccccatgtctgaagaagagagctccgatgtggaaatcagaaatgaagaaaacaacagcggcctttttgtgacggtcttggaagtgagcagtgcctcggcggcccacacagggttgtacacttgctattacaaccacactcagacagaagagaatgagcttgaaggcaggcacatttacatctatgtgccagacccagatgtagcctttgtacctctaggaatgacggattatttagtcatcgtggaggatgatgattctgccattataccttgtcgcacaactgatcccgagactcct

SEQ ID NO: 287570 - DNA, 2202 bp, Artificial Sequence
  derived and/or modified sequence
ggtttttgagcccattactgttggagctacagggagagaaacagaggaggagactgcaagagatcattggaggccgtgggcacgctctttactccatgtgtgggacattcattgcggaataacatcggaggagaagtttcccagagctatggggacttcccatccggcgttcctggtcttaggctgtcttctcacagggctgagcctaatcctctgccagctttcattaccctctatccttccaaatgaaaatgaaaaggttgtgcagctgaattcatccttttctctgagatgctttggggagagtgaagtgagctggcagtaccccatgtctgaagaagagagctccgatgtggaaatcagaaatgaagaaaacaacagcggcctttttgtgacggtcttggaagtgagcagtgcctcggcggcccacacagggttgtacacttgctattacaaccacactcagacagaagagaatgagcttgaaggcaggcacatttacatctatgtgccagacccagatgtagcctttgtacctctaggaatgacggattatttagtcatcgtggaggatgatgattctgccattataccttgtcgcacaactgatcccgagactcctgtaaccttacacaacagtgagggggtggtacctgcctcctacgacagcagacagggctttaatgggaccttcactgtagggccctatatctgtgaggccaccgtcaaaggaaagaagttccagaccatcccatttaatgtttatgctttaaaaggtacttgtatcatctccttccttctttaaataagagtaacaggcaaaatcataaggtgcgtgtaggatttttttttttttttaaatcatcatcactggtgatcctaaattctgatttggggatttaggaccccagctaatacaatgtctgtggctataataataagcttaaaattactaaaggccaaagcttgattacccatgcaagatttcatgtttcatcagttgacttcaaaatactgtaaggaattcttttcttacataagcctcttactttcattcacattcctgactatggcggccctaaaaacaaacatacacccagggggttagatgcctagattaattttagtaacttaagaaaagtgatttgaagaaagtagtttagacttcaaccctttgatgtccacagttagtacgcttggggaagtataatacatgctgaggtcaacagatatttcctgaacactatattacatggaggaatgggtagcagcaagagtacactgttttaaaatcagagcacagctaattttgtgccaggcactgtgctaggttctgggaaagtactgagaataactgaggagcagagtggaagagaagaagagaagaaacaattggatagaaacaaagtgtctagagcagtgtggatcagcaaatgttggttgattaaatgaataaatttattagtcaaggagattgtggacgagtataaccataactaacccactgctgaggaatgcggtgttctgtttgattggaatttatttttattgttattattttgtaattctgtattataactatatgcctaattgttgtacaccatctcacaatcaagccttgtgagattttccaaattttatcttgatcaaactggtttgcaaattatttttcagggttttcttaaaaaaaaaaaaaaaaacccaaactttataagatcctggctatcctgtggatttttaggcccttgtatttgttcttttttatagcaacatcagagctggatctagaaatggaagctcttaaaaccgtgtataagtcaggggaaacgattgtggtcacctgtgctgtttttaacaatgaggtggttgaccttcaatggacttaccctggagaagtggtaggtaccctcaaaacgtgcaatggcttggagcagagcaacagggctcagaagacctgcatttgagctcggtctgtcactgatgggcacatcactgagtttctctagaccttagcttcccacctctgggatgaacacatttgattaaatggcctttaggactccttgatcaatgggagagtttgaaatgatagttcctggaccaggcccttcagaatacataaagagtgtgccgtaagccttctttttcagaagtcagacagaaataggaaggttctctggctacaagatatcaaccaaaaaa

SEQ ID NO: 287571 - DNA, 573 bp, Artificial Sequence
  derived and/or modified sequence
gaggttggagccaagatggctgaataggaacagctccggtctacagctcccagcatcagcgatgcagaagatgggtgatttctgcatttccatctgagtttcccagagctatggggacttcccatccggcgttcctggtcttaggctgtcttctcacagggctgagcctaatcctctgccagctttcattaccctctatccttccaaatgaaaatgaaaaggttgtgcagctgaattcatccttttctctgagatgctttggggagagtgaagtgagctggcagtaccccatgtctgaagaagagagctccgatgtggaaatcagaaatgaagaaaacaacagcggcctttttgtgacggtcttggaagtgagcagtgcctcggcggcccacacagggttgtacacttgctattacaaccacactcagacagaagagaatgagcttgaaggcaggcacatttacatctatgtgccagacccagatgtagcctttgtacctctaggaatgacggattatttagtcatcgtggaggatgatgattctgccattataccttgtcgcacaactgatc

SEQ ID NO: 287572 - DNA, 324 bp, Artificial Sequence
  derived and/or modified sequence
atgaccggccggatggccaccctggagaagagccacagcagcgcctgctggaggaaaaggtcttcaagaacctgcgtggaacctgaccgaacccaggacgccattcatgagccaagaggtctgagccggagtcataccgtgttaaggcatcgccacttcgtcttcctcccactgagcagcggcgcccatcccagcgtccctccacggcgtaagaattgcgcaatgaaaaatggaaagctactgcgatcctgtagctccgtcaggagggccgctgacaaactggactgggggcggttcttcctccaggatctacaatctgtctag

SEQ ID NO: 287573 - DNA, 240 bp, Artificial Sequence
  derived and/or modified sequence
atgaagctggccaagaccgccgtgctggaccccgccacctacaccagcttttctcctggtctttccacttgttcctcctctcagccacctggcgaccgacgaaaggggctgctgggctgtgtggggagcggtcactgtcccctcccaactcccgctcagtttccgaaggttcagcgtcccccaacactgttgggggggaagaatacttccactcagacaaccctgcacccggtgatttag

SEQ ID NO: 287574 - DNA, 750 bp, Artificial Sequence
  derived and/or modified sequence
atgaccaccgccgtggagagaaagtacatcaacatcagaaagagactggaccagctgggctacagacagaccctgaccgtggagtgcctgcccctggtggagaagctgttcagcgacctggtgcacaccaccgagagcctgagacagagcaagctgagcgccgtgaaggccgagaaggagagcgccaacttcgacttcgtgctggagccctacaagctggagaacgccagactgagcagagagaacaacgagctgtacctggagctgatgaagctgagagagcacagcgaccagcacgtgaaggagctgaagaccagcctgaagaagtgcgccagagagaccgccgacctgaagttcctgaacaaccagtacgcccacaagctgaagctgctggagaaggagagcaaggccaagaacgagagaatccagcagctgcaggagaagaacctgcacgccgtggtgcagacccccggcggcaagaagagaagcatcgccttcagaagacagagaatgcagatcgacgagcccgtgccccccagcgaggtgagcagctaccccgtgccccagcccgacgacccctacatcgccgacctgctgcaggtggccgacaacagaatccaggagctgcagcaggaggtgcaccagctgcaggagaagctggccatgatggagagcggcgtgagagactacagcaagcaggtgggcttcctgttcacctgcatcgtgggcatcgagatcggcatgctgtag

SEQ ID NO: 287575 - DNA, 750 bp, Artificial Sequence
  derived and/or modified sequence
atgaccacggcagtggagcgaaagtacattaacattagaaagaggctggatcagcttggttaccgacaaacacttaccgtcgagtgcttacccctggtagaaaagctgtttagtgatctggtccacacgaccgagagcctcaggcagtctaaactctccgcagtgaaggcagagaaggaatcagccaattttgattttgtgttggaaccttataaactggaaaacgctcgactgtcccgggagaacaatgagctgtatcttgaactgatgaaactgcgcgagcacagcgaccagcacgttaaagagctcaagacgagcctgaagaagtgcgccagggagacggcagaccttaagttcctcaacaatcaatatgcacataagctgaagctcctggaaaaggaatctaaggcaaaaaatgagcggatccagcaacttcaagagaagaatctgcacgcggtagtccaaactcctggaggcaagaaaagaagcatcgccttccggaggcagcggatgcagattgacgagccagtgccccccagcgaagtgagtagctaccctgtgccccaacccgatgatccttacatcgcggatttgcttcaggtggctgataatagaatacaagagctgcagcaggaagtgcatcagctgcaggaaaaactggccatgatggagtccggtgtcagagattattcgaagcaggtgggatttctgtttacctgtattgtgggcattgagataggaatgctgtag

SEQ ID NO: 287576 - DNA, 750 bp, Artificial Sequence
  derived and/or modified sequence
atgaccacagctgtggagaggaagtacatcaacatcaggaagaggctggaccagctgggctaccggcagaccctgactgtggagtgcctgcccctggtggagaagctgttcagtgacctggtgcacaccacagagagcctgcggcagagcaagctgtctgctgtgaaggccgagaaggagagcgccaactttgattttgtgctggagccctacaagctggagaatgcccggctgagcagagaaaataatgagctgtacctggagctgatgaagctgcgggagcacagcgaccagcacgtgaaggagctgaagaccagcctgaagaagtgtgcccgggagacagctgacctgaagttcctgaacaaccagtatgcccacaagctgaagctgctggagaaggagagcaaggccaagaatgaaagaatccagcagctgcaggagaagaacctgcatgctgtggtgcagaccccaggcggcaagaagaggagcatcgccttccggcggcagaggatgcagattgatgagcctgtgccccccagcgaggtgagcagctaccctgtgccccagccagatgacccctacatcgctgacctgctgcaggtggccgacaaccgcatccaggagctgcagcaggaggtgcaccagctgcaggagaagctggccatgatggagagcggcgtgcgggactacagcaagcaggtgggcttcctgttcacctgcatcgtgggcatcgagatcggcatgctgtag

SEQ ID NO: 287577 - DNA, 750 bp, Artificial Sequence
  derived and/or modified sequence
atgaccaccgccgtggagcggaagtacatcaacatccggaagcggttagaccagctgggctacaggcagaccctgactgtggagtgcctacccctggtcgaaaagcttttctcggatttggtccacacaacagagtctctgaggcagtctaagctctcagctgtgaaagccgagaaggagagtgcgaacttcgactttgtcctcgagccttacaagctggaaaacgcacggctttctagagagaacaatgagctttacctcgaactgatgaagctgagagaacactctgaccagcatgtgaaagagctgaaaacgtccctgaagaagtgtgcacgcgaaacggctgaccttaaatttctgaacaatcagtatgcgcacaagcttaagttattggagaaagagagcaaggcaaaaaacgaaagaattcaacaactccaggaaaagaacctgcacgcagtggtgcagaccccaggagggaagaagcgctctattgcattcagacgtcagagaatgcagatcgatgagccagtgcccccttctgaggtgtcctcctaccccgttcctcagcccgacgacccttatatcgcggaccttctgcaggtggcagataacagaattcaggaactccagcaagaggtgcaccaacttcaggagaaacttgccatgatggagtcgggagtgagggactactctaagcaggttgggtttctgtttacttgtatagtgggtatcgagattgggatgttgtag

SEQ ID NO: 287578 - DNA, 750 bp, Artificial Sequence
  derived and/or modified sequence
atgacaactgcagtggagcgtaaatacatcaacattcgcaagaggcttgaccagcttggatatcggcaaaccttgaccgtggagtgtctgcccctcgtggaaaagctcttttccgatctggtgcataccaccgaatctcttagacagagtaagctaagcgccgtcaaggctgagaaggaatcggccaacttcgactttgtgcttgaaccctacaaactcgaaaatgccagactgagtcgagaaaacaatgagttgtacctagaactcatgaagcttagagagcacagcgatcaacacgtgaaagaactgaaaacatccctgaaaaagtgcgccagagagaccgccgacctcaagttcctaaataatcagtatgcccataagctcaaattgctcgaaaaggagagtaaagccaaaaacgaaagaatacagcaattacaagagaaaaacttgcacgctgtggttcagacacccggtggcaaaaagcgctcaatcgcatttaggcgacagcggatgcaaatcgatgaacctgttccgcctagcgaggtgagtagttaccccgtcccccagccggacgacccctacatcgcagacttgctgcaggtggctgataatcgtatacaggagctgcagcaagaggtgcatcagctacaggagaaactggccatgatggagtctggcgtgagggattatagcaagcaagtgggctttctttttacctgcatagtggggattgaaatcggcatgctgtag

SEQ ID NO: 287579 - DNA, 2092 bp, Artificial Sequence
  derived and/or modified sequence
aatcgtccgccgctcccgttaccggggcaaccgcggcgcctcctccgtgtcggccccgatcgtccctccgcgccattttcaaactgctctagcgccggagcccgtgcctggacggaaggagctagtgggggactcgaggcctgagggcaatgcggctggaggcggaggcaacggcggctggagctgccggactttaatttttggaagtgaataaaacttgttttagaagacgagatgactacagctgtagagagaaagtatattaatattaggaaaaggctggatcagctgggataccgccagactctgacagtggagtgtttacctttggtagaaaaacttttcagcgacttagttcatacaactgagagccttcggcaatcaaaattatctgctgtgaaagctgaaaaagaaagtgccaattttgattttgttttggaaccctataaacttgaaaatgcaagattgagtagagaaaataatgaattatacctagagttaatgaaactgagagaacattcagaccaacacgttaaagagttgaaaacttcattgaagaaatgtgcacgtgaaacagctgatctgaaatttctgaataaccaatatgctcataaactcaaactgttggagaaagagagcaaagctaagaatgaaagaattcaacaacttcaagaaaagaatttgcatgctgtagtacaaactccaggtggcaagaaaagaagtattgctttcaggcgccagcgtatgcaaattgatgaaccggttcctccctctgaagtcagttcatatccagttcctcaaccagatgacccttacattgcagacctccttcaagtggctgataacaggattcaagaacttcaacaggaagtccaccagctacaagaaaagttagcaatgatggaaagtggggtgagagactatagcaagcaggtaggatttttatttacttgcatagtagggattgagataggtatgctgtgattgtaaatagaattgggttatatttgaaattgctgatactgagtttttatacagctttcctctttttcatcaggtttgttaatagagttaatagctggaatggcttaggtggctttacttacttagcctgtctcttcaaaaaatttaaaaattagccaagtgtggtggcatgtgcctatggtcccaggtacttgggaggctgaggtgggaggattaatggattgaagagcacttatttactcgattctcttcactattcattgaggtgaatagtagttttttgtttggtttttcttttagctgaatcatctatctccccaaatataattttataaccatattaccgttttcatctcaggagacattttattaagtgtgctatgttttataattgtatttttgtgatttttctactcttattatatattttgtcatattgaacaccagtctcttagaaagttactcttttgtgttgctaatttttttgtttgttttctctataagcacaagtcctcatacaacagttttctgaagaatcaggagaattagtagatgcagagttatattataaccatagcaagctttgtcttttcataatttctattgatgtcttggctaaattttgatttgggtaattataggcttgttttcttaatatgcttcttgaaggttaaattgggtaacatgtttttcattttctgcattgactgcattttttttgagtgatctgcacacacaaatatagatgtaacttaggtgttggtataactaaatctttaaagtgttttgaagattagttggataaaaatggagttaaagaaaattgaccaggcgtggtggctcatgcctgtaatcgcagcactttgggaggccgaggcgggtggatcacttgagatcagaagtttgagaccatcctggccaacatggtgaaacctcatctctactaaaaatacaaaaaattagccgggcgtagtggcgggcgcctgtagtcccagctacttgggaggctgaggcaggagaatggcgtgaacccgggaggcggagcttgcagtgagccgagatcccgccactgcactccagcctgggcgacagagcgagactccgtctc

SEQ ID NO: 287580 - protein, 454 aa, Artificial Sequence
  derived and/or modified sequence
MGDEDKRITYEDSEPSTGMNYTPSMHQEAQEETVMKLKGIDANEPTEGSILLKSSEKKLQETPTEANHVQRLRQMLACPPHGLLDRVITNVTIIVLLWAVVWSITGSECLPGGNLFGIIILFYCAIIGGKLLGLIKLPTLPPLPSLLGMLLAGFLIRNIPVINDNVQIKHKWSSSLRSIALSIILVRAGLGLDSKALKKLKGVCVRLSMGPCIVEACTSALLAHYLLGLPWQWGFILGFVLGAVSPAVVVPSMLLLQGGGYGVEKGVPTLLMAAGSFDDILAITGFNTCLGIAFSTGSTVFNVLRGVLEVVIGVATGSVLGFFIQYFPSRDQDKLVCKRTFLVLGLSVLAVFSSVHFGFPGSGGLCTLVMAFLAGMGWTSEKAEVEKIIAVAWDIFQPLLFGLIGAEVSIASLRPETVGSADSITGNFGTERPKLLGPPSTQLRFHFFHIQLST

SEQ ID NO: 287581 - protein, 537 aa, Artificial Sequence
  derived and/or modified sequence
MGDEDKRITYEDSEPSTGMNYTPSMHQEAQEETVMKLKGIDANEPTEGSILLKSSEKKLQETPTEANHVQRLRQMLACPPHGLLDRVITNVTIIVLLWAVVWSITGSECLPGGNLFGIIILFYCAIIGGKLLGLIKLPTLPPLPSLLGMLLAGFLIRNIPVINDNVQIKHKWSSSLRSIALSIILVRAGLGLDSKALKKLKGVCVRLSMGPCIVEACTSALLAHYLLGLPWQWGFILGFVLGAVSPAVVVPSMLLLQGGGYGVEKGVPTLLMAAGSFDDILAITGFNTCLGIAFSTGSTVFNVLRGVLEVVIGVATGSVLGFFIQYFPSRDQDKLVCKRTFLVLGLSVLAVFSSVHFGFPGSGGLCTLVMAFLAGMGWTSEKAEVEKIIAVAWDIFQPLLFGLIGAEVSIASLRPETVGLCVATVGIAVLIRILTTFLMVCFAGFNLKEKIFISFAWLPKATVQAAIGSVALDTARSHGEKQLEDYGMDVLTVAFLSILITAPIGSLLIGLLGPRLLQKVEHQNKDEEVQGETSVQV

SEQ ID NO: 287582 - protein, 143 aa, Artificial Sequence
  derived and/or modified sequence
MGDEDKRITYEDSEPSTGMNYTPSMHQEAQEETVMKLKGIDANEPTEGSILLKSSEKKLQETPTEANHVQRLRQMLACPPHGLLDRVITNVTIIVLLWAVVWSITGSECLPGGNLFGIIILFYCAIIGGKLLGLIKLPTLPPL

SEQ ID NO: 287583 - DNA, 1614 bp, Artificial Sequence
  derived and/or modified sequence
atgggcgacgaggacaagagaatcacctacgaggacagcgagcccagcaccggcatgaactacacccccagcatgcaccaggaggcccaggaggagaccgtgatgaagctgaagggcatcgacgccaacgagcccaccgagggcagcatcctgctgaagagcagcgagaagaagctgcaggagacccccaccgaggccaaccacgtgcagagactgagacagatgctggcctgccccccccacggcctgctggacagagtgatcaccaacgtgaccatcatcgtgctgctgtgggccgtggtgtggagcatcaccggcagcgagtgcctgcccggcggcaacctgttcggcatcatcatcctgttctactgcgccatcatcggcggcaagctgctgggcctgatcaagctgcccaccctgccccccctgcccagcctgctgggcatgctgctggccggcttcctgatcagaaacatccccgtgatcaacgacaacgtgcagatcaagcacaagtggagcagcagcctgagaagcatcgccctgagcatcatcctggtgagagccggcctgggcctggacagcaaggccctgaagaagctgaagggcgtgtgcgtgagactgagcatgggcccctgcatcgtggaggcctgcaccagcgccctgctggcccactacctgctgggcctgccctggcagtggggcttcatcctgggcttcgtgctgggcgccgtgagccccgccgtggtggtgcccagcatgctgctgctgcagggcggcggctacggcgtggagaagggcgtgcccaccctgctgatggccgccggcagcttcgacgacatcctggccatcaccggcttcaacacctgcctgggcatcgccttcagcaccggcagcaccgtgttcaacgtgctgagaggcgtgctggaggtggtgatcggcgtggccaccggcagcgtgctgggcttcttcatccagtacttccccagcagagaccaggacaagctggtgtgcaagagaaccttcctggtgctgggcctgagcgtgctggccgtgttcagcagcgtgcacttcggcttccccggcagcggcggcctgtgcaccctggtgatggccttcctggccggcatgggctggaccagcgagaaggccgaggtggagaagatcatcgccgtggcctgggacatcttccagcccctgctgttcggcctgatcggcgccgaggtgagcatcgccagcctgagacccgagaccgtgggcctgtgcgtggccaccgtgggcatcgccgtgctgatcagaatcctgaccaccttcctgatggtgtgcttcgccggcttcaacctgaaggagaagatcttcatcagcttcgcctggctgcccaaggccaccgtgcaggccgccatcggcagcgtggccctggacaccgccagaagccacggcgagaagcagctggaggactacggcatggacgtgctgaccgtggccttcctgagcatcctgatcaccgcccccatcggcagcctgctgatcggcctgctgggccccagactgctgcagaaggtggagcaccagaacaaggacgaggaggtgcagggcgagaccagcgtgcaggtgtag

SEQ ID NO: 287584 - DNA, 1614 bp, Artificial Sequence
  derived and/or modified sequence
atgggggatgaggataaacggatcacttacgaggatagcgagccttcaaccggtatgaattacactccctcaatgcatcaggaggcccaggaagagaccgttatgaagctaaaaggtattgatgctaacgaaccaacggaaggcagcattctgttaaagtcatctgaaaagaagctgcaggaaaccccaactgaggcaaatcacgtgcaaagactgcgtcagatgctcgcttgcccgccccacggtttgctggatagggtcattaccaatgtgacaataatcgtcctcctttgggcggtcgtgtggtctatcaccggctcggagtgccttcccggagggaatctgttcggcattattatcctcttttactgcgcaataatcggcgggaaattgctaggtctgatcaaactaccaactctccctccacttccttccttactgggaatgctgttggccggcttcctgatccgaaatattccagtcattaatgacaacgtgcagattaagcataaatggtcttcaagccttcggagcatcgcactctcaatcatactcgttcgagccggactgggattggactccaaagctttaaagaagctaaaaggtgtttgtgtgcgactctcgatgggcccatgtattgtggaggcatgcacatctgctctccttgcccactacctcttgggactgccttggcagtgggggttcatcctgggttttgtcctcggagccgtgagccctgcagttgtggtgccttccatgctgctgctacaaggaggcggatacggtgtggaaaagggggtaccaactctcttaatggccgcaggcagtttcgatgacatcctggccatcaccgggttcaacacgtgcctgggcatcgcatttagcacaggctctacagtcttcaacgtgcttcgcggagtattggaggtggtaatcggcgtggcaaccggctccgtgcttggattttttatccagtactttccgagccgagatcaggataagctggtgtgtaagcggacattcctcgttcttgggctttcagtccttgccgttttttcatctgtacactttggcttccccggctccgggggcctgtgcaccctcgtcatggcctttctggccggaatgggctggacgtctgagaaggctgaggtggaaaagatcattgccgtggcatgggacatatttcagccactcttgttcgggctgatcggcgctgaggttagcatcgcctccttgcgcccggagaccgtggggctttgcgtggctacagtcggaatcgctgtgctaattcgtatcctgactacgtttttaatggtctgcttcgcaggtttcaacttaaaggagaagattttcataagcttcgcctggttgccgaaagcgaccgtacaggcggcgattggcagcgttgccttagacaccgcccgctcccacggagagaagcagttagaagattatggcatggacgtactcactgtggcctttctgtctatccttatcacagccccaatagggtctctcctcataggcctgctaggtcccaggctgcttcaaaaggtggagcaccaaaataaagatgaagaagttcagggcgagactagtgttcaggtgtag

SEQ ID NO: 287585 - DNA, 1614 bp, Artificial Sequence
  derived and/or modified sequence
atgggcgatgaagacaaacgcattacctatgaggattctgaaccctccactgggatgaattatacaccctctatgcaccaggaggcccaggaggaaactgtcatgaagctgaagggaattgacgcaaatgaaccaactgagggcagcatcctgctgaaatcctctgaaaagaagctgcaggagacaccaacagaggcaaatcacgtccaaaggctgcggcaaatgctcgcgtgcccaccacacggacttctggacagagtcatcacaaatgtgacaataattgttctcctgtgggctgtcgtttggtctattacaggctctgaatgtctgccaggtggaaatttattcggtattatcatccttttctattgcgccatcataggagggaagctgcttggccttattaaactacccacgctcccgccgttgccaagcctgctgggaatgctccttgccgggttcctgattcgaaatattcctgtaattaacgataatgtccaaatcaaacataagtggtcatctagtttgcgatcaatcgctttgtcaatcattctcgtgagagctgggctgggcctggactccaaagcgctgaagaagttgaaaggcgtatgtgttcggctgtctatgggaccctgtattgtggaagcttgtacctcagctctgctcgcccattacctccttgggctgccatggcagtgggggtttatcctaggctttgtcttaggggccgtgtcgccggccgtggtcgtcccgtctatgctcctgcttcagggaggcggatacggtgtggagaagggcgtgccaactctcctgatggctgccggatccttcgacgacatcttggctataacaggatttaacacatgcttaggaattgctttcagcaccggaagtacagtgttcaatgtgctgcgcggagtgctggaagtggtgattggtgtggctaccggttcggtcctcggtttctttattcagtactttccgtccagagaccaggacaagctggtttgcaaacggacattcttggtcctgggactatccgttctcgctgtgttctcctccgtccactttggcttcccaggcagtgggggactctgcacccttgtcatggccttcctggctggtatgggctggacctctgagaaggcagaggtggagaaaataatcgcagtagcatgggacatcttccagccgctgcttttcggcttgataggtgctgaggttagcatcgcgtctctgaggcccgagaccgtggggctgtgtgtagctaccgtgggcatagccgtgctgattcgcatattgactacattcctgatggtgtgcttcgccggctttaacctgaaggaaaagatcttcatttccttcgcatggctacccaaggcaacagtccaggcagcaatcggtagtgtcgcacttgacacagcgcggtcccatggggagaagcagctggaggattacggcatggacgtcctgactgtcgctttcctgagcatcctgatcaccgcccccattggaagcttactcatcggcttgctcggccctcggcttctgcagaaggttgagcaccagaataaagatgaagaggtccaaggggagacatctgtgcaggtatag

SEQ ID NO: 287586 - DNA, 1614 bp, Artificial Sequence
  derived and/or modified sequence
atgggagatgaggacaagaggatcacctatgaagattctgagcccagcacaggcatgaactacacccccagcatgcaccaggaggcccaggaggagaccgtgatgaagctgaagggcattgatgccaatgagcccacagagggcagcatcctgctgaagagcagcgagaagaagctgcaggagacccccacagaggccaaccacgtgcagaggctgcggcagatgctggcctgcccccctcatggcctgctggacagagtcatcaccaacgtgaccatcatcgtgctgctgtgggccgtggtgtggagcatcactggaagtgagtgcctgcccggcggcaacctgtttggcatcatcatcctcttctactgtgccatcattggaggcaagctgctgggcctcatcaagctgcccaccctgccccccctgcccagcctgctgggcatgctgctggccggcttcctgatccggaacatccctgtgatcaatgacaacgtgcagatcaagcacaagtggagcagcagcctgcggagcatcgccctgagcatcatcctggtgcgggccggcctgggcctggacagcaaggccctgaagaagctgaagggcgtgtgtgtgcggctgtccatgggcccctgcatcgtggaggcctgcaccagcgccctgctggcccactacctgctgggcctgccctggcagtggggcttcatcctgggctttgtgctgggcgctgtgtccccagctgtggtggtgcccagcatgctgctgctgcagggcggcggctatggagtggagaagggcgtgcccaccctgctgatggccgccggcagctttgatgacatcctggccatcaccggcttcaacacctgcctgggcatcgccttcagcacaggcagcacagtgttcaacgtgctgcggggcgtgctggaggtggtgattggagtggccaccggctctgtgctgggcttcttcatccagtacttccccagccgggaccaggacaagctggtgtgcaagaggaccttcctggtgctgggcctgtctgtgctggccgtgttcagctctgtgcacttcggcttccctggcagcggcggcctgtgcaccctggtgatggccttcctggccggcatgggctggaccagcgagaaggccgaggtggagaagatcatcgctgtggcctgggacatcttccagcccctgctgtttggcctcatcggggctgaggtgtccatcgccagcctgcggcctgagaccgtgggcctgtgtgtggccaccgtgggcattgctgtgctgatccgcatcctgaccaccttcctgatggtgtgctttgctggcttcaacctgaaggagaagatcttcatcagctttgcctggctgcccaaggccaccgtgcaggccgccatcggctctgtggccctggacacagcccggagccacggggagaagcagctggaggactatggcatggatgtgctgactgtggccttcctgagcatcctgatcacagcccccatcggcagcctgctgattggcctgctgggcccccggctgctgcagaaggtggagcaccagaacaaggatgaggaggtgcagggcgagacctctgtgcaggtgtag

SEQ ID NO: 287587 - DNA, 1614 bp, Artificial Sequence
  derived and/or modified sequence
atgggcgacgaggacaagcggatcacctacgaggacagcgagccctccaccggcatgaactacacccctagcatgcaccaggaggcacaggaggaaactgtcatgaaacttaaaggaatcgacgccaacgagcctaccgaaggctctatactgctgaagagctccgagaagaaactgcaggaaactccaacagaggcgaatcacgtccagaggctcagacagatgttagcctgcccaccccatggtctgcttgacagagtgatcaccaacgtgaccataatcgtgctgttgtgggctgtcgtgtggtcgatcacggggtccgagtgtctccccggcggcaatctttttggcatcatcatcctgttctactgcgccataatcgggggaaagttgctgggtttaattaagttgccaactctgcctcctttgccaagccttctcggaatgttactagctgggttcctcattcgtaacattcctgtgatcaatgacaacgtacaaattaagcacaaatggtccagtagtctgaggagcattgctctctcaatcatcctggtcagagctgggcttggtctggattcaaaagcgctgaagaaactcaagggcgtgtgtgtgaggctgtccatggggccttgtattgttgaggcctgtacctcagctcttctcgcccactatctgctcggcctgccctggcaatggggatttattctgggctttgttctcggtgctgtgtcgccagccgtggtagtgccctcaatgctgttgcttcagggaggcgggtatggagttgagaaaggagtaccaactctactgatggccgctggttcattcgatgatattctagccatcactggatttaatacatgtctcggaatagcttttagtaccggaagtacagtgttcaatgtccttaggggggtgctggaggttgtaatcggcgtcgcgacgggctccgttctgggattctttatccagtattttccatcaagagatcaggacaagctggtgtgcaagcgaactttccttgtgctggggctctcagtgctggctgttttcagcagtgtccactttgggtttcccggaagtgggggcttatgcactttagtgatggcgtttttggctggcatgggctggaccagtgagaaggcagaggtcgaaaagataatcgcagtggcttgggacatctttcaaccgctgctgtttggcctcattggcgcagaagtgagtatcgcgtcactgcgccctgaaactgtaggactgtgcgttgccaccgttgggatagctgtcttgattcgaattctcacaacgttcctcatggtttgcttcgctgggttcaatctcaaagaaaagatcttcatttccttcgcctggttgcctaaagccaccgtccaggcggccatcggtagcgtggcactcgatactgcacggtctcacggggagaaacagctggaagattatggaatggacgtgttgactgtggctttcttgagcatcctcatcaccgcccccatcggcagcctcctgattggattgctcgggccgaggcttctgcaaaaggtggaacaccaaaacaaggatgaggaggtacagggagagacttctgtacaagtctag

SEQ ID NO: 287588 - DNA, 1614 bp, Artificial Sequence
  derived and/or modified sequence
atgggcgacgaggacaagcggatcacctacgaggacagcgagccctccacaggtatgaattataccccttccatgcatcaggaagcccaggaagagaccgttatgaagcttaaagggatcgacgcaaacgagccaaccgaaggttccatcctgctcaagtcctcggagaagaagttacaggaaacccctacggaggccaatcatgtccagagactgaggcagatgttagcgtgtccaccccatggcctgctggaccgcgtgataaccaatgtcaccatcatcgtattactgtgggccgtggtgtggtcaattaccggctcggagtgcctcccaggagggaatctcttcggcatcatcattctcttctattgcgctattatcggcggcaaattgctcggcttaatcaaactgcctaccctaccccccctgcccagtctgctaggcatgctcctggctggatttctgatccggaacatcccagtaatcaatgataacgtgcagatcaaacacaagtggagctcttctctgcgatccattgcactgagcataatcctggttcgagccggtttggggcttgattccaaggcactcaaaaagctcaagggcgtttgcgtccgcctgtccatgggcccctgtattgtggaggcgtgcacatccgccctactcgcccactatctactgggacttccttggcagtggggatttatccttggttttgtgctgggggctgttagccccgctgtcgtggtgccgtccatgctgctgttacagggcggtgggtatggcgtggagaagggggtgcctaccctgctaatggccgccggcagtttcgacgatattctggcgataaccgggttcaacacctgcttaggaatagcatttagtactggaagtaccgtgttcaatgtgttacgcggggtgctagaggttgtcattggagtcgccaccggctctgttctcggattcttcatccaatacttcccatctcgagatcaggacaaactggtgtgcaagagaacctttcttgtcctgggcctatctgtgttagcggttttctcaagtgtccactttggatttcctggctcgggcggtctgtgtacactcgtcatggcgttcctggcaggcatggggtggacctctgaaaaggctgaagttgaaaaaatcatcgccgtcgcatgggacatttttcagcccctgctgtttggcctcatcggtgccgaagtgtcaatagcgagcctgaggcctgagacagtgggcctatgcgttgcgactgtcggtatcgccgtccttatcaggattctaacaacctttctgatggtgtgctttgccggcttcaacttaaaagaaaagattttcatctcattcgcctggctgcctaaggctacagtgcaggcagccatagggtccgttgcactcgataccgcaagaagccacggggaaaaacaactcgaagactacgggatggacgtcttgacagttgcgtttctttcaattctgattacagcccctatcgggtctcttctaataggtctccttggccccaggctcctacagaaagtggagcaccagaataaggatgaggaagtacaaggcgaaacgtccgtgcaggtatag

SEQ ID NO: 287589 - DNA, 1614 bp, Artificial Sequence
  derived and/or modified sequence
atgggggacgaggacaaacgcatcacctacgaagacagcgaacctagcaccggtatgaactatacaccctccatgcatcaggaggctcaagaggagacagtcatgaagcttaaaggaatcgacgctaatgagcctaccgaaggtagtattcttctcaagtcttcagaaaagaagctgcaggaaacccccactgaggctaatcacgtgcaaagactgagacaaatgctagcatgtccaccccacggactgttggatcgtgttataactaacgtaaccattatcgttcttctgtgggccgtcgtgtggtctatcactgggtcagagtgcctgcctggcggaaatctcttcggtatcattatccttttttattgtgcgattatcggcggaaaacttctagggttgatcaagctccccaccctgcccccactgccttccctgctcgggatgctgctggctgggtttcttattcgaaatattccggtcattaacgataacgtgcagattaagcacaagtggtcctctagcttacgttcaattgcattgagcattatactggtcagagctggactcggtcttgatagtaaagcacttaagaaactgaaaggggtctgcgtccggctgtccatgggaccgtgtattgtggaagcatgcacttccgcactgctcgcgcattacttgctggggctgccctggcagtggggatttattctcggattcgtcctgggagctgtcagccctgcggtcgttgtaccgagcatgctcctgctgcagggcggtggctatggcgttgagaagggcgttcccaccctcctgatggccgcagggtcgttcgatgatatactggcgattactggatttaacacgtgtctgggcatcgccttctccaccggatctacggtgtttaatgtcttgagaggcgtacttgaggtggttattggagtagctacgggctccgtgttgggattttttatccagtatttcccgagccgagatcaagataaactggtttgcaaacgtacttttctggtgctggggctgtccgtactggcggtgttctcctccgtacacttcgggttccctggatcaggaggactttgtaccctggtgatggcgttcctcgcgggtatgggatggacctctgagaaggccgaggttgaaaagatcatagccgtcgcatgggatatttttcagccgctgctttttggactcattggcgcagaggtatcaatcgcctccctgcgcccagaaaccgtcggcttgtgtgtcgcaacagtgggtatcgccgtgttgattcgtatcttaacgacatttctgatggtgtgcttcgcgggatttaatctcaaagaaaagatttttattagcttcgcatggcttcctaaggctactgttcaagccgctatcggatctgtagccctcgacacagcccgtagtcacggtgagaagcagcttgaggactatggcatggatgtcttgaccgttgcctttctgtcaatccttataacggctccaattgggtccttgctgataggcctgctggggccacggctgctccagaaggtagagcatcagaataaggatgaggaggtccagggcgaaaccagcgtgcaggtgtag

SEQ ID NO: 287590 - DNA, 1614 bp, Artificial Sequence
  derived and/or modified sequence
atgggagatgaagataagaggattacatatgaggactctgaacccagcaccggcatgaattacacaccatcaatgcaccaggaagcgcaggaggagactgtgatgaagctcaaaggcatcgacgctaatgagccaacagaaggctctatcttgctgaagtctagcgaaaaaaaactgcaggagacaccgaccgaggccaatcacgtacagcggctacggcagatgctggcctgtcccccacacgggctcctcgatcgcgtgattacaaatgttactattatagtgttgctctgggccgtggtctggtcaattacaggctccgagtgtctgcccggaggcaatttattcggcatcattatcctgttttactgcgcaatcattggagggaagctattgggtctcatcaaacttcccactctcccccctcttccttcactcctcggcatgctgttggccggttttctcataagaaacatcccggtgatcaatgacaatgtacagatcaagcataagtggtccagctccctacgtagcatagccctgtcaataatcctcgttcgcgcagggctgggtctggacagcaaagcactgaagaagcttaaaggcgtatgcgttcgtctgtctatgggaccttgtatcgtggaggcttgcacatccgctctgcttgctcattaccttctcggactcccgtggcaatgggggttcattctcgggtttgtgttaggcgctgtgagcccagccgtcgtggtgcccagtatgctgctgctgcaggggggtggatacggcgtcgagaaaggagtgcctactctcctgatggccgcaggcagctttgatgacattctcgctatcactggatttaatacgtgtttgggcatagcctttagcaccggaagtacagtgtttaatgtacttagaggagtgctggaggttgtcattggggtggcaactggatcagtcctggggttctttatccagtatttcccctcacgggaccaggacaagctggtctgcaagaggacttttctggtgttggggctatcagtccttgcagtattttccagtgtgcactttggatttcccggatctggcggactgtgtactcttgttatggcatttctggcaggaatgggatggacgtcagagaaggctgaggtggagaagatcatcgcagtggcttgggacatctttcagccacttctatttggtcttattggggcagaggtgtcgattgcgtcgctgaggccagaaacagtgggactctgtgtggcaaccgttgggatagctgtattgatcagaatccttactacctttctcatggtgtgctttgctggctttaacctgaaagaaaagattttcatctcctttgcgtggctgcccaaggctaccgtgcaggctgcaattggatcagttgctcttgataccgcgcgttctcacggggagaaacagcttgaggactacgggatggacgtcctgaccgtcgctttcctgagtatcttgataactgcacccatcgggagcctgttgatcggccttctgggccctagattgttgcagaaggtggaacatcagaacaaggatgaggaggttcagggagaaacaagcgtacaggtgtag

SEQ ID NO: 287591 - DNA, 2300 bp, Artificial Sequence
  derived and/or modified sequence
gaagatgcgcgaatcgggaaccccagagcgcggtggctagaccgggctccgccgcctcccccacagcccctttcctaatcgttcagacggagcctggtcgacttcgccggagactgccagatctcgttcctcttccctgtgtcatcttcttaattataaataatgggggatgaagataaaagaattacatatgaagattcagaaccatccacaggaatgaattacacgccctccatgcatcaagaagcacaggaggagacagttatgaagctcaaaggtatagatgcaaatgaaccaacagaaggaagtattcttttgaaaagcagtgaaaaaaagctacaagaaacaccaactgaagcaaatcacgtacaaagactgagacaaatgctggcttgccctccacatggtttactggacagggtcataacaaatgttaccatcattgttcttctgtgggctgtagtttggtcaattactggcagtgaatgtcttcctggaggaaacctatttggaattataatcctattctattgtgccatcattggtggtaaacttttggggcttattaagttacctacattgcctccactgccttctcttcttggcatgctgcttgcagggtttctcatcagaaatatcccagtcatcaacgataatgtgcagatcaagcacaagtggtcttcctctttgagaagcatagccctgtctatcattctggttcgtgctggccttggtctggattcaaaggccctgaagaagttaaagggcgtttgtgtaagactgtccatgggtccctgtattgtggaggcgtgcacatctgctcttcttgcccattacctgctgggtttaccatggcaatggggatttatactgggttttgttttaggtgctgtatctccagctgttgtggtgccttcaatgctccttttgcagggaggaggctatggtgttgagaagggtgtcccaaccttgctcatggcagctggcagcttcgatgacattctggccatcactggcttcaacacatgcttgggcatagccttttccacaggctctactgtctttaatgtcctcagaggagttttggaggtggtaattggtgtggcaactggatctgttcttggatttttcattcagtactttccaagccgtgaccaggacaaacttgtgtgtaagagaacattccttgtgttggggttgtctgtgctagctgtgttcagcagtgtgcattttggtttccctggatcaggaggactgtgcacgttggtcatggctttccttgcaggcatgggatggaccagcgaaaaggcagaggttgaaaagataattgcagttgcctgggacatttttcagccccttctttttggactaattggagcagaggtatctattgcatctctcagaccagaaactgtaggcctttgtgttgccaccgtaggcattgcagtattgatacgaattttgactacatttctgatggtgtgttttgctggttttaacttaaaagaaaagatatttatttcttttgcatggcttccaaaggccacagttcaggctgcaataggatctgtggctttggacacagcaaggtcacatggagagaaacaattagaagactatggaatggatgtgttgacagtggcatttttgtccatcctcatcacagccccaattggaagtctgcttattggtttactgggccccaggcttctgcagaaagttgaacatcaaaataaagatgaagaagttcaaggagagacttctgtgcaagtttagaggaagcgcggattctattactggaaactttgggactgaaaggccaaagcttctgggcccaccatcaacgcagctccgctttcatttctttcacatacaactttccacataagatttcatgcggaaaaaaaaaaaaaactcacaaaggttttatactgataacagtatattaagtgtttactttgtacacagcgtctttgttccagacacttgccatgtctcatttattctcacaccaccaccacagcgtcctttacagatgagaagacaacctcagggagacgatgtatttgcctaggtcccatagctagcaagtgacagcgctgcagtttaagctcaggccgtcttggggagagaccgtgctcttctaccattgcactttaagctgactttaggggaaacacaatctgagttttgacaagtttacttctggcacatgcagtcccgagcactgctttttggctaaaatgcccagtgatgtcaactctgtccctggatttctacaacccgatgagtcaatattc

SEQ ID NO: 287592 - DNA, 3126 bp, Artificial Sequence
  derived and/or modified sequence
cggtgtctcgtcatctccgggaagactcggcgcctgggtccgcgctctctgggtaagctttccgggaagctttcccgggagctcgctggtcctggccccagaagcctgcggacccgcccagggaggataagcagctgaaagaccgcgcggtgccgctccgaggccccgggacgtgggcccatggtcggcctggcgccacctttccgggggaagccacgcgcaccaggcatcgcacgcggctctgcacccgcgccgccggacctgaaacccggcggagggcacacggggctgccgctgcgggccccggaccaacccatgcttactccggagcctgtaccggcgccgacgggtcggacctccctgcgcggtgtcgcccagcgggttcgtgcgaaaggcggggccgactacacgcggtgccgcgccctgagaccgtttatctgcagtcaacgcagcctcccggctcagcctgggaagatgcgcgaatcgggaaccccagagcgcggtggctagaccgggctccgccgcctcccccacagcccctttcctaatcgttcagacggagcctggtcgacttcgccggagactgccagatctcgttcctcttccctgtgtcatcttcttaattataaataatgggggatgaagataaaagaattacatatgaagattcagaaccatccacaggaatgaattacacgccctccatgcatcaagaagcacaggaggagacagttatgaagctcaaaggtatagatgcaaatgaaccaacagaaggaagtattcttttgaaaagcagtgaaaaaaagctacaagaaacaccaactgaagcaaatcacgtacaaagactgagacaaatgctggcttgccctccacatggtttactggacagggtcataacaaatgttaccatcattgttcttctgtgggctgtagtttggtcaattactggcagtgaatgtcttcctggaggaaacctatttggaattataatcctattctattgtgccatcattggtggtaaacttttggggcttattaagttacctacattgcctccactgccttctcttcttggcatgctgcttgcagggtttctcatcagaaatatcccagtcatcaacgataatgtgcagatcaagcacaagtggtcttcctctttgagaagcatagccctgtctatcattctggttcgtgctggccttggtctggattcaaaggccctgaagaagttaaagggcgtttgtgtaagactgtccatgggtccctgtattgtggaggcgtgcacatctgctcttcttgcccattacctgctgggtttaccatggcaatggggatttatactgggttttgttttaggtgctgtatctccagctgttgtggtgccttcaatgctccttttgcagggaggaggctatggtgttgagaagggtgtcccaaccttgctcatggcagctggcagcttcgatgacattctggccatcactggcttcaacacatgcttgggcatagccttttccacaggctctactgtctttaatgtcctcagaggagttttggaggtggtaattggtgtggcaactggatctgttcttggatttttcattcagtactttccaagccgtgaccaggacaaacttgtgtgtaagagaacattccttgtgttggggttgtctgtgctagctgtgttcagcagtgtgcattttggtttccctggatcaggaggactgtgcacgttggtcatggctttccttgcaggcatgggatggaccagcgaaaaggcagaggttgaaaagataattgcagttgcctgggacatttttcagccccttctttttggactaattggagcagaggtatctattgcatctctcagaccagaaactgtaggcctttgtgttgccaccgtaggcattgcagtattgatacgaattttgactacatttctgatggtgtgttttgctggttttaacttaaaagaaaagatatttatttcttttgcatggcttccaaaggccacagttcaggctgcaataggatctgtggctttggacacagcaaggtcacatggagagaaacaattagaagactatggaatggatgtgttgacagtggcatttttgtccatcctcatcacagccccaattggaagtctgcttattggtttactgggccccaggcttctgcagaaagttgaacatcaaaataaagatgaagaagttcaaggagagacttctgtgcaagtttagaggtgaaaagagagagtgctgaacataatgtttagaaagctgctacttttttcaagatgcatattgaaatatgtaatgtttaagcttaaaatgtaatagaaccaaaagtgtagctgtttctttaaacagcatttttagcccttgctctttccatgtgggtggtaatgatctatatcaccaaccttaatctctctgccttttttttcaaacaccccttcatcatccatcttaatttgcataaggacatatctactttaatgtactaccacagtttacagttaatgtgggaaagaccagcttcagtatcctcttcagctaggattgccctaacttttaactttcacagtttcctgattcatatttgcccaggctctgatgccttgaattggttttggctctcttttttggatctgtttttgttgttaaacatcataatgcagtctctcattaatttttaccatcatttaccctgataatctgcctcttctccatttctccttcccttactacctttctttgaattactgtaactgattggtcccaccaaaattttaaagtacatgaagtatcttcattggttcatcctcttgccccctccagatgtcaaaaaactttatcctgccccctagctgaccacccaggttcctttatttcagtggcccatgtgagtctaccttcccctaaggagtgccctaatccagccctttttttgtttcttatgacccatatctttaggctcttcccatttctaggtgggagataggtaagtttcaaatctatgccagtcttatgaatattacattagggtaatgtgctataatgaagaaataaaaaatacagtgcttaaaagaaaataaaattctatttctgtctaatgaaa

SEQ ID NO: 287593 - protein, 480 aa, Artificial Sequence
  derived and/or modified sequence
MGDEDKRITYEDSEPSTGMNYTPSMHQEAQEETVMKLKGIDANEPTEGSILLKSSEKKLQETPTEANHVQRLRQMLACPPHGLLDRVITNGMLLAGFLIRNIPVINDNVQIKHKWSSSLRSIALSIILVRAGLGLDSKALKKLKGVCVRLSMGPCIVEACTSALLAHYLLGLPWQWGFILGFVLGAVSPAVVVPSMLLLQGGGYGVEKGVPTLLMAAGSFDDILAITGFNTCLGIAFSTGSTVFNVLRGVLEVVIGVATGSVLGFFIQYFPSRDQDKLVCKRTFLVLGLSVLAVFSSVHFGFPGSGGLCTLVMAFLAGMGWTSEKAEVEKIIAVAWDIFQPLLFGLIGAEVSIASLRPETVGLCVATVGIAVLIRILTTFLMVCFAGFNLKEKIFISFAWLPKATVQAAIGSVALDTARSHGEKQLEDYGMDVLTVAFLSILITAPIGSLLIGLLGPRLLQKVEHQNKDEEVQGETSVQV

SEQ ID NO: 287594 - DNA, 1443 bp, Artificial Sequence
  derived and/or modified sequence
atgggcgacgaggacaagagaatcacctacgaggacagcgagcccagcaccggcatgaactacacccccagcatgcaccaggaggcccaggaggagaccgtgatgaagctgaagggcatcgacgccaacgagcccaccgagggcagcatcctgctgaagagcagcgagaagaagctgcaggagacccccaccgaggccaaccacgtgcagagactgagacagatgctggcctgccccccccacggcctgctggacagagtgatcaccaacggcatgctgctggccggcttcctgatcagaaacatccccgtgatcaacgacaacgtgcagatcaagcacaagtggagcagcagcctgagaagcatcgccctgagcatcatcctggtgagagccggcctgggcctggacagcaaggccctgaagaagctgaagggcgtgtgcgtgagactgagcatgggcccctgcatcgtggaggcctgcaccagcgccctgctggcccactacctgctgggcctgccctggcagtggggcttcatcctgggcttcgtgctgggcgccgtgagccccgccgtggtggtgcccagcatgctgctgctgcagggcggcggctacggcgtggagaagggcgtgcccaccctgctgatggccgccggcagcttcgacgacatcctggccatcaccggcttcaacacctgcctgggcatcgccttcagcaccggcagcaccgtgttcaacgtgctgagaggcgtgctggaggtggtgatcggcgtggccaccggcagcgtgctgggcttcttcatccagtacttccccagcagagaccaggacaagctggtgtgcaagagaaccttcctggtgctgggcctgagcgtgctggccgtgttcagcagcgtgcacttcggcttccccggcagcggcggcctgtgcaccctggtgatggccttcctggccggcatgggctggaccagcgagaaggccgaggtggagaagatcatcgccgtggcctgggacatcttccagcccctgctgttcggcctgatcggcgccgaggtgagcatcgccagcctgagacccgagaccgtgggcctgtgcgtggccaccgtgggcatcgccgtgctgatcagaatcctgaccaccttcctgatggtgtgcttcgccggcttcaacctgaaggagaagatcttcatcagcttcgcctggctgcccaaggccaccgtgcaggccgccatcggcagcgtggccctggacaccgccagaagccacggcgagaagcagctggaggactacggcatggacgtgctgaccgtggccttcctgagcatcctgatcaccgcccccatcggcagcctgctgatcggcctgctgggccccagactgctgcagaaggtggagcaccagaacaaggacgaggaggtgcagggcgagaccagcgtgcaggtgtag

SEQ ID NO: 287595 - DNA, 1443 bp, Artificial Sequence
  derived and/or modified sequence
atgggggacgaagacaaaaggatcacatacgaggattcggagccttccaccgggatgaactacactccctctatgcaccaggaggcccaagaagagaccgtaatgaaactgaaaggaattgacgccaacgaaccgactgagggtagcatcctgctgaagtccagtgagaaaaagttgcaggagacgcccactgaggctaatcacgtgcagagactccgccaaatgctcgcttgccctccccatggcctgcttgatcgagtgatcactaacggcatgctgctcgcagggttcctgataagaaatattccagtaattaacgacaacgtgcagataaagcacaaatggagttccagtctcagatcaatcgccttgagtataatccttgtgcgtgcgggactggggctggattcaaaagctcttaaaaagctgaagggagtttgcgtcaggttgagtatgggaccttgcattgtggaagcctgtacaagcgctctgttggcccactacctcttaggacttccttggcagtggggatttatcctggggtttgtgttaggagccgtatcccctgcagtcgtggtgcccagtatgctcctgttgcaagggggcggctacggagtcgagaaaggtgtgccaactctcctcatggccgccggctccttcgatgatatccttgccatcactggctttaacacgtgccttggtatagcatttagtactgggtcaacagtgttcaatgtactgcgcggggtactggaggtggtgatcggagtggccacagggtctgtgctgggatttttcattcagtacttccccagtcgggaccaggacaagcttgtctgtaagaggacgtttttggtcctgggcctgtccgtactagccgttttttcttccgtgcacttcggatttcccggttccggtggcctgtgtaccctagtcatggcctttctcgctggcatggggtggacatccgaaaaagcagaagtggaaaaaatcattgccgtggcctgggatatatttcagcctttacttttcggccttatcggcgctgaggtgagcattgcctctcttcgacctgagacagttggcctgtgtgttgctacagtggggatcgctgtcctgatcaggatcctgacgacttttctcatggtttgcttcgccggatttaacctgaaggagaagatctttatctcctttgcctggctgcctaaggccacggtgcaggcagcaatcgggtccgttgccctggatactgcccggtcacacggcgagaagcagctggaggactatggaatggatgttttaacagtcgcattcttatctatcttgataaccgcacccattgggtctctcctcatcggtctgctgggccctcggctgctgcagaaggttgagcaccaaaacaaggacgaagaggtgcagggcgaaaccagcgttcaggtgtag

SEQ ID NO: 287596 - DNA, 1443 bp, Artificial Sequence
  derived and/or modified sequence
atgggagatgaggacaagaggatcacctatgaagattctgagcccagcacaggcatgaactacacccccagcatgcaccaggaggcccaggaggagaccgtgatgaagctgaagggcattgatgccaatgagcccacagagggcagcatcctgctgaagagcagcgagaagaagctgcaggagacccccacagaggccaaccacgtgcagaggctgcggcagatgctggcctgcccccctcatggcctgctggacagagtcatcaccaacggcatgctgctggccggcttcctgatccggaacatccctgtgatcaatgacaacgtgcagatcaagcacaagtggagcagcagcctgcggagcatcgccctgagcatcatcctggtgcgggccggcctgggcctggacagcaaggccctgaagaagctgaagggcgtgtgtgtgcggctgtccatgggcccctgcatcgtggaggcctgcaccagcgccctgctggcccactacctgctgggcctgccctggcagtggggcttcatcctgggctttgtgctgggcgctgtgtccccagctgtggtggtgcccagcatgctgctgctgcagggcggcggctacggcgtggagaagggcgtgcccaccctgctgatggctgctggcagctttgatgacatcctggccatcaccggcttcaacacctgcctgggcatcgccttcagcacaggcagcaccgtcttcaacgtgctgcggggcgtgctggaggtggtgattggagtggccactggatctgtgctgggcttcttcatccagtacttccccagccgggaccaggacaagctggtgtgcaagaggaccttcctggtgctgggcctgtctgtgctggccgtgttcagctctgtgcacttcggcttccctggcagcggcggcctgtgcaccctggtgatggccttcctggccggcatgggctggaccagcgagaaggccgaggtggagaagatcatcgctgtggcctgggacatcttccagcccctgctgtttggcctgattggagctgaggtgtccatcgccagcctgcggcctgagaccgtgggcctgtgtgtggccaccgtgggcattgctgtgctgatccgcatcctgaccaccttcctgatggtgtgctttgctggcttcaacctgaaggagaagatcttcatcagctttgcctggctgcccaaggccaccgtgcaggccgccatcggctctgtggccctggacacagcccggagccatggagagaagcagctggaggactatggcatggatgtgctgactgtggccttcctgagcatcctgatcacagcccccatcggcagcctgctgattggcctgctgggcccccggctgctgcagaaggtggagcaccagaacaaggatgaggaggtgcagggcgagacctctgtgcaggtgtag

SEQ ID NO: 287597 - DNA, 1443 bp, Artificial Sequence
  derived and/or modified sequence
atgggcgacgaggacaagcggatcacctacgaggacagcgagcccagtacggggatgaactacaccccctccatgcaccaggaggctcaggaagaaacagtgatgaaactgaaaggcatcgatgcaaacgaacccaccgaaggtagcatcctcttgaagtcatccgagaaaaagctgcaagagacacccactgaggccaatcatgtgcaaagattacgtcaaatgctcgcctgccctcctcacggcctcctggaccgcgtgatcaccaacggaatgctgctggcagggttcctcatcaggaacatccccgttataaatgataacgtgcagattaagcacaagtggtccagctctctccggagtatcgccctctcaataatcctggtgagggctggccttggcctagacagcaaggcactgaagaaattgaagggagtatgtgtgaggctttctatgggcccatgcattgtcgaggcttgcacctccgcactcttggctcattacctgcttggcttgccatggcagtgggggttcatcctgggcttcgtgcttggcgctgttagcccagccgtagtcgtgccatctatgctcctgctgcagggtgggggctatggcgtggagaaaggagtgccaacactgctaatggctgccggctcattcgacgacatcctcgcgatcaccggcttcaatacctgccttggcattgccttctctacgggatccaccgtcttcaatgtgctacggggcgttctggaggttgtaatcggcgtggctaccggcagcgtgctcggcttctttatccagtacttcccctctagagatcaggacaagctggtgtgcaagcgcaccttcttggtcctgggcttatccgtgctcgcagtgtttagttccgtgcacttcggtttccctgggagcgggggcctgtgcacccttgtgatggcattccttgcgggcatgggatggacaagcgaaaaggccgaggtggagaagatcatagctgtcgcatgggatatcttccagccactactctttggcttgataggtgccgaagtgtccattgcctcattgcgccccgagactgtggggttgtgtgtcgccacagttgggatcgctgttctcattagaatccttacaacttttctgatggtgtgtttcgccgggtttaacttgaaggagaagatcttcatttcgtttgcttggctccccaaggctaccgtgcaagctgcaatcggcagcgtggctctcgacaccgcgcgcagtcatggcgagaaacaacttgaggactatggtatggacgtgctgaccgtcgcctttctgtccattctgattacggccccgatcgggagtctgctgattggcctacttggtccgaggttacttcaaaaggtggagcaccaaaacaaggacgaagaagttcagggtgagacaagtgtgcaagtctag

SEQ ID NO: 287598 - DNA, 1443 bp, Artificial Sequence
  derived and/or modified sequence
atgggtgatgaggataagcgtattacttacgaagattctgagccaagtacgggcatgaactacactcccagtatgcaccaggaagcccaggaagagacagtgatgaagctgaagggaattgatgctaacgagccgactgaagggtctattctgctcaagtctagtgagaaaaagctgcaagagacccccaccgaagcgaatcacgtgcagagattacgtcagatgttagcatgtccaccacacggccttctggaccgcgtgattaccaacggaatgctcctagctggcttccttatacgtaatattccagtcataaacgataacgtccaaatcaagcataagtggtccagcagtctgagaagcatcgccttatctatcatccttgttcgcgcaggcctcggactggacagtaaagcacttaagaagctcaagggcgtctgcgtgcggttgtccatggggccatgcatcgttgaagcctgcaccagcgcactgctcgctcactacttgttaggcttgccctggcagtggggcttcatcctgggattcgtgctcggggctgtgtcccctgcagtggtggtgccctccatgttactcctgcagggcggaggatacggggtcgaaaagggcgtgcctacactactcatggcagctggctcattcgatgacattcttgcaatcacaggcttcaatacctgtttaggtatagccttttcgacaggaagcaccgttttcaatgtgttgcgaggggtgttggaagtagtgattggagtagccaccgggtccgttctcgggtttttcatccagtatttcccctctcgagatcaggataagctggtctgcaagcgcacctttctcgtgttaggactgagtgttttagcagtttttagtagcgtgcattttgggtttccagggagcgggggactgtgtaccctggtcatggcatttctagccggtatggggtggacctctgagaaagctgaggtggaaaaaatcatcgcagtggcctgggacatatttcagcctctgctgttcggactgatcggcgctgaggtgagtatcgcctccctgcgcccagaaaccgtgggcctatgtgtcgccacagttggaatagccgtactgatcaggattctcaccacctttttaatggtgtgcttcgcgggattcaacctgaaagagaaaatcttcatatctttcgcatggctccctaaagcaacagtgcaagccgcaatagggtccgtcgcactggataccgccaggtctcacggtgagaagcagctggaggattatggcatggatgtcctaaccgtggcctttctcagtatcttgataacggcgcctattgggtcattgcttatagggttgctaggaccaaggttgctgcagaaggtcgagcatcagaataaagacgaagaagtgcagggcgaaaccagcgtccaggtgtag

SEQ ID NO: 287599 - DNA, 1826 bp, Artificial Sequence
  derived and/or modified sequence
aataggttcatcacaaaagaggacctgagagacaagaatgaatggtttctgactggtggagaaatttgaggataatctcccttgcttgaaaagcggtgattaagattggcacttgcttacaggagtgaaaaacagatctcgttcctcttccctgtgtcatcttcttaattataaataatgggggatgaagataaaagaattacatatgaagattcagaaccatccacaggaatgaattacacgccctccatgcatcaagaagcacaggaggagacagttatgaagctcaaaggtatagatgcaaatgaaccaacagaaggaagtattcttttgaaaagcagtgaaaaaaagctacaagaaacaccaactgaagcaaatcacgtacaaagactgagacaaatgctggcttgccctccacatggtttactggacagggtcataacaaatggcatgctgcttgcagggtttctcatcagaaatatcccagtcatcaacgataatgtgcagatcaagcacaagtggtcttcctctttgagaagcatagccctgtctatcattctggttcgtgctggccttggtctggattcaaaggccctgaagaagttaaagggcgtttgtgtaagactgtccatgggtccctgtattgtggaggcgtgcacatctgctcttcttgcccattacctgctgggtttaccatggcaatggggatttatactgggttttgttttaggtgctgtatctccagctgttgtggtgccttcaatgctccttttgcagggaggaggctatggtgttgagaagggtgtcccaaccttgctcatggcagctggcagcttcgatgacattctggccatcactggcttcaacacatgcttgggcatagccttttccacaggctctactgtctttaatgtcctcagaggagttttggaggtggtaattggtgtggcaactggatctgttcttggatttttcattcagtactttccaagccgtgaccaggacaaacttgtgtgtaagagaacattccttgtgttggggttgtctgtgctagctgtgttcagcagtgtgcattttggtttccctggatcaggaggactgtgcacgttggtcatggctttccttgcaggcatgggatggaccagcgaaaaggcagaggttgaaaagataattgcagttgcctgggacatttttcagccccttctttttggactaattggagcagaggtatctattgcatctctcagaccagaaactgtaggcctttgtgttgccaccgtaggcattgcagtattgatacgaattttgactacatttctgatggtgtgttttgctggttttaacttaaaagaaaagatatttatttcttttgcatggcttccaaaggccacagttcaggctgcaataggatctgtggctttggacacagcaaggtcacatggagagaaacaattagaagactatggaatggatgtgttgacagtggcatttttgtccatcctcatcacagccccaattggaagtctgcttattggtttactgggccccaggcttctgcagaaagttgaacatcaaaataaagatgaagaagttcaaggagagacttctgtgcaagtttagaggtgaaaagagagagtgctgaacataatgtttagaaagctgctacttttttcaagatgcatattgaaatatgtaatgtttaagcttaaaatgtaatagaaccaaaagtgtagctgtttctttaaacagcatttttagcccttgctctttccatgtgggtggtaatgatctatatcaccaaccttaatctctctgccttttttttc

SEQ ID NO: 287600 - protein, 177 aa, Artificial Sequence
  derived and/or modified sequence
MRLLILTCLVAVALARPKLPLRYPERLQNPSESSEPIPLESREEYMNGMNRQRNILREKQTDEIKNCVVAEPEKMESSISSSSEEMSLSKCAEQFCRLNEYNQLQLQKMSKQEQIRRMNENSHVQVPFQQLNQLAAYPYAVWYYPQIMQYVPFPPFSDISNPTAHENYEKNNVMLQW

SEQ ID NO: 287601 - protein, 169 aa, Artificial Sequence
  derived and/or modified sequence
MRLLILTCLVAVALARPKLPLRYPERLQNPSESSEPIPLESREEYMNGMNRQRNILREKQTDEIKNCVVAEPEKMESSISSSSEEQFCRLNEYNQLQLQAAHAQEQIRRMNENSHVQVPFQQLNQLAAYPYAVWYYPQIMQYVPFPPFSDISNPTAHENYEKNNVMLQW

SEQ ID NO: 287602 - DNA, 534 bp, Artificial Sequence
  derived and/or modified sequence
atgcgcctactcatactgacctgcttagttgcagttgcgttggcaagacccaagctgcctcttaggtatcctgaacggctgcaaaatccatccgaatcttctgagccgattcccctcgaatcccgcgaggagtatatgaacggtatgaacaggcagcggaacattctgcgagagaagcaaacagatgaaattaaaaactgtgtggttgcagagcctgaaaaaatggaatcgtccatctccagtagcagcgaagaaatgagtctgtccaagtgcgcagaacagttctgcagacttaatgaatacaatcagttgcagctgcaaaaaatgtctaaacaggagcagattcgtcggatgaacgagaacagccacgtgcaggtgccctttcagcagctcaaccaacttgctgcctacccctatgccgtgtggtactacccacagatcatgcagtacgtgccttttccaccgtttagcgatatcagcaaccctaccgctcatgagaattatgagaagaacaatgtgatgttgcagtggtag

SEQ ID NO: 287603 - DNA, 510 bp, Artificial Sequence
  derived and/or modified sequence
atgagattgcttattctgacctgtcttgtcgcagtcgccctcgccagaccgaaactgccacttcgataccccgagagactgcagaatccctctgagtcatcggagcccattcctcttgagtcgcgggaggaatacatgaacgggatgaatcggcagcgcaatatcctgagggagaagcagacggatgagatcaaaaactgtgtggtagctgagccagaaaaaatggagagctcgatctcatcaagctcggaggagcagttctgtagattgaacgaatacaaccagctgcagctccaagccgctcacgcacaagagcagatccgtcggatgaacgagaatagtcatgttcaggttccgtttcagcagctaaatcagctcgccgcatatccatatgcagtgtggtattacccccaaatcatgcagtatgtgcctttccctcctttcagcgacatcagtaatcctaccgcccatgaaaactacgagaagaacaacgtaatgttacagtggtag

SEQ ID NO: 287604 - DNA, 534 bp, Artificial Sequence
  derived and/or modified sequence
atgaggctgttgatactcacctgtttggttgctgtcgcactagccaggcctaaactccccctgcggtatcctgaacgcctccagaacccgtcagagtcttcagaacccatcccattggaatctcgcgaggaatatatgaacggcatgaatcgccagagaaacatacttcgagagaaacagactgatgaaatcaagaattgtgtcgttgccgaacctgagaagatggaatcttcaatctcctcatcctccgaagagatgtcgttgtctaagtgtgctgagcagttttgcagattgaacgagtacaatcagttacagctccaaaagatgtcaaagcaggagcagattcgccgtatgaatgaaaacagccatgtgcaggttccctttcagcagttgaatcagttggccgcctatccatatgccgtctggtattacccacagattatgcagtatgttcccttcccacccttcagcgacatatcgaatcctaccgcccacgagaattatgagaaaaacaatgtaatgctccagtggtag

SEQ ID NO: 287605 - DNA, 510 bp, Artificial Sequence
  derived and/or modified sequence
atgcgtctcctgattctcacctgtctggtggctgtcgcccttgcccggcccaaactgccactgcgctaccctgaaagactgcagaacccaagtgagtcgtcagagcccattccactggaaagccgcgaagagtacatgaacggtatgaatagacagaggaacattctgcgcgaaaaacagacagatgagatcaaaaattgcgtggtcgccgaacctgagaaaatggagagtagcatcagctccagcagcgaagaacagttttgcagactgaacgagtacaatcaactgcagctccaggccgctcatgcgcaggagcagattcgcaggatgaacgaaaatagccatgtgcaggttccttttcaacagctaaaccaactggccgcctacccttatgcagtgtggtactaccctcaaattatgcaatacgtaccctttccacccttcagtgacatatctaacccgaccgctcacgaaaactatgaaaaaaacaacgtgatgcttcagtggtag

SEQ ID NO: 287606 - DNA, 534 bp, Artificial Sequence
  derived and/or modified sequence
atgaggctgttgatactcacctgtttggttgctgtcgcactagccaggcctaaactccccctgcggtatcctgaacgcctccagaacccgtcagagtcttcagaacccatcccattggaatctcgcgaggaatatatgaacggcatgaatcgccagagaaacatacttcgagagaaacagactgatgaaatcaagaattgtgtcgttgccgaacctgagaagatggaatcttcaatctcctcatcctccgaagagatgtcgttgtctaagtgtgctgagcagttttgcagattgaacgagtataatcaattgcagctgcagaaaatgagtaagcaagagcagatacggagaatgaacgaaaacagccatgttcaagtaccatttcagcaacttaatcaactggccgcctacccttatgccgtgtggtactatccccaaatcatgcagtatgtgcctttccctccttttagcgatatctccaatcccacggcccatgagaactacgagaaaaataatgttatgctccaatggtag

SEQ ID NO: 287607 - DNA, 510 bp, Artificial Sequence
  derived and/or modified sequence
atgagactcttgatactgacgtgtcttgtggctgtggccctcgctcggcctaagcttcccctccgataccctgaaaggctccagaacccatccgagtcgagcgaacctatccccctagaatcccgagaggagtacatgaacggaatgaaccgacaaaggaatatcctgagggagaaacagacagacgaaattaaaaactgcgtagttgccgaaccagaaaagatggaatcatctatcagttcttcctccgaagagcagttctgcagactgaatgagtacaatcagctgcaattgcaagcagctcatgcgcaggagcagattcgcaggatgaacgaaaatagccatgtgcaggttccttttcaacagctaaaccaactggccgcctacccttatgcagtgtggtactaccctcaaattatgcaatacgtaccctttccacccttcagtgacatatctaacccgaccgctcacgaaaactatgaaaaaaacaacgtgatgcttcagtggtag

SEQ ID NO: 287608 - DNA, 871 bp, Artificial Sequence
  derived and/or modified sequence
atgaggcttctcattctcacctgtcttgtggctgttgctcttgccaggcctaaacttcctcttagatacccagaacgccttcagaatccatcagagagcagtgagcctataccattagaatcaagagaggaatacatgaatggtatgaacaggcagagaaacattctgagagaaaaacagactgatgaaatcaagaactgtgttgtggcagagcctgagaagatggaatccagcatcagttcatcgagtgaggaacagttttgtagactgaacgaatacaaccaacttcagctgcaagctgcccatgcccaggagcaaattcgcagaatgaatgaaaacagccatgtccaagtgcctttccagcagctcaaccaacttgctgcctacccctatgctgtttggtactatccacaaatcatgcagtatgttcctttcccaccgttttccgacatctccaatcccactgctcatgaaaattatgaaaaaaataacgtcatgctacagtggtgatatgattgaaaatttcattctctgaatttctcctctcaaggaaaaccatcttatctgaagactggactgttgttttagaatagtaaaatcccatattgaaggaaattgttctttttgagttatctacttaatagcatatcattctttttcttaagctaaattttcctagagagtttattgtctaaatttcagttgtgtcttgccatatggagggcacctaatcagagggtattaaagtgtttactaagttttctagtggacattttgtttaaaaagtctttgaattgccagttctgtaagtgccatcaattaaaatagttttgtgcagtgacagagattttcttttttcttttcaataaat

SEQ ID NO: 287609 - DNA, 534 bp, Artificial Sequence
  derived and/or modified sequence
atgagactgctgatcctgacctgcctggtggccgtggccctggccagacccaagctgcccctgagataccccgagagactgcagaaccccagcgagagcagcgagcccatccccctggagagcagagaggagtacatgaacggcatgaacagacagagaaacatcctgagagagaagcagaccgacgagatcaagaactgcgtggtggccgagcccgagaagatggagagcagcatcagcagcagcagcgaggagatgagcctgagcaagtgcgccgagcagttctgcagactgaacgagtacaaccagctgcagctgcagaagatgagcaagcaggagcagatcagaagaatgaacgagaacagccacgtgcaggtgcccttccagcagctgaaccagctggccgcctacccctacgccgtgtggtactacccccagatcatgcagtacgtgcccttcccccccttcagcgacatcagcaaccccaccgcccacgagaactacgagaagaacaacgtgatgctgcagtggtag

SEQ ID NO: 287610 - DNA, 510 bp, Artificial Sequence
  derived and/or modified sequence
atgagactgctgatcctgacctgcctggtggccgtggccctggccagacccaagctgcccctgagataccccgagagactgcagaaccccagcgagagcagcgagcccatccccctggagagcagagaggagtacatgaacggcatgaacagacagagaaacatcctgagagagaagcagaccgacgagatcaagaactgcgtggtggccgagcccgagaagatggagagcagcatcagcagcagcagcgaggagcagttctgcagactgaacgagtacaaccagctgcagctgcaggccgcccacgcccaggagcagatcagaagaatgaacgagaacagccacgtgcaggtgcccttccagcagctgaaccagctggccgcctacccctacgccgtgtggtactacccccagatcatgcagtacgtgcccttcccccccttcagcgacatcagcaaccccaccgcccacgagaactacgagaagaacaacgtgatgctgcagtggtag

SEQ ID NO: 287611 - DNA, 534 bp, Artificial Sequence
  derived and/or modified sequence
atgcgactgttgatactgacttgcctggtcgcagtggcgctggcacgcccgaagctgcccttacgctatccggagcgtctgcagaacccttccgaatccagcgaacctatccctctggagtcacgcgaggagtacatgaacggcatgaatcgccagaggaatatattgagggaaaagcagactgacgagattaaaaactgcgttgtcgccgaacccgaaaagatggaatctagtatatccagtagcagtgaggagatgagcctgtctaagtgcgcggaacagttttgtcgcctgaatgagtacaaccagctccagttgcagaagatgagcaagcaagagcaaatccgaaggatgaacgaaaattcccatgtccaagtaccattccagcagttgaaccagctggcagcatatccctacgccgtttggtactatccccagattatgcagtatgtgcctttcccacccttttccgacatcagtaatcctactgcccacgaaaactatgagaaaaacaacgtcatgttacagtggtag

SEQ ID NO: 287612 - DNA, 957 bp, Artificial Sequence
  derived and/or modified sequence
tcaacacaacttgcttctctccagacttgggcttaaggctctgataaccatgaggcttctcattctcacctgtcttgtggctgttgctcttgccaggcctaaacttcctcttagatacccagaacgccttcagaatccatcagagagcagtgagcctataccattagaatcaagagaggaatacatgaatggtatgaacaggcagagaaacattctgagagaaaaacagactgatgaaatcaagaactgtgttgtggcagagcctgagaagatggaatccagcatcagttcatcgagtgaggaaatgtctctcagtaagtgtgcggaacagttttgtagactgaacgaatacaaccaacttcagctgcagaagatgtctaagcaggagcaaattcgcagaatgaatgaaaacagccatgtccaagtgcctttccagcagctcaaccaacttgctgcctacccctatgctgtttggtactatccacaaatcatgcagtatgttcctttcccaccgttttccgacatctccaatcccactgctcatgaaaattatgaaaaaaataacgtcatgctacagtggtgatatgattgaaaatttcattctctgaatttctcctctcaaggaaaaccatcttatctgaagactggactgttgttttagaatagtaaaatcccatattgaaggaaattgttctttttgagttatctacttaatagcatatcattctttttcttaagctaaattttcctagagagtttattgtctaaatttcagttgtgtcttgccatatggagggcacctaatcagagggtattaaagtgtttactaagttttctagtggacattttgtttaaaaagtctttgaattgccagttctgtaagtgccatcaattaaaatagttttgtgcagtgacagagattttcttttttcttttcaataaattacactttaaggc

SEQ ID NO: 287613 - DNA, 510 bp, Artificial Sequence
  derived and/or modified sequence
atgcggctgttgattctaacatgtttggtcgctgttgccttagcccgcccgaagctgcccctcagatatccggaacggctgcagaaccctagcgagtctagcgaaccgattcccctcgagtcccgtgaagagtatatgaatggcatgaatcgccagaggaacatccttcgtgaaaagcagaccgatgagataaagaattgtgtggtggcagaacccgaaaaaatggaaagcagcatctcctcgtcttccgaagagcagttttgccggctgaatgaatacaatcagctgcagctgcaggccgcgcacgcccaagagcagatccggaggatgaacgagaatagccacgtccaggtccccttccagcaactgaaccaactggctgcttatccgtatgccgtttggtactatccccagatcatgcagtacgttcccttccctccattttccgatatctcaaatcctacagcacatgaaaattacgagaagaacaacgtgatgcttcagtggtag

SEQ ID NO: 287614 - DNA, 534 bp, Artificial Sequence
  derived and/or modified sequence
atgaggctgctgatcctgacctgcctggtggccgtggccctggcccggcccaagctgcccctgcgctacccagagcggctgcagaaccccagcgagagcagcgagcccatccccctggagagccgggaggagtacatgaatggcatgaaccggcagaggaacatcctgcgggagaagcagacagatgagatcaagaactgtgtggtggccgagcctgagaagatggagagcagcatcagcagcagcagcgaggagatgagcctgagcaaatgtgccgagcagttctgccgcctgaatgagtacaaccagctgcagctgcagaagatgagcaagcaggagcagatccggaggatgaatgaaaacagccacgtgcaggtgcccttccagcagctgaaccagctggccgcctacccctatgctgtgtggtactacccccagatcatgcagtatgtgcccttcccccccttcagtgacatcagcaaccccacagcccacgagaactatgagaagaacaacgtgatgctgcagtggtag

SEQ ID NO: 287615 - DNA, 510 bp, Artificial Sequence
  derived and/or modified sequence
atgaggctgctgatcctgacctgcctggtggccgtggccctggcccggcccaagctgcccctgcgctacccagagcggctgcagaaccccagcgagagcagcgagcccatccccctggagagccgggaggagtacatgaatggcatgaaccggcagaggaacatcctgcgggagaagcagacagatgagatcaagaactgtgtggtggccgagcctgagaagatggagagcagcatcagcagcagcagcgaggagcagttctgccgcctgaatgagtacaaccagctgcagctgcaggccgcccacgcccaggagcagatccggaggatgaatgaaaacagccacgtgcaggtgcccttccagcagctgaaccagctggccgcctacccctatgctgtgtggtactacccccagatcatgcagtatgtgcccttcccccccttcagtgacatcagcaaccccacagcccacgagaactatgagaagaacaacgtgatgctgcagtggtag

SEQ ID NO: 287616 - DNA, 534 bp, Artificial Sequence
  derived and/or modified sequence
atgcggctgctgatcctgacctgcctggtggccgtggccctggccaggccaaaactccccttgcggtacccagagcgactccaaaatcctagcgagagctctgagccaattcccctcgaatcccgagaggaatatatgaatggtatgaacaggcagcgcaatattcttagggaaaaacagactgacgaaattaaaaactgcgttgtggcagagccagagaaaatggagtctagtattagctcaagctccgaggaaatgtctctctctaagtgcgctgagcagttctgccgactcaacgaatacaaccagcttcagctgcaaaaaatgtccaagcaggaacagatccgcaggatgaatgaaaacagccacgtgcaggtgccttttcagcagctaaatcagctcgcagcctatccttatgccgtttggtattatccacagatcatgcaatacgtgcccttcccccctttctccgacatctccaaccctaccgcgcacgaaaattacgaaaaaaataatgtgatgctgcagtggtag

SEQ ID NO: 287617 - DNA, 510 bp, Artificial Sequence
  derived and/or modified sequence
atgcggctgctgatcctgacctgcctggtggccgtggccctggcccgcccaaaattacccttacgatatcctgagcgcctgcagaacccctccgagtccagcgagcccatcccactggaaagccgagaggaatacatgaatggaatgaatcgccagagaaatattctcagagagaagcaaactgatgagattaaaaattgcgtcgtggcagagcccgagaaaatggaatccagtatttcatcttctagcgaggagcagttttgcagactcaatgagtacaatcagttacagctccaggccgcgcatgctcaggaacagatccggcgcatgaacgaaaatagccacgtgcaggtgccattccagcagctaaaccagttggcagcctatccatacgctgtctggtactaccctcagattatgcagtatgtgccttttcccccattttctgacatatcaaatccgaccgcacacgagaattacgagaaaaacaacgtcatgctgcaatggtag

SEQ ID NO: 287618 - RNA, 534 nt, Artificial Sequence
  derived and/or modified sequence
augaggcuguugauacucaccuguuugguugcugucgcacuagccaggccuaaacucccccugcgguauccugaacgccuccagaacccgucagagucuucagaacccaucccauuggaaucucgcgaggaauauaugaacggcaugaaucgccagagaaacauacuucgagagaaacagacugaugaaaucaagaauugugucguugccgaaccugagaagauggaaucuucaaucuccucauccuccgaagagaugucguugucuaagugugcugagcaguuuugcagauugaacgaguacaaucaguuacagcuccaaaagaugucaaagcaggagcagauucgccguaugaaugaaaacagccaugugcagguucccuuucagcaguugaaucaguuggccgccuauccauaugccgucugguauuacccacagauuaugcaguauguucccuucccacccuucagcgacauaucgaauccuaccgcccacgagaauuaugagaaaaacaauguaaugcuccagugguag

SEQ ID NO: 287619 - RNA, 510 nt, Artificial Sequence
  derived and/or modified sequence
augcgucuccugauucucaccugucugguggcugucgcccuugcccggcccaaacugccacugcgcuacccugaaagacugcagaacccaagugagucgucagagcccauuccacuggaaagccgcgaagaguacaugaacgguaugaauagacagaggaacauucugcgcgaaaaacagacagaugagaucaaaaauugcguggucgccgaaccugagaaaauggagaguagcaucagcuccagcagcgaagaacaguuuugcagacugaacgaguacaaucaacugcagcuccaggccgcucaugcgcaggagcagauucgcaggaugaacgaaaauagccaugugcagguuccuuuucaacagcuaaaccaacuggccgccuacccuuaugcagugugguacuacccucaaauuaugcaauacguacccuuuccacccuucagugacauaucuaacccgaccgcucacgaaaacuaugaaaaaaacaacgugaugcuucagugguag

SEQ ID NO: 287620 - RNA, 534 nt, Artificial Sequence
  derived and/or modified sequence
augaggcuguugauacucaccuguuugguugcugucgcacuagccaggccuaaacucccccugcgguauccugaacgccuccagaacccgucagagucuucagaacccaucccauuggaaucucgcgaggaauauaugaacggcaugaaucgccagagaaacauacuucgagagaaacagacugaugaaaucaagaauugugucguugccgaaccugagaagauggaaucuucaaucuccucauccuccgaagagaugucguugucuaagugugcugagcaguuuugcagauugaacgaguauaaucaauugcagcugcagaaaaugaguaagcaagagcagauacggagaaugaacgaaaacagccauguucaaguaccauuucagcaacuuaaucaacuggccgccuacccuuaugccgugugguacuauccccaaaucaugcaguaugugccuuucccuccuuuuagcgauaucuccaaucccacggcccaugagaacuacgagaaaaauaauguuaugcuccaaugguag

SEQ ID NO: 287621 - RNA, 510 nt, Artificial Sequence
  derived and/or modified sequence
augagacucuugauacugacgugucuuguggcuguggcccucgcucggccuaagcuuccccuccgauacccugaaaggcuccagaacccauccgagucgagcgaaccuaucccccuagaaucccgagaggaguacaugaacggaaugaaccgacaaaggaauauccugagggagaaacagacagacgaaauuaaaaacugcguaguugccgaaccagaaaagauggaaucaucuaucaguucuuccuccgaagagcaguucugcagacugaaugaguacaaucagcugcaauugcaagcagcucaugcgcaggagcagauucgcaggaugaacgaaaauagccaugugcagguuccuuuucaacagcuaaaccaacuggccgccuacccuuaugcagugugguacuacccucaaauuaugcaauacguacccuuuccacccuucagugacauaucuaacccgaccgcucacgaaaacuaugaaaaaaacaacgugaugcuucagugguag

SEQ ID NO: 287622 - protein, 291 aa, Artificial Sequence
  derived and/or modified sequence
MHQKLLKSAHYIELGSYQYWPVLVPRGIRLYTYEQIPGSLKDNPYITDGYRAYLPSRLCIKSLFILSNETVNIWSHLLGFFLFFTLGIYDMTSVLPSASASREDFVICSICLFCFQVCMLCSVGYHLFSCHRSEKTCRRWMALDYAGISIGILGCYVSGVFYAFYCNNYWRQVYLITVLAMILAVFFAQIHPNYLTQQWQRLRSIIFCSVSGYGVIPTLHWVWLNGGIGAPIVQDFAPRVIVMYMIALLAFLFYISKVPERYFPENIFRWKITKRTLGGVNNSLQNLYLLV

SEQ ID NO: 287623 - DNA, 876 bp, Artificial Sequence
  derived and/or modified sequence
atgcaccagaagctgctgaagagcgcccactacatcgagctgggcagctaccagtactggcccgtgctggtgcccagaggcatcagactgtacacctacgagcagatccccggcagcctgaaggacaacccctacatcaccgacggctacagagcctacctgcccagcagactgtgcatcaagagcctgttcatcctgagcaacgagaccgtgaacatctggagccacctgctgggcttcttcctgttcttcaccctgggcatctacgacatgaccagcgtgctgcccagcgccagcgccagcagagaggacttcgtgatctgcagcatctgcctgttctgcttccaggtgtgcatgctgtgcagcgtgggctaccacctgttcagctgccacagaagcgagaagacctgcagaagatggatggccctggactacgccggcatcagcatcggcatcctgggctgctacgtgagcggcgtgttctacgccttctactgcaacaactactggagacaggtgtacctgatcaccgtgctggccatgatcctggccgtgttcttcgcccagatccaccccaactacctgacccagcagtggcagagactgagaagcatcatcttctgcagcgtgagcggctacggcgtgatccccaccctgcactgggtgtggctgaacggcggcatcggcgcccccatcgtgcaggacttcgcccccagagtgatcgtgatgtacatgatcgccctgctggccttcctgttctacatcagcaaggtgcccgagagatacttccccgagaacatcttcagatggaagatcaccaagagaaccctgggcggcgtgaacaacagcctgcagaacctgtacctgctggtgtag

SEQ ID NO: 287624 - DNA, 876 bp, Artificial Sequence
  derived and/or modified sequence
atgcaccagaagctgttaaaatcagcacactacatcgagttaggcagttatcagtactggcctgtgctagttcctaggggcatccggctgtacacatatgaacaaattccaggatccttgaaggacaacccctacataactgacggctatcgggcttaccttcctagcagactgtgtattaagagcctctttatattgagtaacgagacagtgaacatttggtctcacttgttaggtttcttcctgttctttactttaggcatttacgacatgacctctgttttgcccagtgcatcagctagtagagaggacttcgtgatctgctccatctgtctcttttgcttccaggtttgtatgctttgttcagtcgggtatcacctgttctcatgtcaccgctctgaaaagacatgtagaaggtggatggcactcgactacgccggtatcagtatcggcatcttaggctgctacgtctccggtgtattctacgcattttactgcaataactactggcggcaggtgtacctgataaccgttcttgccatgatcctcgcagtgttttttgcacagatacatccaaattacctcactcagcagtggcagcgcctgcggagcatcatattttgctcagtgagcggttatggagtgataccgaccctgcactgggtctggctgaacgggggtatcggcgctccgattgtccaggatttcgccccccgtgtgattgttatgtacatgatcgcactgttagcattcctcttctatatttcgaaggtgcctgaacgctattttccagagaacatttttcgatggaagattacaaagcgcaccttgggcggcgtgaacaactctcttcagaacctgtaccttctggtctag

SEQ ID NO: 287625 - DNA, 876 bp, Artificial Sequence
  derived and/or modified sequence
atgcaccagaagctgctgaagagcgcccactacatcgagctgggcagctaccagtactggcctgtgctggtgccccggggcatccggctgtacacctatgagcagatccctggcagcctgaaggacaacccctacatcacagatggctaccgggcctacctgcccagccggctgtgcatcaagagcctcttcatcctgagcaatgagaccgtgaacatctggagccacctgctgggcttcttcctgttcttcaccctgggcatctatgacatgacctctgtgctgcccagcgccagcgccagcagagaagattttgtgatctgcagcatctgcctcttctgcttccaggtgtgcatgctgtgcagcgtgggctaccacctgttcagctgccacaggtctgagaagacctgccgccgctggatggccctggactatgccggcatcagcatcggcatcctgggctgctacgtgtctggagtcttctacgccttctactgcaacaactactggaggcaggtgtacctgatcaccgtgctggccatgatcctggccgtgttctttgcccagatccaccccaactacctgacccagcagtggcagaggctgcggagcatcatcttctgcagcgtgtctggctatggagtcatccccaccctgcactgggtgtggctgaatggaggcatcggggcccccatcgtgcaggactttgccccccgggtgattgtgatgtacatgattgccctgctggccttcctgttctacatcagcaaggtgcctgagcgctacttccctgagaacatcttccgctggaagatcaccaagaggaccctgggcggcgtgaacaacagcctgcagaacctgtacctgctggtgtag

SEQ ID NO: 287626 - DNA, 876 bp, Artificial Sequence
  derived and/or modified sequence
atgcaccagaagctgctgaagagcgcccactacatcgagctgggcagttaccagtattggccagtgctagtgcccagaggcatcagactctatacctacgagcaaatcccaggcagtcttaaagacaacccttacataacggacggatatcgcgcctatcttccaagccgtctctgtattaagtctctgtttatactgagtaacgaaacggtaaacatatggtctcacctcttgggattcttcctgttcttcacacttggcatctacgacatgacctctgttctgccgtccgctagcgcatcgcgagaagactttgtcatttgcagtatttgcctgttctgctttcaggtctgtatgctctgctccgtggggtatcacctgttctcttgccaccgttcagagaagacatgtcgcaggtggatggcactggattatgccgggattagcataggtattctggggtgctacgtctctggtgtcttctatgctttctactgcaacaattattggaggcaagtctacctcattacagtgctggctatgatcctcgccgtcttcttcgcacagatccatccaaattatctgactcagcagtggcagcgattacgttccatcattttttgttccgtaagcggttatggcgtcatccccaccttacactgggtgtggctcaacggtgggattggcgctcctatcgtccaggactttgcccctcgagtgattgttatgtatatgatcgccctccttgcgtttctgttttatattagcaaggtccccgagcgctatttccctgagaacatcttccgttggaaaatcacaaagcgaacattaggcggggtgaacaattcactgcagaacctgtatctgctggtgtag

SEQ ID NO: 287627 - DNA, 1964 bp, Artificial Sequence
  derived and/or modified sequence
agtggccggtgtgagcgcagagccgggccctgggcagcagcggcagcgcggtaggacctcgcgcagcgtccgcgggctccggggcgggggcgccagcggcgaagccccctccccggggaggcgggacctgggggagctcccgagccggggagcggcggcggccgggaacgatgcatcagaagctgctgaagagcgcgcattacatcgagctgggcagctaccagtactggccggtcctggtgccccgtggcatccgcctgtacacctacgagcagatccccgggtccctcaaggacaacccgtacatcaccgacggctaccgggcctacctgccgtccaggctgtgtatcaaaaggtctgtatgctttgctctgtgggctatcatcttttttcctgccatcggtcagaaaaaacatgtcgaagatggatggcattagattatgcaggaatttctattggaatactgggctgctatgtctcaggagtattttacgcattttattgtaataactactggcgtcaggtgtacttgatcacagtgcttgctatgatcctggcagtgttctttgcgcagattcatcccaattacctcacgcagcaatggcaaaggctccgttctatcatcttttgttctgtttcgggatatggagtgattcctactcttcactgggtttggctcaatggaggaattggtgctcctattgtacaggactttgcaccccgtgtaattgtgatgtatatgattgctcttcttgctttcctattctacatttccaaagtcccagagcggtactttccagaaaatattttcagatggaaaataactaagaggacactgggtggagtgaacaacagtctccaaaacctgtatttgcttgtttgagaactttagctctggagtcagactgcttgggttcaagacccacatcaaccactttctagttacgtgggctaaaatcacttccacggtgaatcagagaagggattgtaccactcgtcacgtgtgttgggaaagaagaaagggtgagaaaccctggcctaaacaatccatcccacagatcctcaggcattcctttgtgtacttggtttttcaccactgagctttaaataagaatggaaatacaagggaaaacctgcgttgtaaacatgaggatttgggaacagatctaggacatgccactgaattgaagaccacccatcttccaggcagggccagaattacagaaaacaattctggacaactaaactacctcggatcaagccaccaaatatggcatatccttgcagtagtgatgttatattggtggcatcagtcaacagtgtatgtcatgcagtacagacatagcaagccttgtcctgactatgtttcacatttgtgaattagaatcaggaacgaagattcagggaatgtctgtcacatcttatggcatcccacctggacagaatatccgatttgaagattgtgattgacttccgtaaaactgtacaactctccatttggcagtgcttacgtgaagtaccaaaacctaaaataaaccaagcagagtagctgacttgtaagaaaactgctctgcctggtgaacttcagcatagaagagtgggctccaccttagattttccaccagcaagaggacaacagtctatcactcttaaacaataaacaggtacctcctgctgaggaaaagttaggttccaggctgcaagttaccacaatccaagataaccaaacaagtctgaatgttgaaaagctgttcaatgtactcagcagaaatcctaaacactcaattcttcttttggctttacattttgatgatgttacatgtgtaacttgcctgaatgagaaatgaaaggaacagaaccaaaaggatcttctggaggatggttatgtggagcagaaagtgagtctacattcttatctgaggatgctctctcctcgagcctatctgcaaaaataagatgaaacg

SEQ ID NO: 287628 - DNA, 1055 bp, Artificial Sequence
  derived and/or modified sequence
gctggcggcagtggccggtgtgagcgcagagccgggccctgggcagcagcggcagcgcggtaggacctcgcgcagcgtccgcgggctccggggcgggggcgccagcggcgaagccccctccccggggaggcgggacctgggggagctcccgagccggggagcggcggcggccgggaacgatgcatcagaagctgctgaagagcgcgcattacatcgagctgggcagctaccagtactggccggtcctggtgccccgtggcatccgcctgtacacctacgagcagatccccgggtccctcaaggacaacccgtacatcaccgacggctaccgggcctacctgccgtccaggctgtgtatcaaaagtttgtttattttatctaatgagacagtaaacatctggagtcatttgctgggtttctttctcttcttcaccctgggaatatatgacatgacatctgtgttaccttcagcaagtgcgtccagagaagattttgtaatttgttctatttgtcttttctgcttccaggtctgtatgctttgctctgtgggctatcatcttttttcctgccatcggtcagaaaaaacatgtcgaagatggatggcattagattatgcaggaatttctattggaatactgggctgctatgtctcaggagtattttacgcattttattgtaataactactggcgtcaggtgtacttgatcacagtgcttgctatgatcctggcagtgttctttgcgcagattcatcccaattacctcacgcagcaatggcaaaggctccgttctatcatcttttgttctgtttcgggatatggagtgattcctactcttcactgggtttggctcaatggaggaattggtgctcctattgtacaggactttgcaccccgtgtaattgtgatgtatatgattgctcttcttgctttcctattctacatttccaaagtcccagagcggtactttccagaaaatattttcagatggaaaataactaagaggacactgggtggagtgaacaacagtctccaaaacctgtatttgcttgtttga

SEQ ID NO: 287629 - DNA, 876 bp, Artificial Sequence
  derived and/or modified sequence
atgcaccagaagttactgaaaagcgctcattacatcgagttgggatcttaccagtattggccagtgcttgttccccgaggcatcagactctacacctacgaacagattcctgggtccctcaaggataacccatacatcaccgacggctacagggcttaccttccatcccggttgtgtatcaagagcctcttcatcctctctaacgagacagtgaacatttggagccatctgttaggattcttcctgttcttcacccttgggatttatgatatgaccagcgtcctgccatctgcatccgccagtagagaggacttcgtaatctgttctatctgtctgttttgcttccaggtgtgtatgttatgtagtgtaggctatcatctcttcagttgccatcgcagtgagaaaacatgtcgacgttggatggcactcgactacgcgggaatttctatcgggattctgggctgctacgtgtcaggcgtattctacgcattttactgcaacaattactggcggcaggtttatctaatcactgtgttggctatgattctcgctgtattctttgcccagattcaccctaactatcttactcagcaatggcagcggcttcgctctatcatcttctgcagcgtcagtggatacggagtaattccgacactacattgggtgtggctgaatggaggcattggggctccaatagtccaggactttgcgccaagggtgatcgtaatgtacatgattgccctccttgctttcctgttctacataagcaaagttccagaacgctacttccctgagaatatcttcaggtggaaaatcactaagcgtactctgggcggagtcaataattctctgcagaatttgtacctgttggtgtag

SEQ ID NO: 287630 - protein, 88 aa, Artificial Sequence
  derived and/or modified sequence
MHQKLLKSAHYIELGSYQYWPVLVPRGIRLYTYEQIPGSLKDNPYITDGYRAYLPSRLCIKRSVCFALWAIIFFPAIGQKKHVEDGWH

SEQ ID NO: 287631 - DNA, 267 bp, Artificial Sequence
  derived and/or modified sequence
atgcaccagaagctgctgaagagcgcccactacatcgagctgggcagctaccagtactggcccgtgctggtgcccagaggcatcagactgtacacctacgagcagatccccggcagcctgaaggacaacccctacatcaccgacggctacagagcctacctgcccagcagactgtgcatcaagagaagcgtgtgcttcgccctgtgggccatcatcttcttccccgccatcggccagaagaagcacgtggaggacggctggcactag

SEQ ID NO: 287632 - DNA, 267 bp, Artificial Sequence
  derived and/or modified sequence
atgcaccaaaagttgcttaagtcagctcattacattgaattaggaagctatcagtattggccagtgcttgttccaagaggaatcagactgtacacgtacgagcaaatacccggcagcctgaaggacaatccctatatcacagatgggtacagggcctaccttccgtctcgtttatgtattaagagaagtgtctgctttgccctgtgggcgatcatcttctttccagcgattggccagaagaagcacgtcgaagatggatggcattag

SEQ ID NO: 287633 - DNA, 267 bp, Artificial Sequence
  derived and/or modified sequence
atgcaccagaagctgctgaagagcgcccactacatcgagctgggcagctaccagtactggcctgtgctggtgccccggggcatccggctgtacacctatgagcagatccctggcagcctgaaggacaacccctacatcacagatggctaccgggcctacctgcccagccggctgtgcatcaagaggtctgtgtgctttgccctgtgggccatcatcttcttccctgccatcggccagaagaagcacgtggaggatggctggcactag

SEQ ID NO: 287634 - DNA, 267 bp, Artificial Sequence
  derived and/or modified sequence
atgcaccagaagctgctgaagagcgcccactacatcgagctgggctcataccagtattggcctgttctggtcccccgtggaatcaggctttacacatacgaacagattcccggatccctaaaagacaacccatacataactgatggctaccgtgcctatctccccagtcggctgtgtattaaacgaagcgtatgctttgccctgtgggcgatcatttttttccctgcaatcggacagaaaaagcacgtggaggatgggtggcattag

SEQ ID NO: 287635 - DNA, 267 bp, Artificial Sequence
  derived and/or modified sequence
atgcatcagaagctgctgaagagcgcacattacatcgagttgggctcataccaatattggcccgtcttagttccaagggggatcaggctctacacgtatgagcagattccaggctccctcaaagataacccatatattacagacgggtacagggcctatctcccatctcgtctgtgtatcaagcgctccgtgtgcttcgcactctgggctattattttcttccctgccatcggacaaaaaaagcacgtggaggatggttggcactag

SEQ ID NO: 287636 - protein, 80 aa, Artificial Sequence
  derived and/or modified sequence
MVKCCSAIGCASRCLPNSKLKGLTFHVFPTDENIKRKWVLAMKRLDVNAAGIWEPKKGDVLCSRHFKKTDFDRSAPNIKL

SEQ ID NO: 287637 - protein, 4590 aa, Artificial Sequence
  derived and/or modified sequence
MGRHLALLLLLLLLFQHFGDSDGSQRLEQTPLQFTHLEYNVTVQENSAAKTYVGHPVKMGVYITHPAWEVRYKIVSGDSENLFKAEEYILGDFCFLRIRTKGGNTAILNREVKDHYTLIVKALEKNTNVEARTKVRVQVLDTNDLRPLFSPTSYSVSLPENTAIRTSIARVSATDADIGTNGEFYYSFKDRTDMFAIHPTSGVIVLTGRLDYLETKLYEMEILAADRGMKLYGSSGISSMAKLTVHIEQANECAPVITAVTLSPSELDRDPAYAIVTVDDCDQGANGDIASLSIVAGDLLQQFRTVRSFPGSKEYKVKAIGGIDWDSHPFGYNLTLQAKDKGTPPQFSSVKVIHVTSPQFKAGPVKFEKDVYRAEISEFAPPNTPVVMVKAIPAYSHLRYVFKSTPGKAKFSLNYNTGLISILEPVKRQQAAHFELEVTTSDRKASTKVLVKVLGANSNPPEFTQTAYKAAFDENVPIGTTVMSLSAVDPDEGENGYVTYSIANLNHVPFAIDHFTGAVSTSENLDYELMPRVYTLRIRASDWGLPYRREVEVLATITLNNLNDNTPLFEKINCEGTIPRDLGVGEQITTVSAIDADELQLVQYQIEAGNELDFFSLNPNSGVLSLKRSLMDGLGAKVSFHSLRITATDGENFATPLYINITVAASHKLVNLQCEETGVAKMLAEKLLQANKLHNQGEVEDIFFDSHSVNAHIPQFRSTLPTGIQVKENQPVGSSVIFMNSTDLDTGFNGKLVYAVSGGNEDSCFMIDMETGMLKILSPLDRETTDKYTLNITVYDLGIPQKAAWRLLHVVVVDANDNPPEFLQESYFVEVSEDKEVHSEIIQVEATDKDLGPNGHVTYSIVTDTDTFSIDSVTGVVNIARPLDRELQHEHSLKIEARDQAREEPQLFSTVVVKVSLEDVNDNPPTFIPPNYRVKVREDLPEGTVIMWLEAHDPDLGQSGQVRYSLLDHGEGNFDVDKLSGAVRIVQQLDFEKKQVYNLTVRAKDKGKPVSLSSTCYVEVEVVDVNENLHPPVFSSFVEKGTVKEDAPVGSLVMTVSAHDEDARRDGEIRYSIRDGSGVGVFKIGEETGVIETSDRLDRESTSHYWLTVFATDQGVVPLSSFIEIYIEVEDVNDNAPQTSEPVYYPEIMENSPKDVSVVQIEAFDPDSSSNDKLMYKITSGNPQGFFSIHPKTGLITTTSRKLDREQQDEHILEVTVTDNGSPPKSTIARVIVKILDENDNKPQFLQKFYKIRLPEREKPDRERNARREPLYHVIATDKDEGPNAEISYSIEDGNEHGKFFIEPKTGVVSSKRFSAAGEYDILSIKAVDNGRPQKSSTTRLHIEWISKPKPSLEPISFEESFFTFTVMESDPVAHMIGVISVEPPGIPLWFDITGGNYDSHFDVDKGTGTIIVAKPLDAEQKSNYNLTVEATDGTTTILTQVFIKVIDTNDHRPQFSTSKYEVVIPEDTAPETEILQISAVDQDEKNKLIYTLQSSRDPLSLKKFRLDPATGSLYTSEKLDHEAVPAHLTVMVRDQDVPVKRNFARIVVNVSDTNDHAPWFTASSYKGRVYESAAVGSVVLQVTALDKDKGKNAEVLYSIESGTFGNIGNSFMIDPVLGSIKTAKELDRSNQAEYDLMVKATDKGSPPMSEITSVRIFVTIADNASPKFTSKEYSVELSETVSIGSFVGMVTAHSQSSVVYEIKDGNTGDAFDINPHSGTIITQKALDFETLPIYTLIIQGTNMAGLSTNTTVLVHLQDENDNAPVFMQAEYTGLISESASINSVVLTDRNVPLVIRAADADKDSNALLVYHIVEPSVHTYFAIDSSTGAIHTVLSLDYEETSIFHFTVQVHDMGTPRLFAEYAANVTVHVIDINDCPPVFAKPLYEASLLLPTYKGVKVITVNATDADSSAFSQLIYSITEGNIGEKFSMDYKTGALTVQNTTQLRSRYELTVRASDGRFAGLTSVKINVKESKESHLKFTQDVYSAVVKENSTEAETLAVITAIGNPINEPLFYHILNPDRRFKISRTSGVLSTTGTPFDREQQEAFDVVVEVTEEHKPSAVAHVVVKVIVEDQNDNAPVFVNLPYYAVVKVDTEVGHVIRYVTAVDRDSGRNGEVHYYLKEHHEHFQIGPLGEISLKKQFELDTLNKEYLVTVVAKDGGNPAFSAEVIVPITVMNKAMPVFEKPFYSAEIAESIQVHSPVVHVQANSPEGLKVFYSITDGDPFSQFTINFNTGVINVIAPLDFEAHPAYKLSIRATDSLTGAHAEVFVDIIVDDINDNPPVFAQQSYAVTLSEASVIGTSVVQVRATDSDSEPNRGISYQMFGNHSKSHDHFHVDSSTGLISLLRTLDYEQSRQHTIFVRAVDGGMPTLSSDVIVTVDVTDLNDNPPLFEQQIYEARISEHAPHGHFVTCVKAYDADSSDIDKLQYSILSGNDHKHFVIDSATGIITLSNLHRHALKPFYSLNLSVSDGVFRSSTQVHVTVIGGNLHSPAFLQNEYEVELAENAPLHTLVMEVKTTDGDSGIYGHVTYHIVNDFAKDRFYINERGQIFTLEKLDRETPAEKVISVRLMAKDAGGKVAFCTVNVILTDDNDNAPQFRATKYEVNIGSSAAKGTSVVKVLASDADEGSNADITYAIEADSESVKENLEINKLSGVITTKESLIGLENEFFTFFVRAVDNGSPSKESVVLVYVKILPPEMQLPKFSEPFYTFTVSEDVPIGTEIDLIRAEHSGTVLYSLVKGNTPESNRDESFVIDRQSGRLKLEKSLDHETTKWYQFSILARCTQDDHEMVASVDVSIQVKDANDNSPVFESSPYEAFIVENLPGGSRVIQIRASDADSGTNGQVMYSLDQSQSVEVIESFAINMETGWITTLKELDHEKRDNYQIKVVASDHGEKIQLSSTAIVDVTVTDVNDSPPRFTAEIYKGTVSEDDPQGGVIAILSTTDADSEEINRQVTYFITGGDPLGQFAVETIQNEWKVYVKKPLDREKRDNYLLTITATDGTFSSKAIVEVKVLDANDNSPVCEKTLYSDTIPEDVLPGKLIMQISATDADIRSNAEITYTLLGSGAEKFKLNPDTGELKTSTPLDREEQAVYHLLVRATDGGGRFCQASIVLTLEDVNDNAPEFSADPYAITVFENTEPGTLLTRVQATDADAGLNRKILYSLIDSADGQFSINELSGIIQLEKPLDRELQAVYTLSLKAVDQGLPRRLTATGTVIVSVLDINDNPPVFEYREYGATVSEDILVGTEVLQVYAASRDIEANAEITYSIISGNEHGKFSIDSKTGAVFIIENLDYESSHEYYLTVEATDGGTPSLSDVATVNVNVTDINDNTPVFSQDTYTTVISEDAVLEQSVITVMADDADGPSNSHIHYSIIDGNQGSSFTIDPVRGEVKVTKLLDRETISGYTLTVQASDNGSPPRVNTTTVNIDVSDVNDNAPVFSRGNYSVIIQENKPVGFSVLQLVVTDEDSSHNGPPFFFTIVTGNDEKAFEVNPQGVLLTSSAIKRKEKDHYLLQVKVADNGKPQLSSLTYIDIRVIEESIYPPAILPLEIFITSSGEEYSGGVIGKIHATDQDVYDTLTYSLDPQMDNLFSVSSTGGKLIAHKKLDIGQYLLNVSVTDGKFTTVADITVHIRQVTQEMLNHTIAIRFANLTPEEFVGDYWRNFQRALRNILGVRRNDIQIVSLQSSEPHPHLDVLLFVEKPGSAQISTKQLLHKINSSVTDIEEIIGVRILNVFQKLCAGLDCPWKFCDEKVSVDESVMSTHSTARLSFVTPRHHRAAVCLCKEGRCPPVHHGCEDDPCPEGSECVSDPWEEKHTCVCPSGRFGQCPGSSSMTLTGNSYVKYRLTENENKLEMKLTMRLRTYSTHAVVMYARGTDYSILEIHHGRLQYKFDCGSGPGIVSVQSIQVNDGQWHAVALEVNGNYARLVLDQVHTASGTAPGTLKTLNLDNYVFFGGHIRQQGTRHGRSPQVGNGFRGCMDSIYLNGQELPLNSKPRSYAHIEESVDVSPGCFLTATEDCASNPCQNGGVCNPSPAGGYYCKCSALYIGTHCEISVNPCSSKPCLYGGTCVVDNGGFVCQCRGLYTGQRCQLSPYCKDEPCKNGGTCFDSLDGAVCQCDSGFRGERCQSDIDECSGNPCLHGALCENTHGSYHCNCSHEYRGRHCEDAAPNQYVSTPWNIGLAEGIGIVVFVAGIFLLVVVFVLCRKMISRKKKHQAEPKDKHLGPATAFLQRPYFDSKLNKNIYSDIPPQVPVRPISYTPSIPSDSRNNLDRNSFEGSAIPEHPEFSTFNPESVHGHRKAVAVCSVAPNLPPPPPSNSPSDSDSIQKPSWDFDYDTKVVDLDPCLSKKPLEEKPSQPYSARESLSEVQSLSSFQSESCDDNGYHWDTSDWMPSVPLPDIQEFPNYEVIDEQTPLYSADPNAIDTDYYPGGYDIESDFPPPPEDFPAADELPPLPPEFSNQFESIHPPRDMPAAGSLGSSSRNRQRFNLNQYLPNFYPLDMSEPQTKGTGENSTCREPHAPYPPGYQRHFEAPAVESMPMSVYASTASCSDVSACCEVESEVMMSDYESGDDGHFEEVTIPPLDSQQHTEV

SEQ ID NO: 287638 - protein, 4588 aa, Artificial Sequence
  derived and/or modified sequence
MGRHLALLLLLLLLFQHFGDSDGSQRLEQTPLQFTHLEYNVTVQENSAAKTYVGHPVKMGVYITHPAWEVRYKIVSGDSENLFKAEEYILGDFCFLRIRTKGGNTAILNREVKDHYTLIVKALEKNTNVEARTKVRVQVLDTNDLRPLFSPTSYSVSLPENTAIRTSIARVSATDADIGTNGEFYYSFKDRTDMFAIHPTSGVIVLTGRLDYLETKLYEMEILAADRGMKLYGSSGISSMAKLTVHIEQANECAPVITAVTLSPSELDRDPAYAIVTVDDCDQGANGDIASLSIVAGDLLQQFRTVRSFPGSKEYKVKAIGGIDWDSHPFGYNLTLQAKDKGTPPQFSSVKVIHVTSPQFKAGPVKFEKDVYRAEISEFAPPNTPVVMVKAIPAYSHLRYVFKSTPGKAKFSLNYNTGLISILEPVKRQQAAHFELEVTTSDRKASTKVLVKVLGANSNPPEFTQTAYKAAFDENVPIGTTVMSLSAVDPDEGENGYVTYSIANLNHVPFAIDHFTGAVSTSENLDYELMPRVYTLRIRASDWGLPYRREVEVLATITLNNLNDNTPLFEKINCEGTIPRDLGVGEQITTVSAIDADELQLVQYQIEAGNELDFFSLNPNSGVLSLKRSLMDGLGAKVSFHSLRITATDGENFATPLYINITVAASHKLVNLQCEETGVAKMLAEKLLQANKLHNQGEVEDIFFDSHSVNAHIPQFRSTLPTGIQVKENQPVGSSVIFMNSTDLDTGFNGKLVYAVSGGNEDSCFMIDMETGMLKILSPLDRETTDKYTLNITVYDLGIPQKAAWRLLHVVVVDANDNPPEFLQESYFVEVSEDKEVHSEIIQVEATDKDLGPNGHVTYSIVTDTDTFSIDSVTGVVNIARPLDRELQHEHSLKIEARDQAREEPQLFSTVVVKVSLEDVNDNPPTFIPPNYRVKVREDLPEGTVIMWLEAHDPDLGQSGQVRYSLLDHGEGNFDVDKLSGAVRIVQQLDFEKKQVYNLTVRAKDKGKPVSLSSTCYVEVEVVDVNENLHPPVFSSFVEKGTVKEDAPVGSLVMTVSAHDEDARRDGEIRYSIRDGSGVGVFKIGEETGVIETSDRLDRESTSHYWLTVFATDQGVVPLSSFIEIYIEVEDVNDNAPQTSEPVYYPEIMENSPKDVSVVQIEAFDPDSSSNDKLMYKITSGNPQGFFSIHPKTGLITTTSRKLDREQQDEHILEVTVTDNGSPPKSTIARVIVKILDENDNKPQFLQKFYKIRLPEREKPDRERNARREPLYHVIATDKDEGPNAEISYSIEDGNEHGKFFIEPKTGVVSSKRFSAAGEYDILSIKAVDNGRPQKSSTTRLHIEWISKPKPSLEPISFEESFFTFTVMESDPVAHMIGVISVEPPGIPLWFDITGGNYDSHFDVDKGTGTIIVAKPLDAEQKSNYNLTVEATDGTTTILTQVFIKVIDTNDHRPQFSTSKYEVVIPEDTAPETEILQISAVDQDEKNKLIYTLQSSRDPLSLKKFRLDPATGSLYTSEKLDHEAVHQHTLTVMVRDQDVPVKRNFARIVVNVSDTNDHAPWFTASSYKGRVYESAAVGSVVLQVTALDKDKGKNAEVLYSIESGNIGNSFMIDPVLGSIKTAKELDRSNQAEYDLMVKATDKGSPPMSEITSVRIFVTIADNASPKFTSKEYSVELSETVSIGSFVGMVTAHSQSSVVYEIKDGNTGDAFDINPHSGTIITQKALDFETLPIYTLIIQGTNMAGLSTNTTVLVHLQDENDNAPVFMQAEYTGLISESASINSVVLTDRNVPLVIRAADADKDSNALLVYHIVEPSVHTYFAIDSSTGAIHTVLSLDYEETSIFHFTVQVHDMGTPRLFAEYAANVTVHVIDINDCPPVFAKPLYEASLLLPTYKGVKVITVNATDADSSAFSQLIYSITEGNIGEKFSMDYKTGALTVQNTTQLRSRYELTVRASDGRFAGLTSVKINVKESKESHLKFTQDVYSAVVKENSTEAETLAVITAIGNPINEPLFYHILNPDRRFKISRTSGVLSTTGTPFDREQQEAFDVVVEVTEEHKPSAVAHVVVKVIVEDQNDNAPVFVNLPYYAVVKVDTEVGHVIRYVTAVDRDSGRNGEVHYYLKEHHEHFQIGPLGEISLKKQFELDTLNKEYLVTVVAKDGGNPAFSAEVIVPITVMNKAMPVFEKPFYSAEIAESIQVHSPVVHVQANSPEGLKVFYSITDGDPFSQFTINFNTGVINVIAPLDFEAHPAYKLSIRATDSLTGAHAEVFVDIIVDDINDNPPVFAQQSYAVTLSEASVIGTSVVQVRATDSDSEPNRGISYQMFGNHSKSHDHFHVDSSTGLISLLRTLDYEQSRQHTIFVRAVDGGMPTLSSDVIVTVDVTDLNDNPPLFEQQIYEARISEHAPHGHFVTCVKAYDADSSDIDKLQYSILSGNDHKHFVIDSATGIITLSNLHRHALKPFYSLNLSVSDGVFRSSTQVHVTVIGGNLHSPAFLQNEYEVELAENAPLHTLVMEVKTTDGDSGIYGHVTYHIVNDFAKDRFYINERGQIFTLEKLDRETPAEKVISVRLMAKDAGGKVAFCTVNVILTDDNDNAPQFRATKYEVNIGSSAAKGTSVVKVLASDADEGSNADITYAIEADSESVKENLEINKLSGVITTKESLIGLENEFFTFFVRAVDNGSPSKESVVLVYVKILPPEMQLPKFSEPFYTFTVSEDVPIGTEIDLIRAEHSGTVLYSLVKGNTPESNRDESFVIDRQSGRLKLEKSLDHETTKWYQFSILARCTQDDHEMVASVDVSIQVKDANDNSPVFESSPYEAFIVENLPGGSRVIQIRASDADSGTNGQVMYSLDQSQSVEVIESFAINMETGWITTLKELDHEKRDNYQIKVVASDHGEKIQLSSTAIVDVTVTDVNDSPPRFTAEIYKGTVSEDDPQGGVIAILSTTDADSEEINRQVTYFITGGDPLGQFAVETIQNEWKVYVKKPLDREKRDNYLLTITATDGTFSSKAIVEVKVLDANDNSPVCEKTLYSDTIPEDVLPGKLIMQISATDADIRSNAEITYTLLGSGAEKFKLNPDTGELKTSTPLDREEQAVYHLLVRATDGGGRFCQASIVLTLEDVNDNAPEFSADPYAITVFENTEPGTLLTRVQATDADAGLNRKILYSLIDSADGQFSINELSGIIQLEKPLDRELQAVYTLSLKAVDQGLPRRLTATGTVIVSVLDINDNPPVFEYREYGATVSEDILVGTEVLQVYAASRDIEANAEITYSIISGNEHGKFSIDSKTGAVFIIENLDYESSHEYYLTVEATDGGTPSLSDVATVNVNVTDINDNTPVFSQDTYTTVISEDAVLEQSVITVMADDADGPSNSHIHYSIIDGNQGSSFTIDPVRGEVKVTKLLDRETISGYTLTVQASDNGSPPRVNTTTVNIDVSDVNDNAPVFSRGNYSVIIQENKPVGFSVLQLVVTDEDSSHNGPPFFFTIVTGNDEKAFEVNPQGVLLTSSAIKRKEKDHYLLQVKVADNGKPQLSSLTYIDIRVIEESIYPPAILPLEIFITSSGEEYSGGVIGKIHATDQDVYDTLTYSLDPQMDNLFSVSSTGGKLIAHKKLDIGQYLLNVSVTDGKFTTVADITVHIRQVTQEMLNHTIAIRFANLTPEEFVGDYWRNFQRALRNILGVRRNDIQIVSLQSSEPHPHLDVLLFVEKPGSAQISTKQLLHKINSSVTDIEEIIGVRILNVFQKLCAGLDCPWKFCDEKVSVDESVMSTHSTARLSFVTPRHHRAAVCLCKEGRCPPVHHGCEDDPCPEGSECVSDPWEEKHTCVCPSGRFGQCPGSSSMTLTGNSYVKYRLTENENKLEMKLTMRLRTYSTHAVVMYARGTDYSILEIHHGRLQYKFDCGSGPGIVSVQSIQVNDGQWHAVALEVNGNYARLVLDQVHTASGTAPGTLKTLNLDNYVFFGGHIRQQGTRHGRSPQVGNGFRGCMDSIYLNGQELPLNSKPRSYAHIEESVDVSPGCFLTATEDCASNPCQNGGVCNPSPAGGYYCKCSALYIGTHCEISVNPCSSKPCLYGGTCVVDNGGFVCQCRGLYTGQRCQLSPYCKDEPCKNGGTCFDSLDGAVCQCDSGFRGERCQSDIDECSGNPCLHGALCENTHGSYHCNCSHEYRGRHCEDAAPNQYVSTPWNIGLAEGIGIVVFVAGIFLLVVVFVLCRKMISRKKKHQAEPKDKHLGPATAFLQRPYFDSKLNKNIYSDIPPQVPVRPISYTPSIPSDSRNNLDRNSFEGSAIPEHPEFSTFNPESVHGHRKAVAVCSVAPNLPPPPPSNSPSDSDSIQKPSWDFDYDTKVVDLDPCLSKKPLEEKPSQPYSARESLSEVQSLSSFQSESCDDNGYHWDTSDWMPSVPLPDIQEFPNYEVIDEQTPLYSADPNAIDTDYYPGGYDIESDFPPPPEDFPAADELPPLPPEFSNQFESIHPPRDMPAAGSLGSSSRNRQRFNLNQYLPNFYPLDMSEPQTKGTGENSTCREPHAPYPPGYQRHFEAPAVESMPMSVYASTASCSDVSACCEVESEVMMSDYESGDDGHFEEVTIPPLDSQQHTEV

SEQ ID NO: 287639 - protein, 488 aa, Artificial Sequence
  derived and/or modified sequence
MGRHLALLLLLLLLFQHFGDSDGSQRLEQTPLQFTHLEYNVTVQENSAAKTYVGHPVKMGVYITHPAWEVRYKIVSGDSENLFKAEEYILGDFCFLRIRTKGGNTAILNREVKDHYTLIVKALEKNTNVEARTKVRVQVLDTNDLRPLFSPTSYSVSLPENTAIRTSIARVSATDADIGTNGEFYYSFKDRTDMFAIHPTSGVIVLTGRLDYLETKLYEMEILAADRGMKLYGSSGISSMAKLTVHIEQANECAPVITAVTLSPSELDRDPAYAIVTVDDCDQGANGDIASLSIVAGDLLQQFRTVRSFPGSKEYKVKAIGGIDWDSHPFGYNLTLQAKDKGTPPQFSSVKVIHVTSPQFKAGPVKFEKDVYRAEISEFAPPNTPVVMVKAIPAYSHLRYVFKSTPGKAKFSLNYNTGLISILEPVKRQQAAHFELEVTTSDRKASTKVLVKVLGANSNPPEFTQTAYKAAFDENVPIGTTVMSLSAV

SEQ ID NO: 287640 - DNA, 13773 bp, Artificial Sequence
  derived and/or modified sequence
atgggcagacacctggccctgctgctgctgctgctgctgctgttccagcacttcggcgacagcgacggcagccagagactggagcagacccccctgcagttcacccacctggagtacaacgtgaccgtgcaggagaacagcgccgccaagacctacgtgggccaccccgtgaagatgggcgtgtacatcacccaccccgcctgggaggtgagatacaagatcgtgagcggcgacagcgagaacctgttcaaggccgaggagtacatcctgggcgacttctgcttcctgagaatcagaaccaagggcggcaacaccgccatcctgaacagagaggtgaaggaccactacaccctgatcgtgaaggccctggagaagaacaccaacgtggaggccagaaccaaggtgagagtgcaggtgctggacaccaacgacctgagacccctgttcagccccaccagctacagcgtgagcctgcccgagaacaccgccatcagaaccagcatcgccagagtgagcgccaccgacgccgacatcggcaccaacggcgagttctactacagcttcaaggacagaaccgacatgttcgccatccaccccaccagcggcgtgatcgtgctgaccggcagactggactacctggagaccaagctgtacgagatggagatcctggccgccgacagaggcatgaagctgtacggcagcagcggcatcagcagcatggccaagctgaccgtgcacatcgagcaggccaacgagtgcgcccccgtgatcaccgccgtgaccctgagccccagcgagctggacagagaccccgcctacgccatcgtgaccgtggacgactgcgaccagggcgccaacggcgacatcgccagcctgagcatcgtggccggcgacctgctgcagcagttcagaaccgtgagaagcttccccggcagcaaggagtacaaggtgaaggccatcggcggcatcgactgggacagccaccccttcggctacaacctgaccctgcaggccaaggacaagggcacccccccccagttcagcagcgtgaaggtgatccacgtgaccagcccccagttcaaggccggccccgtgaagttcgagaaggacgtgtacagagccgagatcagcgagttcgccccccccaacacccccgtggtgatggtgaaggccatccccgcctacagccacctgagatacgtgttcaagagcacccccggcaaggccaagttcagcctgaactacaacaccggcctgatcagcatcctggagcccgtgaagagacagcaggccgcccacttcgagctggaggtgaccaccagcgacagaaaggccagcaccaaggtgctggtgaaggtgctgggcgccaacagcaacccccccgagttcacccagaccgcctacaaggccgccttcgacgagaacgtgcccatcggcaccaccgtgatgagcctgagcgccgtggaccccgacgagggcgagaacggctacgtgacctacagcatcgccaacctgaaccacgtgcccttcgccatcgaccacttcaccggcgccgtgagcaccagcgagaacctggactacgagctgatgcccagagtgtacaccctgagaatcagagccagcgactggggcctgccctacagaagagaggtggaggtgctggccaccatcaccctgaacaacctgaacgacaacacccccctgttcgagaagatcaactgcgagggcaccatccccagagacctgggcgtgggcgagcagatcaccaccgtgagcgccatcgacgccgacgagctgcagctggtgcagtaccagatcgaggccggcaacgagctggacttcttcagcctgaaccccaacagcggcgtgctgagcctgaagagaagcctgatggacggcctgggcgccaaggtgagcttccacagcctgagaatcaccgccaccgacggcgagaacttcgccacccccctgtacatcaacatcaccgtggccgccagccacaagctggtgaacctgcagtgcgaggagaccggcgtggccaagatgctggccgagaagctgctgcaggccaacaagctgcacaaccagggcgaggtggaggacatcttcttcgacagccacagcgtgaacgcccacatcccccagttcagaagcaccctgcccaccggcatccaggtgaaggagaaccagcccgtgggcagcagcgtgatcttcatgaacagcaccgacctggacaccggcttcaacggcaagctggtgtacgccgtgagcggcggcaacgaggacagctgcttcatgatcgacatggagaccggcatgctgaagatcctgagccccctggacagagagaccaccgacaagtacaccctgaacatcaccgtgtacgacctgggcatcccccagaaggccgcctggagactgctgcacgtggtggtggtggacgccaacgacaacccccccgagttcctgcaggagagctacttcgtggaggtgagcgaggacaaggaggtgcacagcgagatcatccaggtggaggccaccgacaaggacctgggccccaacggccacgtgacctacagcatcgtgaccgacaccgacaccttcagcatcgacagcgtgaccggcgtggtgaacatcgccagacccctggacagagagctgcagcacgagcacagcctgaagatcgaggccagagaccaggccagagaggagccccagctgttcagcaccgtggtggtgaaggtgagcctggaggacgtgaacgacaacccccccaccttcatcccccccaactacagagtgaaggtgagagaggacctgcccgagggcaccgtgatcatgtggctggaggcccacgaccccgacctgggccagagcggccaggtgagatacagcctgctggaccacggcgagggcaacttcgacgtggacaagctgagcggcgccgtgagaatcgtgcagcagctggacttcgagaagaagcaggtgtacaacctgaccgtgagagccaaggacaagggcaagcccgtgagcctgagcagcacctgctacgtggaggtggaggtggtggacgtgaacgagaacctgcacccccccgtgttcagcagcttcgtggagaagggcaccgtgaaggaggacgcccccgtgggcagcctggtgatgaccgtgagcgcccacgacgaggacgccagaagagacggcgagatcagatacagcatcagagacggcagcggcgtgggcgtgttcaagatcggcgaggagaccggcgtgatcgagaccagcgacagactggacagagagagcaccagccactactggctgaccgtgttcgccaccgaccagggcgtggtgcccctgagcagcttcatcgagatctacatcgaggtggaggacgtgaacgacaacgccccccagaccagcgagcccgtgtactaccccgagatcatggagaacagccccaaggacgtgagcgtggtgcagatcgaggccttcgaccccgacagcagcagcaacgacaagctgatgtacaagatcaccagcggcaacccccagggcttcttcagcatccaccccaagaccggcctgatcaccaccaccagcagaaagctggacagagagcagcaggacgagcacatcctggaggtgaccgtgaccgacaacggcagcccccccaagagcaccatcgccagagtgatcgtgaagatcctggacgagaacgacaacaagccccagttcctgcagaagttctacaagatcagactgcccgagagagagaagcccgacagagagagaaacgccagaagagagcccctgtaccacgtgatcgccaccgacaaggacgagggccccaacgccgagatcagctacagcatcgaggacggcaacgagcacggcaagttcttcatcgagcccaagaccggcgtggtgagcagcaagagattcagcgccgccggcgagtacgacatcctgagcatcaaggccgtggacaacggcagaccccagaagagcagcaccaccagactgcacatcgagtggatcagcaagcccaagcccagcctggagcccatcagcttcgaggagagcttcttcaccttcaccgtgatggagagcgaccccgtggcccacatgatcggcgtgatcagcgtggagccccccggcatccccctgtggttcgacatcaccggcggcaactacgacagccacttcgacgtggacaagggcaccggcaccatcatcgtggccaagcccctggacgccgagcagaagagcaactacaacctgaccgtggaggccaccgacggcaccaccaccatcctgacccaggtgttcatcaaggtgatcgacaccaacgaccacagaccccagttcagcaccagcaagtacgaggtggtgatccccgaggacaccgcccccgagaccgagatcctgcagatcagcgccgtggaccaggacgagaagaacaagctgatctacaccctgcagagcagcagagaccccctgagcctgaagaagttcagactggaccccgccaccggcagcctgtacaccagcgagaagctggaccacgaggccgtgcccgcccacctgaccgtgatggtgagagaccaggacgtgcccgtgaagagaaacttcgccagaatcgtggtgaacgtgagcgacaccaacgaccacgccccctggttcaccgccagcagctacaagggcagagtgtacgagagcgccgccgtgggcagcgtggtgctgcaggtgaccgccctggacaaggacaagggcaagaacgccgaggtgctgtacagcatcgagagcggcaccttcggcaacatcggcaacagcttcatgatcgaccccgtgctgggcagcatcaagaccgccaaggagctggacagaagcaaccaggccgagtacgacctgatggtgaaggccaccgacaagggcagcccccccatgagcgagatcaccagcgtgagaatcttcgtgaccatcgccgacaacgccagccccaagttcaccagcaaggagtacagcgtggagctgagcgagaccgtgagcatcggcagcttcgtgggcatggtgaccgcccacagccagagcagcgtggtgtacgagatcaaggacggcaacaccggcgacgccttcgacatcaacccccacagcggcaccatcatcacccagaaggccctggacttcgagaccctgcccatctacaccctgatcatccagggcaccaacatggccggcctgagcaccaacaccaccgtgctggtgcacctgcaggacgagaacgacaacgcccccgtgttcatgcaggccgagtacaccggcctgatcagcgagagcgccagcatcaacagcgtggtgctgaccgacagaaacgtgcccctggtgatcagagccgccgacgccgacaaggacagcaacgccctgctggtgtaccacatcgtggagcccagcgtgcacacctacttcgccatcgacagcagcaccggcgccatccacaccgtgctgagcctggactacgaggagaccagcatcttccacttcaccgtgcaggtgcacgacatgggcacccccagactgttcgccgagtacgccgccaacgtgaccgtgcacgtgatcgacatcaacgactgcccccccgtgttcgccaagcccctgtacgaggccagcctgctgctgcccacctacaagggcgtgaaggtgatcaccgtgaacgccaccgacgccgacagcagcgccttcagccagctgatctacagcatcaccgagggcaacatcggcgagaagttcagcatggactacaagaccggcgccctgaccgtgcagaacaccacccagctgagaagcagatacgagctgaccgtgagagccagcgacggcagattcgccggcctgaccagcgtgaagatcaacgtgaaggagagcaaggagagccacctgaagttcacccaggacgtgtacagcgccgtggtgaaggagaacagcaccgaggccgagaccctggccgtgatcaccgccatcggcaaccccatcaacgagcccctgttctaccacatcctgaaccccgacagaagattcaagatcagcagaaccagcggcgtgctgagcaccaccggcacccccttcgacagagagcagcaggaggccttcgacgtggtggtggaggtgaccgaggagcacaagcccagcgccgtggcccacgtggtggtgaaggtgatcgtggaggaccagaacgacaacgcccccgtgttcgtgaacctgccctactacgccgtggtgaaggtggacaccgaggtgggccacgtgatcagatacgtgaccgccgtggacagagacagcggcagaaacggcgaggtgcactactacctgaaggagcaccacgagcacttccagatcggccccctgggcgagatcagcctgaagaagcagttcgagctggacaccctgaacaaggagtacctggtgaccgtggtggccaaggacggcggcaaccccgccttcagcgccgaggtgatcgtgcccatcaccgtgatgaacaaggccatgcccgtgttcgagaagcccttctacagcgccgagatcgccgagagcatccaggtgcacagccccgtggtgcacgtgcaggccaacagccccgagggcctgaaggtgttctacagcatcaccgacggcgaccccttcagccagttcaccatcaacttcaacaccggcgtgatcaacgtgatcgcccccctggacttcgaggcccaccccgcctacaagctgagcatcagagccaccgacagcctgaccggcgcccacgccgaggtgttcgtggacatcatcgtggacgacatcaacgacaacccccccgtgttcgcccagcagagctacgccgtgaccctgagcgaggccagcgtgatcggcaccagcgtggtgcaggtgagagccaccgacagcgacagcgagcccaacagaggcatcagctaccagatgttcggcaaccacagcaagagccacgaccacttccacgtggacagcagcaccggcctgatcagcctgctgagaaccctggactacgagcagagcagacagcacaccatcttcgtgagagccgtggacggcggcatgcccaccctgagcagcgacgtgatcgtgaccgtggacgtgaccgacctgaacgacaacccccccctgttcgagcagcagatctacgaggccagaatcagcgagcacgccccccacggccacttcgtgacctgcgtgaaggcctacgacgccgacagcagcgacatcgacaagctgcagtacagcatcctgagcggcaacgaccacaagcacttcgtgatcgacagcgccaccggcatcatcaccctgagcaacctgcacagacacgccctgaagcccttctacagcctgaacctgagcgtgagcgacggcgtgttcagaagcagcacccaggtgcacgtgaccgtgatcggcggcaacctgcacagccccgccttcctgcagaacgagtacgaggtggagctggccgagaacgcccccctgcacaccctggtgatggaggtgaagaccaccgacggcgacagcggcatctacggccacgtgacctaccacatcgtgaacgacttcgccaaggacagattctacatcaacgagagaggccagatcttcaccctggagaagctggacagagagacccccgccgagaaggtgatcagcgtgagactgatggccaaggacgccggcggcaaggtggccttctgcaccgtgaacgtgatcctgaccgacgacaacgacaacgccccccagttcagagccaccaagtacgaggtgaacatcggcagcagcgccgccaagggcaccagcgtggtgaaggtgctggccagcgacgccgacgagggcagcaacgccgacatcacctacgccatcgaggccgacagcgagagcgtgaaggagaacctggagatcaacaagctgagcggcgtgatcaccaccaaggagagcctgatcggcctggagaacgagttcttcaccttcttcgtgagagccgtggacaacggcagccccagcaaggagagcgtggtgctggtgtacgtgaagatcctgccccccgagatgcagctgcccaagttcagcgagcccttctacaccttcaccgtgagcgaggacgtgcccatcggcaccgagatcgacctgatcagagccgagcacagcggcaccgtgctgtacagcctggtgaagggcaacacccccgagagcaacagagacgagagcttcgtgatcgacagacagagcggcagactgaagctggagaagagcctggaccacgagaccaccaagtggtaccagttcagcatcctggccagatgcacccaggacgaccacgagatggtggccagcgtggacgtgagcatccaggtgaaggacgccaacgacaacagccccgtgttcgagagcagcccctacgaggccttcatcgtggagaacctgcccggcggcagcagagtgatccagatcagagccagcgacgccgacagcggcaccaacggccaggtgatgtacagcctggaccagagccagagcgtggaggtgatcgagagcttcgccatcaacatggagaccggctggatcaccaccctgaaggagctggaccacgagaagagagacaactaccagatcaaggtggtggccagcgaccacggcgagaagatccagctgagcagcaccgccatcgtggacgtgaccgtgaccgacgtgaacgacagcccccccagattcaccgccgagatctacaagggcaccgtgagcgaggacgacccccagggcggcgtgatcgccatcctgagcaccaccgacgccgacagcgaggagatcaacagacaggtgacctacttcatcaccggcggcgaccccctgggccagttcgccgtggagaccatccagaacgagtggaaggtgtacgtgaagaagcccctggacagagagaagagagacaactacctgctgaccatcaccgccaccgacggcaccttcagcagcaaggccatcgtggaggtgaaggtgctggacgccaacgacaacagccccgtgtgcgagaagaccctgtacagcgacaccatccccgaggacgtgctgcccggcaagctgatcatgcagatcagcgccaccgacgccgacatcagaagcaacgccgagatcacctacaccctgctgggcagcggcgccgagaagttcaagctgaaccccgacaccggcgagctgaagaccagcacccccctggacagagaggagcaggccgtgtaccacctgctggtgagagccaccgacggcggcggcagattctgccaggccagcatcgtgctgaccctggaggacgtgaacgacaacgcccccgagttcagcgccgacccctacgccatcaccgtgttcgagaacaccgagcccggcaccctgctgaccagagtgcaggccaccgacgccgacgccggcctgaacagaaagatcctgtacagcctgatcgacagcgccgacggccagttcagcatcaacgagctgagcggcatcatccagctggagaagcccctggacagagagctgcaggccgtgtacaccctgagcctgaaggccgtggaccagggcctgcccagaagactgaccgccaccggcaccgtgatcgtgagcgtgctggacatcaacgacaacccccccgtgttcgagtacagagagtacggcgccaccgtgagcgaggacatcctggtgggcaccgaggtgctgcaggtgtacgccgccagcagagacatcgaggccaacgccgagatcacctacagcatcatcagcggcaacgagcacggcaagttcagcatcgacagcaagaccggcgccgtgttcatcatcgagaacctggactacgagagcagccacgagtactacctgaccgtggaggccaccgacggcggcacccccagcctgagcgacgtggccaccgtgaacgtgaacgtgaccgacatcaacgacaacacccccgtgttcagccaggacacctacaccaccgtgatcagcgaggacgccgtgctggagcagagcgtgatcaccgtgatggccgacgacgccgacggccccagcaacagccacatccactacagcatcatcgacggcaaccagggcagcagcttcaccatcgaccccgtgagaggcgaggtgaaggtgaccaagctgctggacagagagaccatcagcggctacaccctgaccgtgcaggccagcgacaacggcagcccccccagagtgaacaccaccaccgtgaacatcgacgtgagcgacgtgaacgacaacgcccccgtgttcagcagaggcaactacagcgtgatcatccaggagaacaagcccgtgggcttcagcgtgctgcagctggtggtgaccgacgaggacagcagccacaacggcccccccttcttcttcaccatcgtgaccggcaacgacgagaaggccttcgaggtgaacccccagggcgtgctgctgaccagcagcgccatcaagagaaaggagaaggaccactacctgctgcaggtgaaggtggccgacaacggcaagccccagctgagcagcctgacctacatcgacatcagagtgatcgaggagagcatctacccccccgccatcctgcccctggagatcttcatcaccagcagcggcgaggagtacagcggcggcgtgatcggcaagatccacgccaccgaccaggacgtgtacgacaccctgacctacagcctggacccccagatggacaacctgttcagcgtgagcagcaccggcggcaagctgatcgcccacaagaagctggacatcggccagtacctgctgaacgtgagcgtgaccgacggcaagttcaccaccgtggccgacatcaccgtgcacatcagacaggtgacccaggagatgctgaaccacaccatcgccatcagattcgccaacctgacccccgaggagttcgtgggcgactactggagaaacttccagagagccctgagaaacatcctgggcgtgagaagaaacgacatccagatcgtgagcctgcagagcagcgagccccacccccacctggacgtgctgctgttcgtggagaagcccggcagcgcccagatcagcaccaagcagctgctgcacaagatcaacagcagcgtgaccgacatcgaggagatcatcggcgtgagaatcctgaacgtgttccagaagctgtgcgccggcctggactgcccctggaagttctgcgacgagaaggtgagcgtggacgagagcgtgatgagcacccacagcaccgccagactgagcttcgtgacccccagacaccacagagccgccgtgtgcctgtgcaaggagggcagatgcccccccgtgcaccacggctgcgaggacgacccctgccccgagggcagcgagtgcgtgagcgacccctgggaggagaagcacacctgcgtgtgccccagcggcagattcggccagtgccccggcagcagcagcatgaccctgaccggcaacagctacgtgaagtacagactgaccgagaacgagaacaagctggagatgaagctgaccatgagactgagaacctacagcacccacgccgtggtgatgtacgccagaggcaccgactacagcatcctggagatccaccacggcagactgcagtacaagttcgactgcggcagcggccccggcatcgtgagcgtgcagagcatccaggtgaacgacggccagtggcacgccgtggccctggaggtgaacggcaactacgccagactggtgctggaccaggtgcacaccgccagcggcaccgcccccggcaccctgaagaccctgaacctggacaactacgtgttcttcggcggccacatcagacagcagggcaccagacacggcagaagcccccaggtgggcaacggcttcagaggctgcatggacagcatctacctgaacggccaggagctgcccctgaacagcaagcccagaagctacgcccacatcgaggagagcgtggacgtgagccccggctgcttcctgaccgccaccgaggactgcgccagcaacccctgccagaacggcggcgtgtgcaaccccagccccgccggcggctactactgcaagtgcagcgccctgtacatcggcacccactgcgagatcagcgtgaacccctgcagcagcaagccctgcctgtacggcggcacctgcgtggtggacaacggcggcttcgtgtgccagtgcagaggcctgtacaccggccagagatgccagctgagcccctactgcaaggacgagccctgcaagaacggcggcacctgcttcgacagcctggacggcgccgtgtgccagtgcgacagcggcttcagaggcgagagatgccagagcgacatcgacgagtgcagcggcaacccctgcctgcacggcgccctgtgcgagaacacccacggcagctaccactgcaactgcagccacgagtacagaggcagacactgcgaggacgccgcccccaaccagtacgtgagcaccccctggaacatcggcctggccgagggcatcggcatcgtggtgttcgtggccggcatcttcctgctggtggtggtgttcgtgctgtgcagaaagatgatcagcagaaagaagaagcaccaggccgagcccaaggacaagcacctgggccccgccaccgccttcctgcagagaccctacttcgacagcaagctgaacaagaacatctacagcgacatccccccccaggtgcccgtgagacccatcagctacacccccagcatccccagcgacagcagaaacaacctggacagaaacagcttcgagggcagcgccatccccgagcaccccgagttcagcaccttcaaccccgagagcgtgcacggccacagaaaggccgtggccgtgtgcagcgtggcccccaacctgcccccccccccccccagcaacagccccagcgacagcgacagcatccagaagcccagctgggacttcgactacgacaccaaggtggtggacctggacccctgcctgagcaagaagcccctggaggagaagcccagccagccctacagcgccagagagagcctgagcgaggtgcagagcctgagcagcttccagagcgagagctgcgacgacaacggctaccactgggacaccagcgactggatgcccagcgtgcccctgcccgacatccaggagttccccaactacgaggtgatcgacgagcagacccccctgtacagcgccgaccccaacgccatcgacaccgactactaccccggcggctacgacatcgagagcgacttcccccccccccccgaggacttccccgccgccgacgagctgccccccctgccccccgagttcagcaaccagttcgagagcatccacccccccagagacatgcccgccgccggcagcctgggcagcagcagcagaaacagacagagattcaacctgaaccagtacctgcccaacttctaccccctggacatgagcgagccccagaccaagggcaccggcgagaacagcacctgcagagagccccacgccccctacccccccggctaccagagacacttcgaggcccccgccgtggagagcatgcccatgagcgtgtacgccagcaccgccagctgcagcgacgtgagcgcctgctgcgaggtggagagcgaggtgatgatgagcgactacgagagcggcgacgacggccacttcgaggaggtgaccatcccccccctggacagccagcagcacaccgaggtgtag

SEQ ID NO: 287641 - DNA, 13767 bp, Artificial Sequence
  derived and/or modified sequence
atgggcagacacctggccctgctgctgctgctgctgctgctgttccagcacttcggcgacagcgacggcagccagagactggagcagacccccctgcagttcacccacctggagtacaacgtgaccgtgcaggagaacagcgccgccaagacctacgtgggccaccccgtgaagatgggcgtgtacatcacccaccccgcctgggaggtgagatacaagatcgtgagcggcgacagcgagaacctgttcaaggccgaggagtacatcctgggcgacttctgcttcctgagaatcagaaccaagggcggcaacaccgccatcctgaacagagaggtgaaggaccactacaccctgatcgtgaaggccctggagaagaacaccaacgtggaggccagaaccaaggtgagagtgcaggtgctggacaccaacgacctgagacccctgttcagccccaccagctacagcgtgagcctgcccgagaacaccgccatcagaaccagcatcgccagagtgagcgccaccgacgccgacatcggcaccaacggcgagttctactacagcttcaaggacagaaccgacatgttcgccatccaccccaccagcggcgtgatcgtgctgaccggcagactggactacctggagaccaagctgtacgagatggagatcctggccgccgacagaggcatgaagctgtacggcagcagcggcatcagcagcatggccaagctgaccgtgcacatcgagcaggccaacgagtgcgcccccgtgatcaccgccgtgaccctgagccccagcgagctggacagagaccccgcctacgccatcgtgaccgtggacgactgcgaccagggcgccaacggcgacatcgccagcctgagcatcgtggccggcgacctgctgcagcagttcagaaccgtgagaagcttccccggcagcaaggagtacaaggtgaaggccatcggcggcatcgactgggacagccaccccttcggctacaacctgaccctgcaggccaaggacaagggcacccccccccagttcagcagcgtgaaggtgatccacgtgaccagcccccagttcaaggccggccccgtgaagttcgagaaggacgtgtacagagccgagatcagcgagttcgccccccccaacacccccgtggtgatggtgaaggccatccccgcctacagccacctgagatacgtgttcaagagcacccccggcaaggccaagttcagcctgaactacaacaccggcctgatcagcatcctggagcccgtgaagagacagcaggccgcccacttcgagctggaggtgaccaccagcgacagaaaggccagcaccaaggtgctggtgaaggtgctgggcgccaacagcaacccccccgagttcacccagaccgcctacaaggccgccttcgacgagaacgtgcccatcggcaccaccgtgatgagcctgagcgccgtggaccccgacgagggcgagaacggctacgtgacctacagcatcgccaacctgaaccacgtgcccttcgccatcgaccacttcaccggcgccgtgagcaccagcgagaacctggactacgagctgatgcccagagtgtacaccctgagaatcagagccagcgactggggcctgccctacagaagagaggtggaggtgctggccaccatcaccctgaacaacctgaacgacaacacccccctgttcgagaagatcaactgcgagggcaccatccccagagacctgggcgtgggcgagcagatcaccaccgtgagcgccatcgacgccgacgagctgcagctggtgcagtaccagatcgaggccggcaacgagctggacttcttcagcctgaaccccaacagcggcgtgctgagcctgaagagaagcctgatggacggcctgggcgccaaggtgagcttccacagcctgagaatcaccgccaccgacggcgagaacttcgccacccccctgtacatcaacatcaccgtggccgccagccacaagctggtgaacctgcagtgcgaggagaccggcgtggccaagatgctggccgagaagctgctgcaggccaacaagctgcacaaccagggcgaggtggaggacatcttcttcgacagccacagcgtgaacgcccacatcccccagttcagaagcaccctgcccaccggcatccaggtgaaggagaaccagcccgtgggcagcagcgtgatcttcatgaacagcaccgacctggacaccggcttcaacggcaagctggtgtacgccgtgagcggcggcaacgaggacagctgcttcatgatcgacatggagaccggcatgctgaagatcctgagccccctggacagagagaccaccgacaagtacaccctgaacatcaccgtgtacgacctgggcatcccccagaaggccgcctggagactgctgcacgtggtggtggtggacgccaacgacaacccccccgagttcctgcaggagagctacttcgtggaggtgagcgaggacaaggaggtgcacagcgagatcatccaggtggaggccaccgacaaggacctgggccccaacggccacgtgacctacagcatcgtgaccgacaccgacaccttcagcatcgacagcgtgaccggcgtggtgaacatcgccagacccctggacagagagctgcagcacgagcacagcctgaagatcgaggccagagaccaggccagagaggagccccagctgttcagcaccgtggtggtgaaggtgagcctggaggacgtgaacgacaacccccccaccttcatcccccccaactacagagtgaaggtgagagaggacctgcccgagggcaccgtgatcatgtggctggaggcccacgaccccgacctgggccagagcggccaggtgagatacagcctgctggaccacggcgagggcaacttcgacgtggacaagctgagcggcgccgtgagaatcgtgcagcagctggacttcgagaagaagcaggtgtacaacctgaccgtgagagccaaggacaagggcaagcccgtgagcctgagcagcacctgctacgtggaggtggaggtggtggacgtgaacgagaacctgcacccccccgtgttcagcagcttcgtggagaagggcaccgtgaaggaggacgcccccgtgggcagcctggtgatgaccgtgagcgcccacgacgaggacgccagaagagacggcgagatcagatacagcatcagagacggcagcggcgtgggcgtgttcaagatcggcgaggagaccggcgtgatcgagaccagcgacagactggacagagagagcaccagccactactggctgaccgtgttcgccaccgaccagggcgtggtgcccctgagcagcttcatcgagatctacatcgaggtggaggacgtgaacgacaacgccccccagaccagcgagcccgtgtactaccccgagatcatggagaacagccccaaggacgtgagcgtggtgcagatcgaggccttcgaccccgacagcagcagcaacgacaagctgatgtacaagatcaccagcggcaacccccagggcttcttcagcatccaccccaagaccggcctgatcaccaccaccagcagaaagctggacagagagcagcaggacgagcacatcctggaggtgaccgtgaccgacaacggcagcccccccaagagcaccatcgccagagtgatcgtgaagatcctggacgagaacgacaacaagccccagttcctgcagaagttctacaagatcagactgcccgagagagagaagcccgacagagagagaaacgccagaagagagcccctgtaccacgtgatcgccaccgacaaggacgagggccccaacgccgagatcagctacagcatcgaggacggcaacgagcacggcaagttcttcatcgagcccaagaccggcgtggtgagcagcaagagattcagcgccgccggcgagtacgacatcctgagcatcaaggccgtggacaacggcagaccccagaagagcagcaccaccagactgcacatcgagtggatcagcaagcccaagcccagcctggagcccatcagcttcgaggagagcttcttcaccttcaccgtgatggagagcgaccccgtggcccacatgatcggcgtgatcagcgtggagccccccggcatccccctgtggttcgacatcaccggcggcaactacgacagccacttcgacgtggacaagggcaccggcaccatcatcgtggccaagcccctggacgccgagcagaagagcaactacaacctgaccgtggaggccaccgacggcaccaccaccatcctgacccaggtgttcatcaaggtgatcgacaccaacgaccacagaccccagttcagcaccagcaagtacgaggtggtgatccccgaggacaccgcccccgagaccgagatcctgcagatcagcgccgtggaccaggacgagaagaacaagctgatctacaccctgcagagcagcagagaccccctgagcctgaagaagttcagactggaccccgccaccggcagcctgtacaccagcgagaagctggaccacgaggccgtgcaccagcacaccctgaccgtgatggtgagagaccaggacgtgcccgtgaagagaaacttcgccagaatcgtggtgaacgtgagcgacaccaacgaccacgccccctggttcaccgccagcagctacaagggcagagtgtacgagagcgccgccgtgggcagcgtggtgctgcaggtgaccgccctggacaaggacaagggcaagaacgccgaggtgctgtacagcatcgagagcggcaacatcggcaacagcttcatgatcgaccccgtgctgggcagcatcaagaccgccaaggagctggacagaagcaaccaggccgagtacgacctgatggtgaaggccaccgacaagggcagcccccccatgagcgagatcaccagcgtgagaatcttcgtgaccatcgccgacaacgccagccccaagttcaccagcaaggagtacagcgtggagctgagcgagaccgtgagcatcggcagcttcgtgggcatggtgaccgcccacagccagagcagcgtggtgtacgagatcaaggacggcaacaccggcgacgccttcgacatcaacccccacagcggcaccatcatcacccagaaggccctggacttcgagaccctgcccatctacaccctgatcatccagggcaccaacatggccggcctgagcaccaacaccaccgtgctggtgcacctgcaggacgagaacgacaacgcccccgtgttcatgcaggccgagtacaccggcctgatcagcgagagcgccagcatcaacagcgtggtgctgaccgacagaaacgtgcccctggtgatcagagccgccgacgccgacaaggacagcaacgccctgctggtgtaccacatcgtggagcccagcgtgcacacctacttcgccatcgacagcagcaccggcgccatccacaccgtgctgagcctggactacgaggagaccagcatcttccacttcaccgtgcaggtgcacgacatgggcacccccagactgttcgccgagtacgccgccaacgtgaccgtgcacgtgatcgacatcaacgactgcccccccgtgttcgccaagcccctgtacgaggccagcctgctgctgcccacctacaagggcgtgaaggtgatcaccgtgaacgccaccgacgccgacagcagcgccttcagccagctgatctacagcatcaccgagggcaacatcggcgagaagttcagcatggactacaagaccggcgccctgaccgtgcagaacaccacccagctgagaagcagatacgagctgaccgtgagagccagcgacggcagattcgccggcctgaccagcgtgaagatcaacgtgaaggagagcaaggagagccacctgaagttcacccaggacgtgtacagcgccgtggtgaaggagaacagcaccgaggccgagaccctggccgtgatcaccgccatcggcaaccccatcaacgagcccctgttctaccacatcctgaaccccgacagaagattcaagatcagcagaaccagcggcgtgctgagcaccaccggcacccccttcgacagagagcagcaggaggccttcgacgtggtggtggaggtgaccgaggagcacaagcccagcgccgtggcccacgtggtggtgaaggtgatcgtggaggaccagaacgacaacgcccccgtgttcgtgaacctgccctactacgccgtggtgaaggtggacaccgaggtgggccacgtgatcagatacgtgaccgccgtggacagagacagcggcagaaacggcgaggtgcactactacctgaaggagcaccacgagcacttccagatcggccccctgggcgagatcagcctgaagaagcagttcgagctggacaccctgaacaaggagtacctggtgaccgtggtggccaaggacggcggcaaccccgccttcagcgccgaggtgatcgtgcccatcaccgtgatgaacaaggccatgcccgtgttcgagaagcccttctacagcgccgagatcgccgagagcatccaggtgcacagccccgtggtgcacgtgcaggccaacagccccgagggcctgaaggtgttctacagcatcaccgacggcgaccccttcagccagttcaccatcaacttcaacaccggcgtgatcaacgtgatcgcccccctggacttcgaggcccaccccgcctacaagctgagcatcagagccaccgacagcctgaccggcgcccacgccgaggtgttcgtggacatcatcgtggacgacatcaacgacaacccccccgtgttcgcccagcagagctacgccgtgaccctgagcgaggccagcgtgatcggcaccagcgtggtgcaggtgagagccaccgacagcgacagcgagcccaacagaggcatcagctaccagatgttcggcaaccacagcaagagccacgaccacttccacgtggacagcagcaccggcctgatcagcctgctgagaaccctggactacgagcagagcagacagcacaccatcttcgtgagagccgtggacggcggcatgcccaccctgagcagcgacgtgatcgtgaccgtggacgtgaccgacctgaacgacaacccccccctgttcgagcagcagatctacgaggccagaatcagcgagcacgccccccacggccacttcgtgacctgcgtgaaggcctacgacgccgacagcagcgacatcgacaagctgcagtacagcatcctgagcggcaacgaccacaagcacttcgtgatcgacagcgccaccggcatcatcaccctgagcaacctgcacagacacgccctgaagcccttctacagcctgaacctgagcgtgagcgacggcgtgttcagaagcagcacccaggtgcacgtgaccgtgatcggcggcaacctgcacagccccgccttcctgcagaacgagtacgaggtggagctggccgagaacgcccccctgcacaccctggtgatggaggtgaagaccaccgacggcgacagcggcatctacggccacgtgacctaccacatcgtgaacgacttcgccaaggacagattctacatcaacgagagaggccagatcttcaccctggagaagctggacagagagacccccgccgagaaggtgatcagcgtgagactgatggccaaggacgccggcggcaaggtggccttctgcaccgtgaacgtgatcctgaccgacgacaacgacaacgccccccagttcagagccaccaagtacgaggtgaacatcggcagcagcgccgccaagggcaccagcgtggtgaaggtgctggccagcgacgccgacgagggcagcaacgccgacatcacctacgccatcgaggccgacagcgagagcgtgaaggagaacctggagatcaacaagctgagcggcgtgatcaccaccaaggagagcctgatcggcctggagaacgagttcttcaccttcttcgtgagagccgtggacaacggcagccccagcaaggagagcgtggtgctggtgtacgtgaagatcctgccccccgagatgcagctgcccaagttcagcgagcccttctacaccttcaccgtgagcgaggacgtgcccatcggcaccgagatcgacctgatcagagccgagcacagcggcaccgtgctgtacagcctggtgaagggcaacacccccgagagcaacagagacgagagcttcgtgatcgacagacagagcggcagactgaagctggagaagagcctggaccacgagaccaccaagtggtaccagttcagcatcctggccagatgcacccaggacgaccacgagatggtggccagcgtggacgtgagcatccaggtgaaggacgccaacgacaacagccccgtgttcgagagcagcccctacgaggccttcatcgtggagaacctgcccggcggcagcagagtgatccagatcagagccagcgacgccgacagcggcaccaacggccaggtgatgtacagcctggaccagagccagagcgtggaggtgatcgagagcttcgccatcaacatggagaccggctggatcaccaccctgaaggagctggaccacgagaagagagacaactaccagatcaaggtggtggccagcgaccacggcgagaagatccagctgagcagcaccgccatcgtggacgtgaccgtgaccgacgtgaacgacagcccccccagattcaccgccgagatctacaagggcaccgtgagcgaggacgacccccagggcggcgtgatcgccatcctgagcaccaccgacgccgacagcgaggagatcaacagacaggtgacctacttcatcaccggcggcgaccccctgggccagttcgccgtggagaccatccagaacgagtggaaggtgtacgtgaagaagcccctggacagagagaagagagacaactacctgctgaccatcaccgccaccgacggcaccttcagcagcaaggccatcgtggaggtgaaggtgctggacgccaacgacaacagccccgtgtgcgagaagaccctgtacagcgacaccatccccgaggacgtgctgcccggcaagctgatcatgcagatcagcgccaccgacgccgacatcagaagcaacgccgagatcacctacaccctgctgggcagcggcgccgagaagttcaagctgaaccccgacaccggcgagctgaagaccagcacccccctggacagagaggagcaggccgtgtaccacctgctggtgagagccaccgacggcggcggcagattctgccaggccagcatcgtgctgaccctggaggacgtgaacgacaacgcccccgagttcagcgccgacccctacgccatcaccgtgttcgagaacaccgagcccggcaccctgctgaccagagtgcaggccaccgacgccgacgccggcctgaacagaaagatcctgtacagcctgatcgacagcgccgacggccagttcagcatcaacgagctgagcggcatcatccagctggagaagcccctggacagagagctgcaggccgtgtacaccctgagcctgaaggccgtggaccagggcctgcccagaagactgaccgccaccggcaccgtgatcgtgagcgtgctggacatcaacgacaacccccccgtgttcgagtacagagagtacggcgccaccgtgagcgaggacatcctggtgggcaccgaggtgctgcaggtgtacgccgccagcagagacatcgaggccaacgccgagatcacctacagcatcatcagcggcaacgagcacggcaagttcagcatcgacagcaagaccggcgccgtgttcatcatcgagaacctggactacgagagcagccacgagtactacctgaccgtggaggccaccgacggcggcacccccagcctgagcgacgtggccaccgtgaacgtgaacgtgaccgacatcaacgacaacacccccgtgttcagccaggacacctacaccaccgtgatcagcgaggacgccgtgctggagcagagcgtgatcaccgtgatggccgacgacgccgacggccccagcaacagccacatccactacagcatcatcgacggcaaccagggcagcagcttcaccatcgaccccgtgagaggcgaggtgaaggtgaccaagctgctggacagagagaccatcagcggctacaccctgaccgtgcaggccagcgacaacggcagcccccccagagtgaacaccaccaccgtgaacatcgacgtgagcgacgtgaacgacaacgcccccgtgttcagcagaggcaactacagcgtgatcatccaggagaacaagcccgtgggcttcagcgtgctgcagctggtggtgaccgacgaggacagcagccacaacggcccccccttcttcttcaccatcgtgaccggcaacgacgagaaggccttcgaggtgaacccccagggcgtgctgctgaccagcagcgccatcaagagaaaggagaaggaccactacctgctgcaggtgaaggtggccgacaacggcaagccccagctgagcagcctgacctacatcgacatcagagtgatcgaggagagcatctacccccccgccatcctgcccctggagatcttcatcaccagcagcggcgaggagtacagcggcggcgtgatcggcaagatccacgccaccgaccaggacgtgtacgacaccctgacctacagcctggacccccagatggacaacctgttcagcgtgagcagcaccggcggcaagctgatcgcccacaagaagctggacatcggccagtacctgctgaacgtgagcgtgaccgacggcaagttcaccaccgtggccgacatcaccgtgcacatcagacaggtgacccaggagatgctgaaccacaccatcgccatcagattcgccaacctgacccccgaggagttcgtgggcgactactggagaaacttccagagagccctgagaaacatcctgggcgtgagaagaaacgacatccagatcgtgagcctgcagagcagcgagccccacccccacctggacgtgctgctgttcgtggagaagcccggcagcgcccagatcagcaccaagcagctgctgcacaagatcaacagcagcgtgaccgacatcgaggagatcatcggcgtgagaatcctgaacgtgttccagaagctgtgcgccggcctggactgcccctggaagttctgcgacgagaaggtgagcgtggacgagagcgtgatgagcacccacagcaccgccagactgagcttcgtgacccccagacaccacagagccgccgtgtgcctgtgcaaggagggcagatgcccccccgtgcaccacggctgcgaggacgacccctgccccgagggcagcgagtgcgtgagcgacccctgggaggagaagcacacctgcgtgtgccccagcggcagattcggccagtgccccggcagcagcagcatgaccctgaccggcaacagctacgtgaagtacagactgaccgagaacgagaacaagctggagatgaagctgaccatgagactgagaacctacagcacccacgccgtggtgatgtacgccagaggcaccgactacagcatcctggagatccaccacggcagactgcagtacaagttcgactgcggcagcggccccggcatcgtgagcgtgcagagcatccaggtgaacgacggccagtggcacgccgtggccctggaggtgaacggcaactacgccagactggtgctggaccaggtgcacaccgccagcggcaccgcccccggcaccctgaagaccctgaacctggacaactacgtgttcttcggcggccacatcagacagcagggcaccagacacggcagaagcccccaggtgggcaacggcttcagaggctgcatggacagcatctacctgaacggccaggagctgcccctgaacagcaagcccagaagctacgcccacatcgaggagagcgtggacgtgagccccggctgcttcctgaccgccaccgaggactgcgccagcaacccctgccagaacggcggcgtgtgcaaccccagccccgccggcggctactactgcaagtgcagcgccctgtacatcggcacccactgcgagatcagcgtgaacccctgcagcagcaagccctgcctgtacggcggcacctgcgtggtggacaacggcggcttcgtgtgccagtgcagaggcctgtacaccggccagagatgccagctgagcccctactgcaaggacgagccctgcaagaacggcggcacctgcttcgacagcctggacggcgccgtgtgccagtgcgacagcggcttcagaggcgagagatgccagagcgacatcgacgagtgcagcggcaacccctgcctgcacggcgccctgtgcgagaacacccacggcagctaccactgcaactgcagccacgagtacagaggcagacactgcgaggacgccgcccccaaccagtacgtgagcaccccctggaacatcggcctggccgagggcatcggcatcgtggtgttcgtggccggcatcttcctgctggtggtggtgttcgtgctgtgcagaaagatgatcagcagaaagaagaagcaccaggccgagcccaaggacaagcacctgggccccgccaccgccttcctgcagagaccctacttcgacagcaagctgaacaagaacatctacagcgacatccccccccaggtgcccgtgagacccatcagctacacccccagcatccccagcgacagcagaaacaacctggacagaaacagcttcgagggcagcgccatccccgagcaccccgagttcagcaccttcaaccccgagagcgtgcacggccacagaaaggccgtggccgtgtgcagcgtggcccccaacctgcccccccccccccccagcaacagccccagcgacagcgacagcatccagaagcccagctgggacttcgactacgacaccaaggtggtggacctggacccctgcctgagcaagaagcccctggaggagaagcccagccagccctacagcgccagagagagcctgagcgaggtgcagagcctgagcagcttccagagcgagagctgcgacgacaacggctaccactgggacaccagcgactggatgcccagcgtgcccctgcccgacatccaggagttccccaactacgaggtgatcgacgagcagacccccctgtacagcgccgaccccaacgccatcgacaccgactactaccccggcggctacgacatcgagagcgacttcccccccccccccgaggacttccccgccgccgacgagctgccccccctgccccccgagttcagcaaccagttcgagagcatccacccccccagagacatgcccgccgccggcagcctgggcagcagcagcagaaacagacagagattcaacctgaaccagtacctgcccaacttctaccccctggacatgagcgagccccagaccaagggcaccggcgagaacagcacctgcagagagccccacgccccctacccccccggctaccagagacacttcgaggcccccgccgtggagagcatgcccatgagcgtgtacgccagcaccgccagctgcagcgacgtgagcgcctgctgcgaggtggagagcgaggtgatgatgagcgactacgagagcggcgacgacggccacttcgaggaggtgaccatcccccccctggacagccagcagcacaccgaggtgtag

SEQ ID NO: 287642 - DNA, 1467 bp, Artificial Sequence
  derived and/or modified sequence
atgggcagacacctggccctgctgctgctgctgctgctgctgttccagcacttcggcgacagcgacggcagccagagactggagcagacccccctgcagttcacccacctggagtacaacgtgaccgtgcaggagaacagcgccgccaagacctacgtgggccaccccgtgaagatgggcgtgtacatcacccaccccgcctgggaggtgagatacaagatcgtgagcggcgacagcgagaacctgttcaaggccgaggagtacatcctgggcgacttctgcttcctgagaatcagaaccaagggcggcaacaccgccatcctgaacagagaggtgaaggaccactacaccctgatcgtgaaggccctggagaagaacaccaacgtggaggccagaaccaaggtgagagtgcaggtgctggacaccaacgacctgagacccctgttcagccccaccagctacagcgtgagcctgcccgagaacaccgccatcagaaccagcatcgccagagtgagcgccaccgacgccgacatcggcaccaacggcgagttctactacagcttcaaggacagaaccgacatgttcgccatccaccccaccagcggcgtgatcgtgctgaccggcagactggactacctggagaccaagctgtacgagatggagatcctggccgccgacagaggcatgaagctgtacggcagcagcggcatcagcagcatggccaagctgaccgtgcacatcgagcaggccaacgagtgcgcccccgtgatcaccgccgtgaccctgagccccagcgagctggacagagaccccgcctacgccatcgtgaccgtggacgactgcgaccagggcgccaacggcgacatcgccagcctgagcatcgtggccggcgacctgctgcagcagttcagaaccgtgagaagcttccccggcagcaaggagtacaaggtgaaggccatcggcggcatcgactgggacagccaccccttcggctacaacctgaccctgcaggccaaggacaagggcacccccccccagttcagcagcgtgaaggtgatccacgtgaccagcccccagttcaaggccggccccgtgaagttcgagaaggacgtgtacagagccgagatcagcgagttcgccccccccaacacccccgtggtgatggtgaaggccatccccgcctacagccacctgagatacgtgttcaagagcacccccggcaaggccaagttcagcctgaactacaacaccggcctgatcagcatcctggagcccgtgaagagacagcaggccgcccacttcgagctggaggtgaccaccagcgacagaaaggccagcaccaaggtgctggtgaaggtgctgggcgccaacagcaacccccccgagttcacccagaccgcctacaaggccgccttcgacgagaacgtgcccatcggcaccaccgtgatgagcctgagcgccgtgtag

SEQ ID NO: 287643 - DNA, 13773 bp, Artificial Sequence
  derived and/or modified sequence
atgggcaggcacctcgctctgttacttctgctgctgttactttttcagcacttcggagactcagacggctctcaacggctagaacagacccctcttcagttcacacatctggagtataacgtcaccgtgcaggaaaacagtgccgccaaaacctacgtgggccacccagtcaagatgggagtttacattactcatccagcttgggaagtgcgatataagatcgtgtccggggactccgagaacctcttcaaggctgaggagtacattctgggcgacttttgcttcctcaggatcaggactaaagggggcaacacagcaatcctgaacagggaggtgaaggaccactataccttgattgtgaaggctttagaaaagaacacaaacgtggaagcccgaactaaggtccgagttcaggtgctcgataccaatgatttacggccactgttcagcccgacaagctattctgtgagtctcccagaaaacaccgccataaggacctccatcgcacgagtgtccgctacggatgccgacattggcacaaatggcgagttctattactcgtttaaagaccgcactgacatgttcgcaatccacccaacaagcggcgtgattgttctgaccgggaggctcgactacctcgagaccaaactttacgaaatggaaatccttgctgcagatcgcggtatgaagctctacgggagctctgggatttctagcatggctaaactgaccgtgcatatagagcaagcaaacgagtgcgctcctgtgatcacagctgtcactctgtcaccatcagaactggatcgcgacccagcgtacgccattgtgacagtcgacgattgcgaccaaggtgccaatggagatatagcatccttatcgatcgtggccggcgacctgctgcagcagttccgaacagtgagatcatttcccggttcaaaggaatacaaagtgaaagccataggcggcatcgactgggactcgcacccctttgggtacaacttgacacttcaagctaaggacaagggaactccgcctcagttctcctccgtaaaagtcatccacgtgacatccccccaattcaaagctggaccagtaaaattcgagaaggacgtttatcgcgccgagattagcgagtttgctcctccaaatactcccgtcgtgatggttaaggccatcccagcctattcccatctacggtacgtgtttaagtcgacccccggtaaggcaaagttctctctgaactacaataccggattaatctctatacttgagccagtgaagagacagcaggcagctcactttgagcttgaggtgaccaccagcgaccgaaaggcaagcaccaaagtgctggtgaaagtccttggcgccaatagcaacccccccgagtttacacagacagcatataaagccgcgttcgacgagaatgtgcccatcggtaccaccgtgatgtcactgtctgcggtggaccctgatgaaggtgagaacgggtacgtgacctacagcatcgccaatctgaaccatgttccatttgccattgatcattttacaggcgcagtttctacaagcgaaaacctcgattatgagttgatgcccagagtctataccctgcgtatccgtgcttctgattggggcctgccctatcggcgagaggttgaagtgctagcaaccataacattgaacaatctcaacgataatacaccactcttcgaaaaaattaactgcgaaggcacaatacctcgcgacctgggagttggcgaacaaatcaccacagtgagcgcaattgacgcagatgaactgcagctggtgcaataccagattgaagccgggaacgaacttgatttctttagtcttaatcctaatagtggcgtcttgtccttgaagaggtccctgatggatggcctcggagccaaagtgtcctttcatagtctcaggatcactgctaccgatggcgagaatttcgctacaccgctatatattaacatcaccgttgccgcttcccacaagctggtgaatcttcagtgcgaagaaaccggggtggccaagatgttagcggaaaaactactgcaagctaataaactccataaccagggcgaagtggaagatatctttttcgatagccactccgtgaatgcacacattccacagtttaggagtaccctgcccactggaatccaagtcaaggagaatcagcccgtgggttccagtgtgattttcatgaattcgaccgacttggacacagggttcaacggaaaactcgtgtatgccgtttccgggggcaacgaagacagttgctttatgattgacatggagactggcatgcttaagatcctgagtcctcttgacagggagactactgacaagtacactctaaatatcacagtgtatgacctgggcattccacagaaggccgcctggcgccttctacacgtggtagtggttgatgctaacgacaatcctcccgaatttctgcaagagtcttactttgtcgaagtgtccgaagacaaggaggtgcattccgagattatccaggttgaagctacagacaaagatctgggccccaatggtcatgtcacatattcgatcgtcactgacacagatacattcagcatcgattccgtgaccggcgtagtgaatattgccaggcccttggacagagaacttcaacacgagcatagtctgaagatcgaggcccgcgatcaggcgcgagaggaacctcagttgttttcaactgtggtggttaaagtatcccttgaggacgtgaatgataatcctcctacctttatccctcccaactatagagtaaaggttagagaagaccttcctgagggcacagtaattatgtggttagaggcccacgatcctgacctgggccagagcgggcaggttaggtactctctgctcgatcatggggaggggaattttgatgttgacaagctcagtggcgccgtccgcatcgtccagcaactcgacttcgaaaaaaaacaggtatataatctcactgtcagagccaaagataaaggcaagcccgtctccctgtccagcacatgttatgtggaagtggaggtagtagatgtcaacgagaacttacacccccccgtgttctcgtcctttgtcgagaaaggtactgtcaaagaggatgccccagtggggtccctggtgatgactgtctctgcccacgatgaggatgcgagacgcgatggggaaatccggtattctatccgggatggctccggggttggcgtctttaagattggggaagagaccggagtcatcgaaacatcagatcgccttgaccgagagagtacctctcactattggttgaccgtgttcgcaacggaccagggggtggtgcccctgtcaagtttcattgaaatttatatagaggtcgaagatgttaacgacaatgcaccccagaccagtgaaccggtgtactatcctgagattatggagaactcacctaaagatgtcagcgttgtgcaaatcgaggccttcgaccccgactcatcgagcaacgacaaactgatgtataagatcacttccggtaaccctcaggggttcttttccatccatcccaagacgggcctgatcactacaacctccagaaagcttgacagagaacaacaggatgagcacatcctcgaggtaactgtgacagataacggatcacctcccaaaagtaccatcgcccgcgtgatcgtgaagattcttgatgagaacgacaacaaaccacaattccttcagaagttttacaagatccgtctgcctgaaagggaaaagcccgatcgggaaagaaatgcccggcgcgagccactttaccacgttattgcaacagataaggacgaggggcctaatgcagagatcagctatagcatagaggacggaaatgaacatgggaagtttttcattgaaccaaaaactggtgtcgtgagcagcaaaaggttcagcgctgccggggaatatgatatcctcagtattaaggccgttgataacgggaggccgcaaaagtcttcaaccacaaggctgcatatagagtggatttccaaacccaaaccatctcttgagcctatctcttttgaagagtcatttttcacatttacggttatggagagtgaccctgtggcccacatgatcggcgtgatctccgtagagcccccgggcattcctttatggttcgatatcaccggaggaaactatgactcgcacttcgacgtagacaaaggaaccggtaccataatcgttgccaaaccactggatgcagagcagaagagcaattacaaccttacggtagaggctactgacggaaccaccacgattttgacccaagtttttatcaaagtgatcgatacgaacgaccataggccccagtttagtacctccaagtacgaagtggtgattcctgaggacacagcccccgagacggaaattttacaaatttccgcggtcgatcaagacgagaagaacaaactcatatacacactgcaatcctctagagatcccctgagtctgaagaagttccggctggacccagcaacaggatccttatatacctccgagaagcttgaccacgaggcagtcccagcccatctcacagtgatggtgagagatcaggacgtccctgtcaagaggaactttgctagaattgtagtgaacgtgagcgacacaaatgaccacgcaccctggttcactgcaagttcctacaagggcagggtttacgagtccgccgccgtaggatctgtggttctgcaggttacagcactggacaaggacaaggggaaaaatgccgaggtgttgtattccattgaaagtggaaccttcgggaacatcggcaacagctttatgattgatccggtactcgggtcgatcaaaactgccaaggagttagatagatctaatcaggccgaatacgacctcatggtaaaagccaccgataagggcagcccacccatgagtgaaattacgagcgtaaggatctttgttaccatagcagataacgcatcacccaagttcacctccaaagagtactcggttgagctgtctgagactgtgtccattgggtcctttgtgggcatggtcacagcccactctcagtctagcgtcgtctatgaaattaaggacggaaacacgggtgatgctttcgatatcaatccacatagcggaactatcatcacacagaaggctctggacttcgagacgctgccaatctacactcttatcatacagggcaccaacatggccggtctttctaccaacactaccgtgctcgtacatctgcaagatgaaaatgataacgcccccgtattcatgcaggctgaatatacgggactgatcagcgagagtgccagcattaattcagtggttttgactgatagaaacgtaccacttgtaataagggccgctgacgccgataaggattccaacgccttgctggtctatcacattgttgagccttccgtgcacacttactttgctatcgactctagtactggggccatccacaccgtgctgtcgttggactatgaagagactagcatcttccattttacagttcaggtacatgatatgggtacccccaggctgttcgcggaatatgccgcgaacgtcacagtacacgtaatcgatatcaacgactgtccaccagtgttcgctaaaccactgtatgaagcgagtcttttgctgcctacttacaagggcgtaaaagtcataaccgtgaacgccaccgacgccgatagtagcgcattttctcagctgatctattctattactgaggggaacattggtgaaaaattcagtatggactacaagacaggggctctcactgttcagaacaccacacagttgaggtcccggtacgagctgacagtccgcgctagcgatgggcgcttcgctggcctcacttcggttaagattaatgttaaggagtctaaggagagccacttgaagttcacccaggacgtgtattcagccgtcgtaaaggaaaattctaccgaggcagaaactttggccgtaattacggctattggcaaccccatcaatgaaccactcttctatcacatcttgaacccagaccgaagatttaagatctcaaggaccagcggagttctttctaccactggaacacctttcgatcgcgaacagcaggaggccttcgacgttgtggtggaggtgacggaggagcacaagccttcagctgtagctcacgtggtggtgaaggtaattgtagaggatcaaaacgacaatgctcctgtgtttgtcaatctgccgtactatgctgtggtgaaggtggacacggaggtcggacatgtgatccgatacgtaactgccgtggatagggatagcggcaggaatggagaggtgcattattacttaaaggagcaccatgagcatttccaaatcggtcctctcggcgagatttctctgaagaagcagttcgagctggacacactcaacaaggagtatttggtgactgtggtggcaaaggacggcggcaacccagctttttcagctgaggtaattgtgccgatcacagtcatgaataaagcaatgcccgttttcgagaagcccttctacagtgccgaaatcgcagaaagcatccaggttcacagtccagtggtgcatgtccaggcaaactccccagaagggctgaaagtcttctatagtatcaccgacggggaccccttttctcagtttacgatcaacttcaataccggagttatcaatgtcattgctccgctggatttcgaggcccatcctgcttataagctgagtatcagggcaaccgattcacttactggcgcccatgccgaagtcttcgtagatattattgtggacgacataaatgataaccccccggtttttgcacaacagtcatatgccgtcaccttgagcgaagcatccgtgattggcaccagcgtcgttcaggtgcgcgcaacagactctgatagtgagccaaatagagggatcagctaccagatgttcgggaatcattccaagtcccacgaccattttcatgtggactcaagtacaggtttaatctcccttctgcgcacactagactacgagcagtcccggcagcatacaatcttcgttagggccgtagacggcgggatgccaactttaagttctgatgtcattgtgaccgttgatgtgactgatttgaatgataacccccctctcttcgaacaacaaatctatgaggcaagaatctcagaacatgctcctcacgggcatttcgtgacatgcgttaaggcctacgatgctgattcttccgacatcgataaactgcagtattctatcctgtcgggaaacgaccacaagcactttgtcatcgatagtgccaccggtattatcactttgtctaatttgcatagacatgctctgaagcccttttactccctcaacctgtccgtgagcgatggggtttttagaagtagcacacaggtccacgttactgtcatcggtggtaatctgcacagccccgcctttctgcaaaacgaatacgaagtagaattggccgagaatgcaccactgcacacgttggtgatggaagtgaagacaacagatggagacagcggcatttatggtcatgtgacctatcacatcgtaaatgatttcgcgaaagatagattttacatcaatgaacgcggtcaaatcttcaccctcgagaaattggatagggagactccagcagagaaggtgatctccgtgagactgatggcaaaggacgccggcggaaaggtagctttttgtactgtgaatgtgatcctaaccgatgataacgacaacgccccccagttccgtgctaccaagtacgaagtcaacattggctcttccgctgctaaaggcaccagtgtcgtgaaggtgctggcctccgacgccgacgagggtagtaacgctgatataacatatgcaatcgaagcagactcagagagcgtcaaagaaaacctcgagattaacaagctgtccggggtgatcactactaaagagagcttgattggcctggaaaatgagttttttacattttttgttcgagccgttgacaacggctcaccgagcaaggaaagcgtcgtacttgtatatgtgaagatcttgcctcccgaaatgcagctacctaagttctcagagcccttctacacttttacggtgagtgaggacgtgccgattggcaccgaaattgatctcattagagcagaacacagtggcaccgtcctgtattcccttgttaagggaaatacacccgagtccaaccgagacgaaagttttgttatagaccgtcagtccggacgacttaagctggagaagtcactggatcacgaaaccacaaagtggtaccagttctccattctggctcggtgtacccaggatgatcacgagatggtagcctctgtagacgtgagcattcaggtgaaagatgccaacgataactcacccgtcttcgagagctctccctacgaagcttttatcgtcgagaaccttccgggcggttctcgcgtaattcagatccgcgcctcggatgccgactcaggaactaacggccaggttatgtactctctggaccaaagtcagtccgttgaagtgatcgagtcttttgccatcaatatggagacggggtggatcacgaccctcaaagaacttgatcatgaaaaacgagacaattatcagatcaaagtagtggcatccgaccacggcgagaagatccagctatccagcacagccatcgtggacgtcaccgtcaccgacgtgaacgacagcccaccacgctttaccgcagagatctacaaaggcaccgtatcagaggacgatccccagggcggcgtgattgctatcctctctaccacagacgctgatagcgaagagattaatcgccaggtaacttatttcatcacagggggcgatcctttgggccaattcgctgttgagaccatccagaatgagtggaaggtttacgtgaaaaaaccactggaccgagaaaaacgggacaactatctccttactataacggccacagacggtacattctccagtaaagccatcgtagaggttaaagtgctggatgctaacgacaactctccagtctgcgagaagacgctttactccgatacgatcccagaagacgtgctgcctggcaagctgattatgcaaattagtgccactgatgctgacattaggagcaatgcggagatcacctacaccctgctcgggagtggggctgaaaaatttaaactgaatcctgacactggggaattaaagacttccacccccttggaccgagaagaacaggctgtgtaccacttgcttgtgcgtgccacggatggcggtggtagattttgccaggctagcattgtgttgactctggaggacgtcaatgataatgcaccagaattctcagccgacccgtacgccatcactgtatttgaaaacaccgagccgggaacacttctgactagggtgcaagccaccgatgcagatgccggcttgaacagaaaaatcctctattcactgatcgactcagctgatggtcagttctctatcaatgagttaagcggcatcatccagttggagaagccactggacagagagttacaagccgtgtatactttaagcctgaaggctgttgaccagggattgcctcgtaggctaactgccaccggcactgtcatcgtcagtgtgctagacataaacgacaatccccctgtttttgagtacagagagtatggcgccaccgtgtcagaggatatcctcgtgggcacagaggtccttcaggtctatgccgcttctagggacattgaggcaaacgccgagatcacatactctatcattagtggaaatgagcacggaaaattcagcattgacagtaagaccggggccgtgttcattatagagaatttagactacgaatcttcgcacgagtactatctgacggtggaggcgacagacggaggcactcccagtctctctgatgtcgcaacggttaacgtcaacgtaacagacattaatgacaacacccccgtgttcagtcaggatacgtataccactgtgatcagcgaggatgccgtactggaacagagcgtgattactgtgatggcagacgacgccgatggcccttcgaattcacatatccactactccatcatagacggaaaccaggggtcgtccttcaccatcgacccggtccgcggcgaagtgaaggtgacaaaacttctggatcgcgagaccatatccggctatacgttgaccgtgcaggcatctgataatgggtcacctcctagggtgaacactacgactgtgaacattgatgtaagtgatgtgaatgataacgcacctgtttttagccgcggcaattatagcgttatcatacaggagaataagcctgtgggattcagcgtgctccagcttgtcgtgacggatgaagattccagtcacaatggacccccattcttttttacaattgtcactggtaatgacgaaaaagcctttgaggtgaacccccagggggtcctgctgacgtcttccgctatcaagcgaaaggaaaaggatcactacctgttacaggtgaaggtggcagacaatggaaaaccacagctgtcatccctgacctatatcgacatcagggtgattgaggaatctatctacccacccgccattctaccgctcgaaatcttcatcacgtcttcaggggaggaatactctgggggagtgatcgggaaaatccacgcaacagatcaagatgtctatgacaccctgacatactccctggatccacagatggataacctcttttcggtttcctccactggcgggaaactgatcgcccataagaagttggacatcggccagtacttattgaatgtcagcgtgacagacgggaagttcacaacagtggccgacattaccgttcatatcaggcaggtgacacaggagatgctgaatcacacgatcgccattagattcgccaacttgacaccagaggaattcgtcggcgactattggcgcaacttccagcgggcgctgagaaacatcctgggcgttcgaagaaacgacatccaaattgtgagtctccaatctagcgaaccgcatccccacctcgatgtcctcttattcgtagagaagccgggatcagcgcagattagcactaagcaactactccacaaaatcaacagcagtgtcactgacatcgaagaaatcatcggggttcggattctgaatgtcttccaaaagctctgtgccggcctcgactgtccctggaagttctgtgatgaaaaggtgagcgtagacgaatcagttatgtctactcattccacagccagactcagctttgtgactccacgtcatcaccgggcagcagtgtgcctctgcaaagagggcaggtgtccccccgttcaccacgggtgtgaggatgacccttgccccgagggtagtgagtgtgtgtccgacccttgggaagaaaaacacacatgcgtctgccccagcgggaggtttggccaatgccccggatcttcttccatgacactgactgggaactcgtacgtgaaatataggctgacagagaatgagaacaaacttgagatgaaattgacaatgagactgcggacgtactcgacacacgcagtggtcatgtacgcacgcgggacagattattctatcctggagatccaccacggcaggctgcagtacaagttcgattgtggctctggtccggggatcgtgagcgtgcagagtatacaagttaacgacggacagtggcacgcagtggcactggaagtaaacggtaactatgctcggctggtgctcgaccaggtccacacagcttcagggactgctccaggaactcttaagaccctaaacctggataattatgtttttttcgggggccacatcagacagcagggcacaaggcacggaagatccccccaggttggcaatggcttcagaggctgtatggatagcatctacctgaacggacaggaattgccccttaattccaaacctcgaagctatgcccatattgaggaatctgtggatgtttctccgggatgttttctcacagccacggaggattgtgccagcaacccatgtcaaaatgggggtgtctgcaacccttctcctgcaggcggttattattgcaaatgttccgcactgtatattggaactcattgcgagatcagcgtgaacccctgctccagtaagccatgcctgtatggcggaacttgtgtggtggacaacggcggtttcgtttgtcagtgtcgcggtctgtatactggccagcggtgccagctctctccttactgtaaggacgagccatgcaaaaacggcggtacttgctttgactcactggatggggctgtatgccaatgcgattctggcttccggggcgaaaggtgtcaatcagatatcgacgagtgttctgggaatccttgtctgcacggggccctttgtgagaatacacatgggtcctaccattgcaattgttcccatgagtatagagggcggcattgcgaagacgccgcgcctaaccaatacgtaagcactccttggaatattggcctggcagaggggattggcatcgtggtgttcgtcgctggcatttttcttttggtcgtcgtgttcgtactgtgccgcaaaatgatcagtcgcaaaaaaaagcaccaggccgaacccaaggacaagcatctcggtcccgccaccgccttcctgcaaaggccatacttcgacagcaaattaaataagaacatctacagcgacatcccaccacaggtccctgtgcggcccatctcttacacacctagcataccaagtgattcccggaataacctcgacaggaacagcttcgaagggagcgctattccagaacaccccgagtttagcacatttaacccagagtctgtgcatgggcatcggaaagcggttgccgtgtgctcagtcgcccccaatctacctccgcccccgccaagcaactcgccctctgattctgactccatccagaaaccatcttgggacttcgactatgataccaaggtggttgacctggatccttgtctgtccaaaaaaccactggaagagaagccatcgcagccatattccgcacgggagtccctctctgaggttcaatctcttagttcattccagagcgagagctgtgacgacaatggataccactgggacacatcagactggatgccttccgtccccctgccagacattcaggaattcccgaactatgaggtgatagacgaacagactccactctattccgctgatccaaacgccattgatacagattattatccaggtggctacgatattgagtctgacttcccccccccccccgaagacttccctgcggccgacgagttacctccgctacccccagagttctcaaatcagttcgagtcgattcatccgcctagggacatgccagctgcgggttcactgggaagtagcagccgaaatagacagcgcttcaaccttaatcaatacctcccgaacttctaccccctggacatgagcgaaccgcagacaaagggcaccggagagaattctacttgccgggaaccccatgcaccctatccgcccgggtatcagcgccattttgaggctcctgcagtggaaagtatgcccatgtctgtctacgcttctacggcgagctgctccgatgtatctgcttgctgcgaggtggagtcggaggttatgatgtccgattacgagagtggcgacgacggccacttcgaagaagtgacaataccacctttagacagtcagcagcacacagaggtgtag

SEQ ID NO: 287644 - DNA, 13767 bp, Artificial Sequence
  derived and/or modified sequence
atgggtcggcacttagcactcctgctcctcctgttactcctctttcagcatttcggcgacagcgacggttcccagagactggagcagacccccttacaattcacacacttagaatacaatgtaacagtgcaagaaaattccgctgctaagacttacgtcggccaccccgtcaaaatgggcgtgtacattacccacccggcatgggaggtcaggtacaagattgtgagcggtgattcagagaatttgtttaaggccgaggagtacatcttaggtgacttttgctttctccgaatccggactaaaggcgggaatacggcaattctcaacagagaggtgaaggaccactacacattaattgtgaaggctctggaaaagaatacgaacgttgaggccaggaccaaggtcagagtgcaggtgcttgatacaaacgacttaagacccctgttcagcccaacatcctattctgtaagccttcccgaaaacaccgcaatcaggaccagtattgcaagggtgtcagccacagatgccgatattggtacaaacggtgagttctactactctttcaaagaccgaacggatatgttcgctattcaccctacttccggggtgatcgtcctgactggaagactggactatctggaaaccaaattatacgagatggaaatccttgccgctgataggggaatgaaactgtacggcagcagtggcatatcgtcaatggctaaactgacagtgcatattgagcaggccaacgagtgtgcccccgtgatcaccgccgtgactctgagtccaagcgagctggaccgggatccggcatacgccatcgttactgtggatgattgcgatcagggcgcgaacggagacattgcgagccttagcatagtcgctggggacctgttgcagcagttcagaaccgtgcgaagctttccaggctccaaggagtacaaggtgaaggcgatcggaggcatcgactgggatagtcacccctttggctataacctcactctgcaggctaaagacaagggtacccctccccagttttcaagcgtgaaggttatacatgtgacttctccgcaattcaaagcaggtccagtgaagtttgaaaaagatgtctacagagccgaaatcagcgaatttgccccaccaaatactccagtggtgatggtcaaggccatacctgcttatagccatctccggtacgtgtttaaatctactcctggaaaggccaaattctctctgaactataacaccggcttgatctcaattctggagcccgtaaagaggcagcaggcagcacacttcgagctcgaagtcacaacatctgatcgcaaagccagcactaaggtgttggtgaaggtgctgggggccaattctaacccccccgagttcacacagaccgcttacaaggctgcattcgacgagaacgttcctattgggacaacggttatgtccctgagcgcggtggatccggacgagggcgaaaacggatatgttacctattcaattgccaacttaaaccatgtcccttttgccattgaccactttacaggggctgtttccacctctgaaaacttagactacgagctgatgccccgggtttatacactcagaattagagcctcagattggggcctgccttaccggagggaagtggaggtgctggcgaccataacactgaataatcttaatgataataccccgctattcgaaaagattaactgtgagggaacaatcccccgtgacctgggcgtcggagagcaaattactacagtgtctgcaattgacgccgacgagctgcaactggtgcagtaccagatcgaggccgggaacgagctcgacttttttagtctgaatccaaacagcggcgtactgtctcttaagcgatccctcatggatgggttaggggcgaaggtgagctttcattccttacgcataacagcgaccgatggtgaaaattttgccacaccactttatattaacattacagtggccgcctcacataagttggtcaacctgcaatgcgaggagaccggtgtggcaaagatgttggcagagaagctactgcaggccaacaaactccataaccagggcgaagtggaagatatcttctttgacagtcacagtgtgaatgctcatattcctcagttccgatccacactgcccaccggcatacaggtaaaagagaatcagccggtggggagcagcgtaattttcatgaattccaccgatctcgatacaggcttcaatggaaaactggtgtatgcggtaagcggcggaaacgaagatagctgctttatgatcgacatggaaaccggcatgctaaagattctgtccccattggatagggaaaccactgacaagtatacactgaatattaccgtgtatgatttgggtataccacagaaagcagcctggcggttgctccacgtggtcgtcgtggacgccaacgacaatccccccgagtttctgcaggaatcctacttcgtggaagtcagtgaggacaaagaggtgcacagcgagattattcaggttgaggccacagacaaggatctcggcccaaatgggcatgttacctacagtatcgttaccgacaccgatacctttagcatcgacagcgtgactggtgttgtgaacattgcgagaccactcgatcgggaattacagcacgagcactccttaaaaatcgaagctagagatcaggcaagggaggaaccccaactgttctctacagtcgttgttaaagtgtccctcgaggatgtcaacgacaacccaccaaccttcataccccccaactatcgcgtgaaggtgcgcgaggacctgcctgagggcaccgtcatcatgtggcttgaggcccacgatcccgatttgggacagtccgggcaggtgcgctactccctattggaccacggcgagggaaacttcgacgttgacaagctttctggagcagtgaggatagtgcagcaacttgatttcgagaagaaacaggtttacaacctcactgtgcgcgccaaagacaaggggaagcccgttagcctctcatccacatgctacgtcgaagttgaggtggtggatgtgaacgaaaatctgcatccgccagttttttctagctttgtggaaaaaggaacagttaaagaagacgctccagtgggtagtctggtgatgaccgtcagtgcgcacgatgaagatgcacgtcgagacggggagattcggtatagcatcagagatggttccggagtaggcgtctttaagattggcgaggagactggcgtgatagaaacttcggatcgcctggaccgggaatccacctcccactactggctcacagtgttcgcgacagaccaaggggtggtgcctctctcatcctttattgagatttacattgaagtcgaggatgtaaacgataacgccccccagacttctgaacctgtgtattatcctgaaattatggagaatagcccaaaagatgtgagcgtggtacagattgaggcctttgatcctgactcctcatccaacgataaactgatgtacaaaataacatccgggaatcctcaaggctttttctcaattcaccccaaaaccggacttataacaaccacaagcagaaagttggatagggagcagcaggacgagcatattttggaggtcaccgtgacagacaatggttctccccccaagagcactatagccagggtgatcgtaaaaatcttggatgagaacgacaataagcctcagttcttgcagaaattttacaagatcagactgcctgagcgggagaagcccgatcgtgagcggaatgctagacgggagcctctgtatcacgtgatcgccacagataaagatgagggaccaaacgccgaaatctcctactcaatcgaggatgggaatgaacatgggaagtttttcatagagcctaaaacgggcgtggtttcttccaagagattttctgcagctggtgagtatgacattctcagcatcaaggccgtcgacaatggacgcccacagaaatcctcaacaacccgtctgcacatcgagtggataagtaaacccaagccatctcttgagccaatctcgttcgaggaaagcttttttacatttactgtcatggaatccgatcccgtcgcccatatgattggcgtcatctctgtggagcctccagggatcccactctggttcgatattaccggtggtaattacgactcccatttcgatgtggacaaaggcactgggaccatcatagtggccaaacctcttgacgccgagcagaagtccaactataacctgaccgtcgaggctacggatggaaccacaacgatcttgacacaggtgtttatcaaagtgattgacaccaacgaccaccgaccccagtttagcacgtcaaaatatgaggtcgttatccccgaggacacagcccccgaaacagagattctgcagatatctgccgtggaccaggatgaaaagaataagcttatctacacacttcagtcttctcgcgaccccctgtctctgaagaaatttcggttggatcctgcgaccggatccctatatacctcagaaaagctagatcacgaagccgtacatcagcacacactgacagttatggtcagagaccaggacgtgcccgttaagcgtaacttcgctcgcattgtcgtgaacgtctcggacacaaatgaccacgccccttggtttactgcatcttcctacaagggaagggtttacgagtccgctgccgttggatcagtggtgctgcaggttactgccttagacaaggacaaaggaaagaacgctgaggttctgtacagtatcgagtctggtaatattggaaatagctttatgattgaccccgtgctcgggtcaatcaagaccgctaaggaactggaccggtctaaccaggccgagtacgatttaatggttaaagctaccgacaaagggagtccacctatgtcagagatcactagcgtccgtatctttgtcactattgctgataacgcgtctcctaaatttacttccaaagagtattccgttgaactcagcgaaaccgtgagtattggatcttttgtgggaatggtgacagctcactcgcagagctctgtggtgtatgaaatcaaggacggaaatacaggcgacgcgtttgacattaatccgcactcaggaaccattataacacagaaagccctcgactttgaaaccctgccaatctataccctgattatacagggaaccaacatggccggcctttccacgaacaccaccgtgctggtccatctgcaggatgagaatgacaatgccccagtcttcatgcaagctgagtacaccgggctaattagcgaatcagcttcaatcaattcagtggtgctgacagatcggaatgttcctttggtgataagggccgctgatgctgataaagacagcaatgccctcttagtttaccatatcgtcgaaccttccgtgcatacatatttcgcaattgactcaagtaccggcgcaatccatactgtgctgtccttagactatgaggagacttccatcttccacttcacggtgcaggtccacgatatggggacaccgagactgttcgctgaatacgcggccaatgttaccgtacacgtaatcgatatcaacgactgtcctcccgtgtttgctaagcctctgtacgaagcaagccttctcctgccgacatacaagggtgtaaaggttattactgttaacgcaactgacgccgactcttcagccttctcgcagttaatctactccattactgagggtaatatcggcgaaaagttttcaatggattacaaaacaggcgctttaactgttcaaaatacaactcaactccggtcccgctacgaactgaccgtccgcgcatcagatggtcgcttcgcagggctcaccagtgtgaagataaacgtcaaagaaagcaaggaatctcaccttaagttcacccaggacgtttactccgcagtagtcaaagaaaactctaccgaggccgaaaccctggcagtgattaccgccataggcaacccaatcaatgaaccactgttctaccatattttgaatccggaccgtcgattcaaaatttcaaggacttcaggcgttcttagtactacagggaccccatttgacagggagcagcaagaggcgtttgacgtcgtagttgaagtcaccgaagaacacaagccttcggcagtggcccacgtggtagtgaaagtcatcgtggaagatcagaacgacaacgctccagttttcgtgaatctgccttattacgccgtggtcaaagtcgacactgaggttggccacgtgattaggtatgtgactgccgtggatcgcgactccggcaggaacggagaggttcattactatcttaaagagcaccatgaacattttcagattggaccactcggtgaaatctcacttaagaaacagttcgagttggacacactaaataaggagtacctcgtaaccgtagtcgctaaggacggtggaaatcccgcattctcagcagaggtaatcgttcccataactgtgatgaacaaggctatgccagttttcgagaagcctttctacagcgccgaaattgccgagagtatccaggtgcactctccggtggttcacgtacaggcgaacagtcctgaggggctgaaagtattctattctatcacagatggggacccgttctcacaattcactatcaatttcaatacaggagtgatcaacgtgatagctcccctggacttcgaggctcacccagcttataaactttccatccgggccacagatagtctgaccggggcccacgccgaggtgttcgtggatattatcgtggatgatattaatgataacccaccagtttttgcacagcagtcctacgctgtcactctgtcagaggcgagcgtgattgggactagcgttgtacaggttcgggccactgattctgacagcgaacctaacaggggtatctcctatcaaatgttcggcaatcatagcaagtcgcatgaccacttccatgtggattcatctactggcttgatctccctgctgaggaccttagactacgagcagtccaggcagcatactatttttgtccgggcggtggacggggggatgcccactctgagcagtgacgttattgttacagtggacgtgaccgatctaaacgataacccgccactcttcgaacagcagatctatgaggcccgtataagtgaacatgccccccacgggcattttgtcacttgtgtgaaagcctacgacgcggactcaagcgatatcgacaagttgcagtactcaattctgtccggcaacgaccataaacattttgtgattgactcggccacgggtattataactctgtccaatcttcacagacatgcgttgaaacctttttactcactaaacttgtccgtgtcagacggcgtttttaggagttctacccaggtgcacgtgacagtgatcggggggaatctgcactcccccgccttccttcagaatgagtatgaagtggaactggcggagaacgctccactgcacactctggtgatggaagtaaaaactactgacggtgactccggtatttatggtcatgttacctaccacatcgtcaatgattttgctaaagataggttctatattaacgaacgaggtcaaatcttcacactggagaaactggatagagaaacaccagccgaaaaggtgatctcggtgcgcctgatggcaaaggatgccggtgggaaggtcgccttctgtaccgtgaacgtgattttgacggatgacaacgacaatgcgccccagttcagggccacaaaatacgaagtgaatataggctcctcagccgcaaaggggacttcagtggtgaaggtcctggcatccgacgcagatgaggggagcaacgccgacatcacctatgcaattgaagctgattcagagtcggtgaaggagaacctggagataaacaaattgagcggagtcattactaccaaagaatccctaatcggtctagagaatgagttcttcactttcttcgtcagggcagtagacaacggatcaccttctaaggaatctgtggtcctcgtttacgtgaaaatactcccccctgaaatgcagctccccaagttctcagagccattttacacattcacagtgagcgaggacgtgccgatcggaaccgaaattgatctcatccgcgcagaacattctggtacagttttatacagcctggtgaagggcaacactccagaaagtaatcgcgacgagagctttgtaatagacagacaaagtgggaggctgaagttggaaaaaagcttagatcatgaaactacaaagtggtatcaattttcaatcctcgctcgttgtactcaggatgatcatgaaatggtggcctctgtcgacgtgtcaatccaggtgaaggacgccaatgacaattctccggtattcgaaagcagcccctacgaggccttcatcgtggagaatctgcccggtgggtctcgagtgattcaaatcagagccagcgatgcagatagtggaacaaatggccaagttatgtattctcttgaccagagccagagtgtggaagtgatcgagagtttcgcaattaatatggagaccgggtggatcacaacactgaaggaactggaccatgagaagagagataattaccaaattaaagtggtcgccagcgatcatggtgagaaaatccagctgagcagcactgccatcgtcgacgtaactgttactgacgtaaacgatagcccacctcgctttaccgccgagatctacaagggtaccgtttccgaggacgatccacaaggcggagtgatagcaatcctgagtacaaccgatgccgattctgaggagatcaatagacaggtgacctattttattacaggaggggacccactgggtcagttcgctgtggagacgattcagaacgaatggaaagtgtacgtcaagaaaccccttgacagagagaaacgtgacaattatttgttaaccatcaccgccaccgacggcactttttccagtaaagccatcgttgaggtgaaggtccttgatgccaacgataactcacccgtgtgtgagaagactctgtactctgacactatccccgaagacgttctacctggaaagctgatcatgcaaatttcagctacagatgctgatattaggtccaatgccgaaatcacatatacgttgctgggtagtggcgctgagaaattcaagctaaaccctgatactggggagctcaagacatccacacccctggatcgggaagaacaggcagtataccacttgctcgtccgagctaccgacggcgggggaagattctgccaggctagcatcgtattgaccctggaggacgtgaacgacaacgcaccagaattcagcgcggatccatacgctattacagtcttcgaaaatactgagcccggcaccctgctgacgcgggtgcaggctaccgacgcagatgcaggccttaatagaaaaatcctatacagcctcattgacagtgccgatggccagttctcaatcaatgaactgtctggcataattcagctggagaagccccttgaccgggagttgcaagccgtgtacaccctcagtctcaaagccgttgaccagggactcccgcggcgcttgaccgccactggtacggtgatcgtcagtgtcctggatatcaatgacaaccctcctgtgtttgagtaccgagaatacggcgccacggtttctgaggacatcctcgtgggaaccgaggtactccaggtgtatgcagctagtagagatattgaggccaacgccgaaatcacttacagtatcatatccggcaacgagcacggcaagttctccatcgactcgaagacaggagccgtgttcatcatcgaaaacttggattatgaaagcagccacgagtactacctgaccgtagaggccacagatggtgggaccccaagtctgtctgacgtggctaccgtgaacgttaacgtgaccgatattaacgacaatacgcccgtattttcacaggacacatataccacagtaatttcggaggacgctgttctggaacagtcagtcatcaccgttatggccgacgacgcggacggaccctctaatagccacattcattatagtataatagacggtaatcaaggaagctcatttacaatcgaccccgtcaggggtgaagtgaaggtgacgaagctgttagacagagaaacaatcagcggatatacccttacagtgcaagccagcgataatggatctccaccgagagtgaatactactacagttaacatagatgtctccgacgtgaacgataacgctccagtgttttctagagggaactactcagtcataatccaagaaaataagcctgttgggttttctgtactgcagttggtggtgacagatgaagacagctcacacaatggtccccccttcttcttcaccattgtgacggggaacgatgaaaaagctttcgaagtgaacccccaaggtgtcctactcaccagttcggcaatcaaaagaaaggagaaagatcactaccttcttcaggtgaaagtcgcagacaatgggaagccccagttgtcctctctcacatatattgacataagggtgatagaggagagcatctacccaccagccattttgccgcttgagattttcatcacatcaagcggggaagaatattcaggaggagttattggtaagatccatgccaccgaccaagacgtgtacgatacccttacgtattctctggacccacagatggataatctgttcagtgtgagctccaccggaggaaagcttatagcacataagaaactggacattgggcagtatctcctcaacgtgagcgtgacagatgggaaatttactactgtcgccgatattacagtacatatcaggcaagtcacccaggaaatgcttaaccatactatcgctataaggttcgccaacctgacaccggaagaattcgtcggggattactggaggaactttcaaagggcactgcgaaatattctcggagtccgccggaatgacatacaaatcgttagcctacagtcatcagaacctcacccgcatcttgacgtcctgctgttcgtcgagaagccagggagtgcacagatttccactaaacagctgctgcataagatcaattcttcagttaccgacattgaagaaatcattggcgtgcgcatactcaatgtcttccagaaactttgtgcaggcctggactgtccttggaaattctgcgacgagaaagtttctgttgatgagtcagtgatgtcaacccattcgactgccagattgagtttcgtcacccctagacaccaccgtgcagcagtttgcctttgcaaagaaggacgatgcccaccggttcatcacggatgcgaagatgatccttgccccgagggctcggaatgcgtaagcgacccatgggaggaaaagcatacatgtgtgtgccccagtggccggttcggacagtgtcccggctccagctccatgaccctcacgggaaacagctatgtcaaatacagattgactgagaatgagaacaagcttgaaatgaaactcactatgagactcagaacctacagcacacacgcagtggtcatgtacgccagaggaaccgactatagtattctggagatacaccacggtcgcctgcaatataagtttgactgcggtagtggccccgggatcgtcagtgtgcagtctatccaggtgaatgatggccagtggcacgccgtggccctggaagtgaacggcaattatgctagactggttctcgaccaggttcacactgcctccggcacggctcccgggaccctcaaaactttaaatctggacaactatgtgttttttggcggacatatacgtcagcagggtacaagacacggtcgctctccacaagtaggtaatggtttcaggggatgtatggacagtatctatctcaacggacaggagcttcctctgaactctaagccgagatcatatgcccacatagaggaatcagtggatgtgtctcctgggtgttttttgaccgcaacagaggattgtgcgtccaacccatgtcagaacggcggcgtgtgtaacccaagccccgcaggcggctactactgcaaatgtagcgcactgtacattggcacccattgtgaaatttccgttaatccctgttcctcaaagccttgtctgtacgggggtacttgtgtggttgacaacgggggattcgtttgccagtgcaggggattatacacagggcaacggtgccagctttcaccttactgcaaagacgaaccctgcaagaacggaggtacgtgtttcgactccctagacggggctgtgtgccagtgtgattccggttttcgaggcgagcgctgtcagtctgatatcgatgaatgttcagggaacccttgcttgcacggcgccctctgtgagaatacacatggcagttaccactgcaattgctcccacgagtatcgaggcagacattgtgaagacgccgctccaaatcagtatgtttctactccatggaacataggtcttgcagagggcattggaattgtcgtgttcgtggcgggcattttccttctagtggttgtctttgtgctctgtagaaaaatgattagtcggaagaaaaagcaccaggcagaacccaaggacaaacatctgggacctgctacagcctttcttcagcggccatacttcgacagtaagttgaacaaaaacatatatagcgatatccctccccaagtgcctgtgagaccgatctcatataccccatccataccgtccgactctcggaacaatttggatcggaatagttttgaggggagtgctattcctgagcatcctgagttcagcaccttcaacccggagagtgtgcacggtcacaggaaggcggtggccgtgtgctcggtggccccaaacctaccccccccgccccctagtaacagcccctcggactcggattccatccagaagccttcctgggattttgattatgacaccaaggtggtggatctggacccctgtctctcaaaaaagcctttggaggaaaaaccgagccaaccctacagtgctagagagtctctgtccgaggtgcagagtctcagctcgtttcaatcagaaagttgtgacgacaatggttaccactgggacactagtgactggatgccttctgttcccctcccggatattcaagaattcccaaactacgaagtgatcgatgagcagacgcccctgtattcggccgaccccaatgcaattgatactgactactatccagggggctatgacatagaaagtgacttcccaccacctcctgaggacttcccagccgcagacgagctgccgcctctccctcccgaatttagcaaccaattcgagtctatccatcctccacgggatatgcccgcagccggcagtctgggatcttcctctcgcaacaggcagcggttcaacttaaatcagtatctgcccaatttctatcctttggatatgtctgaaccgcagacaaagggcactggggagaactctacttgcagagaaccccacgctccataccccccggggtaccagaggcactttgaggcacctgccgttgagagtatgccaatgtccgtttatgccagcaccgcgagttgtagcgatgtctccgcgtgctgtgaggtcgagagcgaggttatgatgtctgactatgagagcggcgacgacggccactttgaggaagtgaccattccccccctggattctcaacagcatacagaggtgtag

SEQ ID NO: 287645 - DNA, 1467 bp, Artificial Sequence
  derived and/or modified sequence
atgggccgccaccttgcactgctgttactgctcctgcttctgttccagcactttggggattcagatggttcccagagactggagcagaccccacttcagttcacccacttggaatataacgtcactgttcaggagaattccgctgcgaagacctacgtaggtcacccagttaagatgggggtgtacatcacccatccggcctgggaggtccgctacaagattgtgagcggtgacagcgaaaacctcttcaaagctgaagaatacattttgggagacttttgttttctgcgtattagaaccaagggcggcaatacggctatccttaaccgtgaagtaaaggaccactatactctcatcgtaaaggcactcgagaagaataccaatgtggaggcaaggactaaagtgcgggtgcaagtcttggataccaatgacctgcgtcctcttttcagccctacgtcctacagcgtgtccctgcctgaaaacacagccatacgtacaagtatcgctagagtaagtgccacagacgccgacattggcaccaacggtgaattttactacagttttaaagacagaacggatatgttcgccatacaccccacatcgggcgtgattgtccttactggtagattagattacctggaaaccaaactctacgaaatggagatcctcgccgccgaccgtggaatgaagctctatgggagctccggaatttcttccatggcaaaactcaccgtacatatcgagcaggctaacgaatgcgccccagtcattaccgctgtcacactcagtccatccgagctagatcgtgacccagcctacgccatagttaccgtggacgattgtgaccaaggtgctaatggcgatatagcttcactatcaatcgtggcaggtgacctcctgcaacagtttaggaccgtgcgatctttccctggttccaaggagtacaaggttaaagcaattggaggaatcgactgggacagccatccattcggctacaacttgacattgcaggcgaaggacaaagggacacccccccaattcagctcagttaaggtaattcatgtgacctcccctcagtttaaggcaggccccgtcaagtttgagaaggacgtatacagagctgagatcagcgagtttgcaccaccgaatacgccagtcgtgatggtaaaagccattcctgcgtatagccatctgcggtacgtgttcaaatcaacccccgggaaggctaagttctcattgaactataacacgggcctgatatcaattctggaacccgttaaacgacaacaggccgcccactttgagctggaagtcaccacatcagacaggaaagcatcaactaaggtactcgtgaaggtattgggggcaaatagcaacccccccgagtttacacagacagcatataaagctgcattcgacgaaaacgtgcctatcgggaccacagtgatgtccttatccgctgtctag

SEQ ID NO: 287646 - DNA, 14758 bp, Artificial Sequence
  derived and/or modified sequence
ctgggcggccgggcgcggggagagggcgcgggagcggctcgtgcggcaggtaccatgcggacgcgcgagcccggcgagggccccggcaggcccggtccctgctcgggggcgcgctgagacggcgggtgagctccacgagagcgccgtcgccacttcgggccaactttgcgattcccgacagttaagcaatggggagacatttggctttgctcctgcttctgctccttctcttccaacattttggagacagtgatggcagccaacgacttgaacagactcctctgcagtttacacacctcgagtacaacgtcaccgtgcaggagaactctgcagctaagacttatgtggggcatcctgtcaagatgggtgtttacattacacatccagcgtgggaagtaaggtacaaaattgtttccggagacagtgaaaacctgttcaaagctgaagagtacattctcggagacttttgctttctaagaataaggaccaaaggaggaaatacagctattcttaatagagaagtgaaggatcactacacattgatagtgaaagcacttgaaaaaaatactaatgtggaggcgcgaacaaaggtcagggtgcaggtgctggatacaaatgacttgagaccgttattctcacccacctcatacagcgtttctttacctgaaaacacagctataaggaccagtatcgcaagagtcagcgccacggatgcagacataggaaccaacggggaattttactacagttttaaagatcgaacagatatgtttgctattcacccaaccagtggtgtgatagtgttaactggtagacttgattacctagagaccaagctctatgagatggaaatcctcgctgcggaccgtggcatgaagttgtatgggagcagtggcatcagcagcatggccaagctaacggtgcacatcgaacaggccaatgaatgtgctccggtgataacagcagtgacattgtcaccatcagaactggacagggacccagcatatgcaattgtgacagtggatgactgcgatcagggtgccaatggtgacatagcatctttaagcatcgtggcaggtgaccttctccagcagtttagaacagtgaggtcctttccagggagtaaggagtataaagtcaaagccatcggtggcattgattgggacagtcatcctttcggctacaatctcacactacaggctaaagataaaggaactccgccccagttctcttctgttaaagtcattcacgtgacttctccacagttcaaagccgggccagtcaagtttgaaaaggatgtttacagagcagaaataagtgaatttgctcctcccaacacacctgtggtcatggtaaaggccattcctgcttattcccatttgaggtatgtttttaaaagtacacctggaaaagctaaattcagtttaaattacaacactggtctcatttctattttagaaccagttaaaagacagcaggcagcccattttgaacttgaagtaacaacaagtgacagaaaagcgtccaccaaggtcttggtgaaagtcttaggtgcaaatagcaatccccctgaatttacccagacagcgtacaaagctgcttttgatgagaacgtgcccattggtactactgtcatgagcctgagtgccgtagaccctgatgagggtgagaacgggtacgtgacatacagtatcgcaaatttaaatcatgtgccgtttgcgattgaccatttcactggtgccgtgagtacgtcagaaaacctggactacgaactgatgcctcgggtttatactctgaggattcgtgcatcagactggggcttgccgtaccgccgggaagtcgaagtccttgctacaattactctcaataacttgaatgacaacacacctttgtttgagaaaataaattgtgaagggacaattcccagagatctaggcgtgggagagcaaataaccactgtttctgctattgatgcagatgaacttcagttggtacagtatcagattgaagctggaaatgaactggatttctttagtttaaaccccaactcgggggtattgtcattaaagcgatcgctaatggatggcttaggtgcaaaggtgtctttccacagtctgagaatcacagctacagatggagaaaattttgccacaccattatatatcaacataacagtggctgccagtcacaagctggtaaacttgcagtgtgaagagactggtgttgccaaaatgctggcagagaagctcctgcaggcaaataaattacacaaccagggagaggtggaggatattttcttcgattctcactctgtcaatgctcacataccgcagtttagaagcactcttccgactggtattcaggtaaaggaaaaccagcctgtgggttccagtgtaattttcatgaactccactgaccttgacactggcttcaatggaaaactggtctatgctgtttctggaggaaatgaggatagttgcttcatgattgatatggaaacaggaatgctgaaaattttatctcctcttgaccgtgaaacaacagacaaatacaccctgaatattaccgtctatgaccttgggataccccagaaggctgcgtggcgtcttctacatgtcgtggttgtcgatgccaatgataatccacccgagtttttacaggagagctattttgtggaagtgagtgaagacaaggaggtacatagtgaaatcatccaggttgaagccacagataaagacctggggcccaacggacacgtgacgtactcaattgttacagacacagacacattttcaattgacagcgtgacgggtgttgttaacatcgcacgccctctggatcgagagctgcagcatgagcactccttaaagattgaggccagggaccaagccagagaagagcctcagctgttctccactgtcgttgtgaaagtatcactagaagatgttaatgacaacccacctacatttattccacctaattatcgtgtgaaagtccgagaggatcttccagaaggaaccgtcatcatgtggttagaagcccacgatcctgatttaggtcagtctggtcaggtgagatacagccttctggaccacggagaaggaaacttcgatgtggataaactcagtggagcagttaggatcgtccagcagttggactttgagaagaagcaagtgtataatctcactgtgagggccaaagacaagggaaagccagtttctctgtcttctacttgctatgttgaagttgaggtggttgatgtgaatgagaacctgcacccacccgtgttttccagctttgtggaaaaggggacagtgaaagaagatgcacctgttggttcattggtaatgacggtgtcggctcatgatgaggacgccagaagagatggggagatccgatactccattagagatggctctggcgttggtgttttcaaaataggtgaagagacaggtgtcatagagacgtcagatcgactggaccgtgaatcgacctcccattattggctaacagtctttgcaaccgatcagggtgtcgtgcctctttcatcgttcatagagatctacatagaggttgaggatgtcaatgacaatgcaccacagacatcagagcctgtttattacccagaaatcatggaaaattctcctaaagatgtatctgtggtccagatcgaggcatttgatccagattcgagctctaatgacaagctcatgtacaaaattacaagtggaaatccacaaggattcttttcaatacatcctaaaacaggtctcatcacaactacgtcaaggaagctagaccgagaacagcaagatgaacacatattagaggttactgtgacagacaatggtagtccccccaaatcaaccattgcaagagtcattgtgaaaatccttgatgaaaatgacaacaaacctcagtttctgcaaaagttctacaaaatcagactccctgagcgggaaaagccagaccgagaaagaaatgccagacgggagccgctctatcacgtcatagccaccgacaaggatgagggccccaatgcagaaatctcctacagcatcgaagacgggaatgagcatggcaaatttttcatcgaaccgaaaactggagtggtttcgtccaagaggttttcagcagctggagaatatgatattctttcaattaaggcagttgacaatggtcgccctcaaaagtcatcaaccaccagactccatattgaatggatctccaagcccaaaccgtccctggagcccatttcatttgaagaatcattttttacctttactgtgatggaaagtgaccccgttgctcacatgattggagtaatatctgtggagcctcctggcatacccctttggtttgacatcactggtggcaactacgacagtcacttcgatgtggacaagggaactggaaccatcattgttgccaaacctcttgatgcagaacagaagtcaaactacaacctcacagtcgaggctacagatggaaccaccactatcctcactcaggtattcatcaaagtaatagacacaaatgaccatcgtcctcagttttctacatcaaagtatgaagttgttattcctgaagatacagcgccagaaacagaaattttgcaaatcagtgctgtggatcaggatgagaaaaacaaactaatctacactctgcagagcagtagagatccactgagtctcaagaaatttcgtcttgatcctgcaaccggctctctctatacttctgagaaactggatcatgaagctgttccagcacacctcacggtcatggtacgagatcaagatgtgcctgtaaaacgcaactttgcaaggattgtggtcaatgtcagcgacacgaatgaccacgccccgtggttcaccgcttcctcctacaaagggcgggtttatgaatcggcagccgttggctcagttgtgttgcaggtgacggctctggacaaggacaaagggaaaaatgctgaagtgctgtactcgatcgagtcaggtacttttggaaatattggaaattcttttatgattgatcctgtcttgggctctattaaaactgccaaagaattagatcgaagtaaccaagcggagtatgatttaatggtaaaagctacagataagggcagtccaccaatgagtgaaataacttctgtgcgtatctttgtcacaattgctgacaacgcctctccgaagtttacatcaaaagaatattctgttgaacttagtgaaactgtcagcattgggagtttcgttgggatggttacagcccatagtcaatcatcagtggtgtatgaaataaaagatggaaatacaggtgatgcttttgatattaatccacattctggaactatcatcactcagaaagccctggactttgaaactttgcccatttacacattgataatacaaggaactaacatggctggtttgtccactaatacaacggttctagttcacttgcaggatgagaatgacaacgcgccagtttttatgcaggcagaatatacaggactcattagtgaatcagcctcaattaacagcgtggtcctaacagacaggaatgtcccactggtgattcgagcagctgatgctgataaagactcaaatgctttgcttgtatatcacattgttgaaccatctgtacacacatattttgctattgattctagcactggtgctattcatacagtactaagtctggactatgaagaaacaagtatttttcactttaccgtccaagtgcatgacatgggaaccccacgtttatttgctgagtatgcagcgaatgtaacagtacatgtaattgacattaatgactgcccccctgtgtttgccaagccattatatgaagcatctcttttgttaccaacatacaaaggagtaaaagtcatcacagtaaatgctacagatgctgattcaagtgcattctcacagttgatttactccatcaccgaaggcaacatcggggagaagttttctatggactacaagactggtgctctcactgtccaaaacacaactcagttaagaagccgctacgagctaaccgttagagcttccgatggcagatttgccggccttacctctgtcaaaattaatgtgaaagaaagcaaagaaagtcacctaaagtttacccaggatgtctactctgcggtagtgaaagagaattccaccgaggccgaaacattagctgtcattactgctattgggaatccaatcaatgagcctttgttttatcacatcctcaacccagatcgcagatttaaaataagccgcacttcaggagttctgtcaaccactggcacgcccttcgatcgtgagcagcaggaggcgtttgatgtggttgtagaagtgacagaggaacataagccttctgcagtggcccacgttgtcgtgaaggtcattgtagaagaccaaaatgataatgcgccggtgtttgtcaaccttccctactacgccgttgttaaagtggacactgaggtgggccatgtcattcgctatgtcactgctgtagacagagacagtggcagaaacggggaagtgcattactacctcaaggaacatcatgaacactttcaaattggacccttgggtgaaatttcactgaaaaagcaatttgagcttgacaccttaaataaagaatatcttgttacagtggttgcaaaagatggagggaacccggccttttcagcggaagttatcgttccgatcactgtcatgaataaagccatgcctgtgtttgaaaaacctttctacagtgcagagattgcagagagcatccaggtgcacagccctgtggtccacgtgcaggctaacagcccggaaggcctgaaagtgttctacagcatcacagacggagaccctttcagccagttcactattaacttcaatactggagttatcaatgtcatagctcctctggactttgaggcccacccggcatataagctgagcatacgcgcaactgactccttgacgggcgctcatgctgaagtatttgtggacatcatagtagacgacatcaatgataaccctcctgtgtttgctcagcagtcttatgcggtgaccctgtctgaggcatctgtaattggaacgtctgttgttcaagttagagccaccgattctgattcagaaccaaatagaggaatctcataccagatgtttgggaatcacagcaagagtcatgatcattttcatgtagacagcagcactggcctcatctcactactcagaaccctggattacgagcagtcccggcagcacacgatttttgtgagggcagttgatggtggtatgcccacgctgagcagtgatgtgattgtcacggtggacgttaccgacctcaatgataatccaccactctttgaacaacagatttatgaagccagaattagcgagcacgcccctcatgggcatttcgtgacctgtgtaaaagcctatgatgcagacagttcagacatagacaagttgcagtattccattctgtctggcaatgatcataaacattttgtcattgacagtgcaacagggattatcaccctctcaaacctgcaccggcacgccctgaagccattttacagtcttaacctgtcagtgtctgatggagtttttagaagttccacccaggttcatgtaactgtaattggaggcaatttgcacagtcctgctttccttcagaacgaatatgaagtggaactagctgaaaacgctcccctacataccctggtgatggaggtgaaaactacggatggggattctggtatttatggtcacgttacttaccatattgtaaatgactttgccaaagacagattttacataaatgagagaggacagatatttactttggaaaaacttgatcgagaaaccccggcggagaaagtgatctcagtccgtttaatggctaaggatgctggaggaaaagttgctttctgcaccgtgaatgtcatccttacagatgacaatgacaatgcaccacaatttcgagcaaccaaatacgaagtgaatatcgggtccagtgctgctaaagggacttcagtcgttaaagttcttgcaagtgatgccgatgagggctccaatgccgacatcacctatgccattgaagcagactctgaaagtgtaaaagagaatttggaaattaacaaactgtccggcgtaatcactacaaaggagagcctcattggcttggaaaatgaattcttcactttctttgttagagctgtggataatgggtctccatcaaaagaatctgttgttcttgtctatgttaaaatccttccaccggaaatgcagcttccaaaattttcagaacctttctatacctttacagtgtcagaggacgtgcctattggaacagagatagatctcatccgagcagaacatagtgggactgttctttacagcctggtcaaagggaatactccagaaagcaatagggatgagtcctttgtgattgacagacagagcgggagactgaagttggagaagagtcttgatcatgagacaactaagtggtatcagttttccatactggccaggtgcactcaagatgaccatgagatggtggcttctgtagatgttagtatccaagtgaaagatgcaaatgacaacagcccggtctttgaatctagtccatatgaggcattcattgttgaaaacctgccagggggaagtagagtaattcagatcagggcatctgatgctgactcaggaaccaacggccaagttatgtatagcctggatcagtcacaaagtgtggaagtcattgaatcctttgccattaacatggaaacaggctggattacaactttaaaggaacttgaccatgaaaagagagacaattaccagattaaagtggttgcatcagatcatggtgaaaagatccagctatcctccacagccattgtggatgttaccgtcaccgatgtcaacgatagtccaccacgattcacggccgagatctataaagggactgtgagtgaggatgacccccaaggtggggtgattgccatcttaagtaccacggatgctgattctgaagagatcaacagacaagttacatatttcataacaggaggggatcctttaggacagtttgccgttgaaactatacagaatgaatggaaggtatatgtgaagaaacctctagacagggaaaaaagggacaattaccttcttactatcacggcaactgatggcaccttctcatcaaaagcgatagttgaagtgaaagttctggatgcaaatgacaacagtccagtttgtgaaaagactttatattcagacactattcctgaagacgtccttcctggaaaattgatcatgcagatctctgctacagacgcagacatccgctctaacgctgaaattacttacacgttattgggttcaggtgcagaaaaattcaaactaaatccagacacaggtgaactgaaaacgtcaaccccccttgatcgtgaggagcaagctgtttatcatcttctcgtcagggccacagatggaggaggaagattctgccaagccagtattgtgctcacgctagaagatgtgaacgataacgcccccgaattctctgccgatccttatgccatcaccgtgtttgaaaacacagagccgggaacgctgctgacaagagtgcaggccacagatgccgacgcaggattaaatcggaagattttatactcactgattgactctgctgatgggcagttctccattaacgaattatctggaattattcagttagaaaaacctttggacagagaactccaggcagtatacaccctctctttgaaagctgtggatcaaggcttgccaaggaggctgactgccactggcactgtgattgtatcagttcttgacataaatgacaacccccctgtgtttgagtaccgtgaatatggtgccaccgtgtctgaggacattcttgttggaactgaagttcttcaagtgtatgcagcaagtcgggatattgaagcaaatgcagaaatcacctactcaataataagtggaaatgaacatgggaaattcagcatagattctaaaacaggggccgtatttatcattgagaatctggattatgagagctctcatgagtattacctaacagtagaggccactgatggaggcacgccttcactgagcgacgttgccactgtgaacgttaatgtaacagatatcaacgataatacccctgtgttcagccaagacacctacacgacagtcatcagtgaagatgccgttcttgagcagtctgtcatcacggttatggccgatgatgccgatggaccttccaacagccacatccactactcaattatagatggcaaccaaggaagctcgttcacaattgaccccgtcaggggagaagtcaaagtgaccaaacttctcgaccgagaaacgatttcaggttacacgctcacggttcaagcttctgataatggcagtccacccagagtcaacacgacgaccgtgaacatcgatgtgtccgatgtcaatgacaacgcgcccgtcttctccaggggaaactacagtgtcattatccaggaaaataagccagtgggcttcagcgtgctgcagctggtagtaacagatgaggattcttcccataacggtccacccttcttctttactattgtaactggaaatgatgagaaggcttttgaagttaacccgcaaggagtcctcctgacatcatctgccatcaagaggaaggagaaagatcattacttactgcaggtgaaggtggcagataatggaaagcctcagttgtcatctttgacatacattgacattagggtaattgaggagagcatctatccgcctgcgattttgcccctggagattttcatcacctcttctggagaagaatactcaggtggcgtcattgggaagatccatgccacagaccaggacgtgtatgatactctaacctacagtctcgaccctcagatggacaacctgttctctgtttccagcacagggggcaagctgatagcacacaaaaagctagacatagggcaataccttctcaatgtcagcgtaacagatgggaagttcacgacggtggccgacatcacagtgcatatcagacaagtcacacaggagatgttgaaccacaccatcgcgatccgctttgccaacctcactccggaagaattcgttggtgactactggcgcaacttccagcgagctttacggaacatcctgggtgtgaggaggaacgacatacagattgttagtttgcagtcctctgaacctcacccacatctggacgtcttactttttgtagagaaaccaggtagtgctcagatctcaacaaaacaacttctgcacaagattaactcttccgtgactgacattgaggaaatcattggagttaggatactgaatgtattccagaaactctgcgcgggactggactgcccctggaagttctgcgatgaaaaggtgtctgtggatgaaagtgtgatgtcaacacacagcacagccagactgagttttgtgactccccgccaccacagggcagcggtgtgtctctgcaaagagggaaggtgcccacctgtccaccatggctgtgaagatgatccgtgccctgagggatccgaatgtgtgtctgatccctgggaggagaaacacacctgtgtctgtcccagcggcaggtttggtcagtgcccagggagttcatctatgacactgactggaaacagctacgtgaaataccgtctgacggaaaatgaaaacaaattagagatgaaactgaccatgaggctcagaacatattccacgcatgcggttgtcatgtatgctcgaggaactgactatagcatcttggagattcatcatggaaggctgcagtacaagtttgactgtggaagtggccctggaattgtctctgttcagagcattcaggtcaatgatgggcagtggcacgcagtggccctggaagtgaatggaaactatgctcgcttggttctagaccaagttcatactgcatcgggcacagccccagggactctgaaaaccctgaacctggataactatgtgttttttggtggccacatccgtcagcagggaacaaggcatggaagaagtcctcaagttggtaatggtttcaggggttgtatggactccatttatttgaatgggcaggagctccctttaaacagcaaacccagaagctatgcacacatcgaagagtcggtggatgtatctccaggctgcttcctgacggccacggaagactgcgccagcaacccttgccagaatggaggcgtttgcaatccgtcacctgctggaggttattactgcaaatgcagtgccttgtacatagggacccactgtgagataagcgtcaatccgtgttcctccaagccatgcctctatgggggcacgtgtgttgtcgacaacggaggctttgtttgccagtgtagaggattatatactggtcagaggtgtcagcttagtccatactgcaaagatgaaccctgtaagaatggcggaacatgctttgacagtttggatggcgccgtttgtcagtgtgattcgggttttaggggagaaaggtgtcagagtgatatcgacgagtgctctggaaacccttgcctgcacggggccctctgtgagaacacgcacggctcctatcactgcaactgcagccacgagtacaggggacgtcactgcgaggatgctgcgcccaaccagtatgtgtccacgccgtggaacattgggttggcggaaggaattggaatcgttgtgtttgttgcagggatatttttactggtggtggtgtttgttctctgccgtaagatgattagtcggaaaaagaagcatcaggctgaacctaaagacaagcacctgggacccgctacggctttcttgcaaagaccgtattttgattccaagctaaataagaacatttactcagacataccaccccaggtgcctgtccggcctatttcctacaccccgagtattccaagtgactcaagaaacaatctggaccgaaattccttcgaaggatctgctatcccagagcatcccgaattcagcacttttaaccccgagtctgtgcacgggcaccgaaaagcagtggcggtctgcagcgtggcgccaaacctgcctcccccacccccttcaaactccccttctgacagcgactccatccagaagcctagctgggactttgactatgacacaaaagtggtggatcttgatccctgtctttccaagaagcctctagaggaaaagccttcccagccatacagtgcccgggaaagcctgtctgaagtgcagtctctgagctccttccagtccgaatcgtgcgatgacaatgggtatcactgggatacatcagattggatgccaagcgttcctctgccggacatacaagagttccccaactatgaggtgattgatgagcagacacccctgtactcagcagatccaaacgccatcgatacggactattaccctggaggctacgacatcgaaagtgattttcctccacccccagaagacttccccgcagctgatgagctaccaccgttaccgcccgaattcagcaatcagtttgaatccatccaccctcctagagacatgcctgccgcgggtagcttgggttcttcatcaagaaaccggcagaggttcaacttgaatcagtatttgcccaatttttatcccctcgatatgtctgaacctcaaacaaaaggcactggtgagaatagtacttgtagagaaccccatgccccttacccgccagggtatcaaagacacttcgaggcgcccgctgtcgagagcatgcccatgtctgtgtacgcctccaccgcctcctgctctgacgtgtcagcctgctgcgaagtggagtccgaggtcatgatgagtgactatgagagcggggacgacggccacttcgaagaggtgacgatcccgcccctggattcccagcagcacacggaagtctgactctcaactccccccaaagtgcctgactttagtgaacctagaggtgatgtgagtaatccgcgctgttctttgcagcagtgcttccaagctttttttggtgagccgaatgggcatggctgcgctggatcctgcgcctctggacgtgctagccatttccagtgtcccaactactgtcatcgtgaggttttcatcggctgtgccatttcccaacgtcttttgggatttacatctgtctgtgttaaaataatcaaacgaaaaatcagtcctgtgttgtcagcatgattcatgtatttatatagatttgattattttaattttcctgtctcttttttttgtaaattttatgtacagatttgatttttcatagttttaactagatttccaagatattttgtgcatttgtttcaactgaattttggtggtgtcagtgccattatctagcaccctgatttttttttttttactataaccagggtttcattctgtctttttccactgaagtgtgacattttgttagtacatttcagtgtagtcattcatttctagctgtacataggatgaaggagagatcagatacatgaacatgtcttacatgggttgctgtatttagaattataaacatttttcattattggaaagtgtaacggggaccttctgcatacctgtttagaaccaaaaccaccatgacacagtttttatagtgtctgtatatttgtgatgcaatggtcttgtaaaggtttttaatgaaaactaccattagccagtctttcttactgacaataaattattaataaaat

SEQ ID NO: 287647 - DNA, 14786 bp, Artificial Sequence
  derived and/or modified sequence
agcgtgaggcgccggcgccgagctgggcggccgggcgcggggagagggcgcgggagcggctcgtgcggcaggtaccatgcggacgcgcgagcccggcgagggccccggcaggcccggtccctgctcgggggcgcgctgagacggcgggtgagctccacgagagcgccgtcgccacttcgggccaactttgcgattcccgacagttaagcaatggggagacatttggctttgctcctgcttctgctccttctcttccaacattttggagacagtgatggcagccaacgacttgaacagactcctctgcagtttacacacctcgagtacaacgtcaccgtgcaggagaactctgcagctaagacttatgtggggcatcctgtcaagatgggtgtttacattacacatccagcgtgggaagtaaggtacaaaattgtttccggagacagtgaaaacctgttcaaagctgaagagtacattctcggagacttttgctttctaagaataaggaccaaaggaggaaatacagctattcttaatagagaagtgaaggatcactacacattgatagtgaaagcacttgaaaaaaatactaatgtggaggcgcgaacaaaggtcagggtgcaggtgctggatacaaatgacttgagaccgttattctcacccacctcatacagcgtttctttacctgaaaacacagctataaggaccagtatcgcaagagtcagcgccacggatgcagacataggaaccaacggggaattttactacagttttaaagatcgaacagatatgtttgctattcacccaaccagtggtgtgatagtgttaactggtagacttgattacctagagaccaagctctatgagatggaaatcctcgctgcggaccgtggcatgaagttgtatgggagcagtggcatcagcagcatggccaagctaacggtgcacatcgaacaggccaatgaatgtgctccggtgataacagcagtgacattgtcaccatcagaactggacagggacccagcatatgcaattgtgacagtggatgactgcgatcagggtgccaatggtgacatagcatctttaagcatcgtggcaggtgaccttctccagcagtttagaacagtgaggtcctttccagggagtaaggagtataaagtcaaagccatcggtggcattgattgggacagtcatcctttcggctacaatctcacactacaggctaaagataaaggaactccgccccagttctcttctgttaaagtcattcacgtgacttctccacagttcaaagccgggccagtcaagtttgaaaaggatgtttacagagcagaaataagtgaatttgctcctcccaacacacctgtggtcatggtaaaggccattcctgcttattcccatttgaggtatgtttttaaaagtacacctggaaaagctaaattcagtttaaattacaacactggtctcatttctattttagaaccagttaaaagacagcaggcagcccattttgaacttgaagtaacaacaagtgacagaaaagcgtccaccaaggtcttggtgaaagtcttaggtgcaaatagcaatccccctgaatttacccagacagcgtacaaagctgcttttgatgagaacgtgcccattggtactactgtcatgagcctgagtgccgtagaccctgatgagggtgagaacgggtacgtgacatacagtatcgcaaatttaaatcatgtgccgtttgcgattgaccatttcactggtgccgtgagtacgtcagaaaacctggactacgaactgatgcctcgggtttatactctgaggattcgtgcatcagactggggcttgccgtaccgccgggaagtcgaagtccttgctacaattactctcaataacttgaatgacaacacacctttgtttgagaaaataaattgtgaagggacaattcccagagatctaggcgtgggagagcaaataaccactgtttctgctattgatgcagatgaacttcagttggtacagtatcagattgaagctggaaatgaactggatttctttagtttaaaccccaactcgggggtattgtcattaaagcgatcgctaatggatggcttaggtgcaaaggtgtctttccacagtctgagaatcacagctacagatggagaaaattttgccacaccattatatatcaacataacagtggctgccagtcacaagctggtaaacttgcagtgtgaagagactggtgttgccaaaatgctggcagagaagctcctgcaggcaaataaattacacaaccagggagaggtggaggatattttcttcgattctcactctgtcaatgctcacataccgcagtttagaagcactcttccgactggtattcaggtaaaggaaaaccagcctgtgggttccagtgtaattttcatgaactccactgaccttgacactggcttcaatggaaaactggtctatgctgtttctggaggaaatgaggatagttgcttcatgattgatatggaaacaggaatgctgaaaattttatctcctcttgaccgtgaaacaacagacaaatacaccctgaatattaccgtctatgaccttgggataccccagaaggctgcgtggcgtcttctacatgtcgtggttgtcgatgccaatgataatccacccgagtttttacaggagagctattttgtggaagtgagtgaagacaaggaggtacatagtgaaatcatccaggttgaagccacagataaagacctggggcccaacggacacgtgacgtactcaattgttacagacacagacacattttcaattgacagcgtgacgggtgttgttaacatcgcacgccctctggatcgagagctgcagcatgagcactccttaaagattgaggccagggaccaagccagagaagagcctcagctgttctccactgtcgttgtgaaagtatcactagaagatgttaatgacaacccacctacatttattccacctaattatcgtgtgaaagtccgagaggatcttccagaaggaaccgtcatcatgtggttagaagcccacgatcctgatttaggtcagtctggtcaggtgagatacagccttctggaccacggagaaggaaacttcgatgtggataaactcagtggagcagttaggatcgtccagcagttggactttgagaagaagcaagtgtataatctcactgtgagggccaaagacaagggaaagccagtttctctgtcttctacttgctatgttgaagttgaggtggttgatgtgaatgagaacctgcacccacccgtgttttccagctttgtggaaaaggggacagtgaaagaagatgcacctgttggttcattggtaatgacggtgtcggctcatgatgaggacgccagaagagatggggagatccgatactccattagagatggctctggcgttggtgttttcaaaataggtgaagagacaggtgtcatagagacgtcagatcgactggaccgtgaatcgacctcccattattggctaacagtctttgcaaccgatcagggtgtcgtgcctctttcatcgttcatagagatctacatagaggttgaggatgtcaatgacaatgcaccacagacatcagagcctgtttattacccagaaatcatggaaaattctcctaaagatgtatctgtggtccagatcgaggcatttgatccagattcgagctctaatgacaagctcatgtacaaaattacaagtggaaatccacaaggattcttttcaatacatcctaaaacaggtctcatcacaactacgtcaaggaagctagaccgagaacagcaagatgaacacatattagaggttactgtgacagacaatggtagtccccccaaatcaaccattgcaagagtcattgtgaaaatccttgatgaaaatgacaacaaacctcagtttctgcaaaagttctacaaaatcagactccctgagcgggaaaagccagaccgagaaagaaatgccagacgggagccgctctatcacgtcatagccaccgacaaggatgagggccccaatgcagaaatctcctacagcatcgaagacgggaatgagcatggcaaatttttcatcgaaccgaaaactggagtggtttcgtccaagaggttttcagcagctggagaatatgatattctttcaattaaggcagttgacaatggtcgccctcaaaagtcatcaaccaccagactccatattgaatggatctccaagcccaaaccgtccctggagcccatttcatttgaagaatcattttttacctttactgtgatggaaagtgaccccgttgctcacatgattggagtaatatctgtggagcctcctggcatacccctttggtttgacatcactggtggcaactacgacagtcacttcgatgtggacaagggaactggaaccatcattgttgccaaacctcttgatgcagaacagaagtcaaactacaacctcacagtcgaggctacagatggaaccaccactatcctcactcaggtattcatcaaagtaatagacacaaatgaccatcgtcctcagttttctacatcaaagtatgaagttgttattcctgaagatacagcgccagaaacagaaattttgcaaatcagtgctgtggatcaggatgagaaaaacaaactaatctacactctgcagagcagtagagatccactgagtctcaagaaatttcgtcttgatcctgcaaccggctctctctatacttctgagaaactggatcatgaagctgttcaccagcacaccctcacggtcatggtacgagatcaagatgtgcctgtaaaacgcaactttgcaaggattgtggtcaatgtcagcgacacgaatgaccacgccccgtggttcaccgcttcctcctacaaagggcgggtttatgaatcggcagccgttggctcagttgtgttgcaggtgacggctctggacaaggacaaagggaaaaatgctgaagtgctgtactcgatcgagtcaggaaatattggaaattcttttatgattgatcctgtcttgggctctattaaaactgccaaagaattagatcgaagtaaccaagcggagtatgatttaatggtaaaagctacagataagggcagtccaccaatgagtgaaataacttctgtgcgtatctttgtcacaattgctgacaacgcctctccgaagtttacatcaaaagaatattctgttgaacttagtgaaactgtcagcattgggagtttcgttgggatggttacagcccatagtcaatcatcagtggtgtatgaaataaaagatggaaatacaggtgatgcttttgatattaatccacattctggaactatcatcactcagaaagccctggactttgaaactttgcccatttacacattgataatacaaggaactaacatggctggtttgtccactaatacaacggttctagttcacttgcaggatgagaatgacaacgcgccagtttttatgcaggcagaatatacaggactcattagtgaatcagcctcaattaacagcgtggtcctaacagacaggaatgtcccactggtgattcgagcagctgatgctgataaagactcaaatgctttgcttgtatatcacattgttgaaccatctgtacacacatattttgctattgattctagcactggtgctattcatacagtactaagtctggactatgaagaaacaagtatttttcactttaccgtccaagtgcatgacatgggaaccccacgtttatttgctgagtatgcagcgaatgtaacagtacatgtaattgacattaatgactgcccccctgtgtttgccaagccattatatgaagcatctcttttgttaccaacatacaaaggagtaaaagtcatcacagtaaatgctacagatgctgattcaagtgcattctcacagttgatttactccatcaccgaaggcaacatcggggagaagttttctatggactacaagactggtgctctcactgtccaaaacacaactcagttaagaagccgctacgagctaaccgttagagcttccgatggcagatttgccggccttacctctgtcaaaattaatgtgaaagaaagcaaagaaagtcacctaaagtttacccaggatgtctactctgcggtagtgaaagagaattccaccgaggccgaaacattagctgtcattactgctattgggaatccaatcaatgagcctttgttttatcacatcctcaacccagatcgcagatttaaaataagccgcacttcaggagttctgtcaaccactggcacgcccttcgatcgtgagcagcaggaggcgtttgatgtggttgtagaagtgacagaggaacataagccttctgcagtggcccacgttgtcgtgaaggtcattgtagaagaccaaaatgataatgcgccggtgtttgtcaaccttccctactacgccgttgttaaagtggacactgaggtgggccatgtcattcgctatgtcactgctgtagacagagacagtggcagaaacggggaagtgcattactacctcaaggaacatcatgaacactttcaaattggacccttgggtgaaatttcactgaaaaagcaatttgagcttgacaccttaaataaagaatatcttgttacagtggttgcaaaagatggagggaacccggccttttcagcggaagttatcgttccgatcactgtcatgaataaagccatgcctgtgtttgaaaaacctttctacagtgcagagattgcagagagcatccaggtgcacagccctgtggtccacgtgcaggctaacagcccggaaggcctgaaagtgttctacagcatcacagacggagaccctttcagccagttcactattaacttcaatactggagttatcaatgtcatagctcctctggactttgaggcccacccggcatataagctgagcatacgcgcaactgactccttgacgggcgctcatgctgaagtatttgtggacatcatagtagacgacatcaatgataaccctcctgtgtttgctcagcagtcttatgcggtgaccctgtctgaggcatctgtaattggaacgtctgttgttcaagttagagccaccgattctgattcagaaccaaatagaggaatctcataccagatgtttgggaatcacagcaagagtcatgatcattttcatgtagacagcagcactggcctcatctcactactcagaaccctggattacgagcagtcccggcagcacacgatttttgtgagggcagttgatggtggtatgcccacgctgagcagtgatgtgattgtcacggtggacgttaccgacctcaatgataatccaccactctttgaacaacagatttatgaagccagaattagcgagcacgcccctcatgggcatttcgtgacctgtgtaaaagcctatgatgcagacagttcagacatagacaagttgcagtattccattctgtctggcaatgatcataaacattttgtcattgacagtgcaacagggattatcaccctctcaaacctgcaccggcacgccctgaagccattttacagtcttaacctgtcagtgtctgatggagtttttagaagttccacccaggttcatgtaactgtaattggaggcaatttgcacagtcctgctttccttcagaacgaatatgaagtggaactagctgaaaacgctcccctacataccctggtgatggaggtgaaaactacggatggggattctggtatttatggtcacgttacttaccatattgtaaatgactttgccaaagacagattttacataaatgagagaggacagatatttactttggaaaaacttgatcgagaaaccccggcggagaaagtgatctcagtccgtttaatggctaaggatgctggaggaaaagttgctttctgcaccgtgaatgtcatccttacagatgacaatgacaatgcaccacaatttcgagcaaccaaatacgaagtgaatatcgggtccagtgctgctaaagggacttcagtcgttaaagttcttgcaagtgatgccgatgagggctccaatgccgacatcacctatgccattgaagcagactctgaaagtgtaaaagagaatttggaaattaacaaactgtccggcgtaatcactacaaaggagagcctcattggcttggaaaatgaattcttcactttctttgttagagctgtggataatgggtctccatcaaaagaatctgttgttcttgtctatgttaaaatccttccaccggaaatgcagcttccaaaattttcagaacctttctatacctttacagtgtcagaggacgtgcctattggaacagagatagatctcatccgagcagaacatagtgggactgttctttacagcctggtcaaagggaatactccagaaagcaatagggatgagtcctttgtgattgacagacagagcgggagactgaagttggagaagagtcttgatcatgagacaactaagtggtatcagttttccatactggccaggtgcactcaagatgaccatgagatggtggcttctgtagatgttagtatccaagtgaaagatgcaaatgacaacagcccggtctttgaatctagtccatatgaggcattcattgttgaaaacctgccagggggaagtagagtaattcagatcagggcatctgatgctgactcaggaaccaacggccaagttatgtatagcctggatcagtcacaaagtgtggaagtcattgaatcctttgccattaacatggaaacaggctggattacaactttaaaggaacttgaccatgaaaagagagacaattaccagattaaagtggttgcatcagatcatggtgaaaagatccagctatcctccacagccattgtggatgttaccgtcaccgatgtcaacgatagtccaccacgattcacggccgagatctataaagggactgtgagtgaggatgacccccaaggtggggtgattgccatcttaagtaccacggatgctgattctgaagagatcaacagacaagttacatatttcataacaggaggggatcctttaggacagtttgccgttgaaactatacagaatgaatggaaggtatatgtgaagaaacctctagacagggaaaaaagggacaattaccttcttactatcacggcaactgatggcaccttctcatcaaaagcgatagttgaagtgaaagttctggatgcaaatgacaacagtccagtttgtgaaaagactttatattcagacactattcctgaagacgtccttcctggaaaattgatcatgcagatctctgctacagacgcagacatccgctctaacgctgaaattacttacacgttattgggttcaggtgcagaaaaattcaaactaaatccagacacaggtgaactgaaaacgtcaaccccccttgatcgtgaggagcaagctgtttatcatcttctcgtcagggccacagatggaggaggaagattctgccaagccagtattgtgctcacgctagaagatgtgaacgataacgcccccgaattctctgccgatccttatgccatcaccgtgtttgaaaacacagagccgggaacgctgctgacaagagtgcaggccacagatgccgacgcaggattaaatcggaagattttatactcactgattgactctgctgatgggcagttctccattaacgaattatctggaattattcagttagaaaaacctttggacagagaactccaggcagtatacaccctctctttgaaagctgtggatcaaggcttgccaaggaggctgactgccactggcactgtgattgtatcagttcttgacataaatgacaacccccctgtgtttgagtaccgtgaatatggtgccaccgtgtctgaggacattcttgttggaactgaagttcttcaagtgtatgcagcaagtcgggatattgaagcaaatgcagaaatcacctactcaataataagtggaaatgaacatgggaaattcagcatagattctaaaacaggggccgtatttatcattgagaatctggattatgagagctctcatgagtattacctaacagtagaggccactgatggaggcacgccttcactgagcgacgttgccactgtgaacgttaatgtaacagatatcaacgataatacccctgtgttcagccaagacacctacacgacagtcatcagtgaagatgccgttcttgagcagtctgtcatcacggttatggccgatgatgccgatggaccttccaacagccacatccactactcaattatagatggcaaccaaggaagctcgttcacaattgaccccgtcaggggagaagtcaaagtgaccaaacttctcgaccgagaaacgatttcaggttacacgctcacggttcaagcttctgataatggcagtccacccagagtcaacacgacgaccgtgaacatcgatgtgtccgatgtcaatgacaacgcgcccgtcttctccaggggaaactacagtgtcattatccaggaaaataagccagtgggcttcagcgtgctgcagctggtagtaacagatgaggattcttcccataacggtccacccttcttctttactattgtaactggaaatgatgagaaggcttttgaagttaacccgcaaggagtcctcctgacatcatctgccatcaagaggaaggagaaagatcattacttactgcaggtgaaggtggcagataatggaaagcctcagttgtcatctttgacatacattgacattagggtaattgaggagagcatctatccgcctgcgattttgcccctggagattttcatcacctcttctggagaagaatactcaggtggcgtcattgggaagatccatgccacagaccaggacgtgtatgatactctaacctacagtctcgaccctcagatggacaacctgttctctgtttccagcacagggggcaagctgatagcacacaaaaagctagacatagggcaataccttctcaatgtcagcgtaacagatgggaagttcacgacggtggccgacatcacagtgcatatcagacaagtcacacaggagatgttgaaccacaccatcgcgatccgctttgccaacctcactccggaagaattcgttggtgactactggcgcaacttccagcgagctttacggaacatcctgggtgtgaggaggaacgacatacagattgttagtttgcagtcctctgaacctcacccacatctggacgtcttactttttgtagagaaaccaggtagtgctcagatctcaacaaaacaacttctgcacaagattaactcttccgtgactgacattgaggaaatcattggagttaggatactgaatgtattccagaaactctgcgcgggactggactgcccctggaagttctgcgatgaaaaggtgtctgtggatgaaagtgtgatgtcaacacacagcacagccagactgagttttgtgactccccgccaccacagggcagcggtgtgtctctgcaaagagggaaggtgcccacctgtccaccatggctgtgaagatgatccgtgccctgagggatccgaatgtgtgtctgatccctgggaggagaaacacacctgtgtctgtcccagcggcaggtttggtcagtgcccagggagttcatctatgacactgactggaaacagctacgtgaaataccgtctgacggaaaatgaaaacaaattagagatgaaactgaccatgaggctcagaacatattccacgcatgcggttgtcatgtatgctcgaggaactgactatagcatcttggagattcatcatggaaggctgcagtacaagtttgactgtggaagtggccctggaattgtctctgttcagagcattcaggtcaatgatgggcagtggcacgcagtggccctggaagtgaatggaaactatgctcgcttggttctagaccaagttcatactgcatcgggcacagccccagggactctgaaaaccctgaacctggataactatgtgttttttggtggccacatccgtcagcagggaacaaggcatggaagaagtcctcaagttggtaatggtttcaggggttgtatggactccatttatttgaatgggcaggagctccctttaaacagcaaacccagaagctatgcacacatcgaagagtcggtggatgtatctccaggctgcttcctgacggccacggaagactgcgccagcaacccttgccagaatggaggcgtttgcaatccgtcacctgctggaggttattactgcaaatgcagtgccttgtacatagggacccactgtgagataagcgtcaatccgtgttcctccaagccatgcctctatgggggcacgtgtgttgtcgacaacggaggctttgtttgccagtgtagaggattatatactggtcagaggtgtcagcttagtccatactgcaaagatgaaccctgtaagaatggcggaacatgctttgacagtttggatggcgccgtttgtcagtgtgattcgggttttaggggagaaaggtgtcagagtgatatcgacgagtgctctggaaacccttgcctgcacggggccctctgtgagaacacgcacggctcctatcactgcaactgcagccacgagtacaggggacgtcactgcgaggatgctgcgcccaaccagtatgtgtccacgccgtggaacattgggttggcggaaggaattggaatcgttgtgtttgttgcagggatatttttactggtggtggtgtttgttctctgccgtaagatgattagtcggaaaaagaagcatcaggctgaacctaaagacaagcacctgggacccgctacggctttcttgcaaagaccgtattttgattccaagctaaataagaacatttactcagacataccaccccaggtgcctgtccggcctatttcctacaccccgagtattccaagtgactcaagaaacaatctggaccgaaattccttcgaaggatctgctatcccagagcatcccgaattcagcacttttaaccccgagtctgtgcacgggcaccgaaaagcagtggcggtctgcagcgtggcgccaaacctgcctcccccacccccttcaaactccccttctgacagcgactccatccagaagcctagctgggactttgactatgacacaaaagtggtggatcttgatccctgtctttccaagaagcctctagaggaaaagccttcccagccatacagtgcccgggaaagcctgtctgaagtgcagtctctgagctccttccagtccgaatcgtgcgatgacaatgggtatcactgggatacatcagattggatgccaagcgttcctctgccggacatacaagagttccccaactatgaggtgattgatgagcagacacccctgtactcagcagatccaaacgccatcgatacggactattaccctggaggctacgacatcgaaagtgattttcctccacccccagaagacttccccgcagctgatgagctaccaccgttaccgcccgaattcagcaatcagtttgaatccatccaccctcctagagacatgcctgccgcgggtagcttgggttcttcatcaagaaaccggcagaggttcaacttgaatcagtatttgcccaatttttatcccctcgatatgtctgaacctcaaacaaaaggcactggtgagaatagtacttgtagagaaccccatgccccttacccgccagggtatcaaagacacttcgaggcgcccgctgtcgagagcatgcccatgtctgtgtacgcctccaccgcctcctgctctgacgtgtcagcctgctgcgaagtggagtccgaggtcatgatgagtgactatgagagcggggacgacggccacttcgaagaggtgacgatcccgcccctggattcccagcagcacacggaagtctgactctcaactccccccaaagtgcctgactttagtgaacctagaggtgatgtgagtaatccgcgctgttctttgcagcagtgcttccaagctttttttggtgagccgaatgggcatggctgcgctggatcctgcgcctctggacgtgctagccatttccagtgtcccaactactgtcatcgtgaggttttcatcggctgtgccatttcccaacgtcttttgggatttacatctgtctgtgttaaaataatcaaacgaaaaatcagtcctgtgttgtcagcatgattcatgtatttatatagatttgattattttaattttcctgtctcttttttttgtaaattttatgtacagatttgatttttcatagttttaactagatttccaagatattttgtgcatttgtttcaactgaattttggtggtgtcagtgccattatctagcaccctgatttttttttttttactataaccagggtttcattctgtctttttccactgaagtgtgacattttgttagtacatttcagtgtagtcattcatttctagctgtacataggatgaaggagagatcagatacatgaacatgtcttacatgggttgctgtatttagaattataaacatttttcattattggaaagtgtaacggggaccttctgcatacctgtttagaaccaaaaccaccatgacacagtttttatagtgtctgtatatttgtgatgcaatggtcttgtaaaggtttttaatgaaaactaccattagccagtctttcttactgacaataaattattaataaaatacttgagcttta

SEQ ID NO: 287648 - DNA, 1852 bp, Artificial Sequence
  derived and/or modified sequence
aagggggagggagtggggaaagaggcagcgagtcgccgcagccggcggccgcaactcctcaactcggcggctggctgcctgggcacgtcctgacaaacttggctgctcccgggccctcgttccggccccgcgcactctcttttcgcctgcgtttggtgcttaagtttgccctggtcggaagcctccggagatgcggccgcctgggtcccggcggcacggacgttggcactctggttagggacatgctgaagatcccggggaggcaaagttggtacttcaaacccggctcttaacacatatctacaccgcgaggggatcacggagctgccgaggactttagagcccagggccgaggactcggctagactgattcccgacagttaagcaatggggagacatttggctttgctcctgcttctgctccttctcttccaacattttggagacagtgatggcagccaacgacttgaacagactcctctgcagtttacacacctcgagtacaacgtcaccgtgcaggagaactctgcagctaagacttatgtggggcatcctgtcaagatgggtgtttacattacacatccagcgtgggaagtaaggtacaaaattgtttccggagacagtgaaaacctgttcaaagctgaagagtacattctcggagacttttgctttctaagaataaggaccaaaggaggaaatacagctattcttaatagagaagtgaaggatcactacacattgatagtgaaagcacttgaaaaaaatactaatgtggaggcgcgaacaaaggtcagggtgcaggtgctggatacaaatgacttgagaccgttattctcacccacctcatacagcgtttctttacctgaaaacacagctataaggaccagtatcgcaagagtcagcgccacggatgcagacataggaaccaacggggaattttactacagttttaaagatcgaacagatatgtttgctattcacccaaccagtggtgtgatagtgttaactggtagacttgattacctagagaccaagctctatgagatggaaatcctcgctgcggaccgtggcatgaagttgtatgggagcagtggcatcagcagcatggccaagctaacggtgcacatcgaacaggccaatgaatgtgctccggtgataacagcagtgacattgtcaccatcagaactggacagggacccagcatatgcaattgtgacagtggatgactgcgatcagggtgccaatggtgacatagcatctttaagcatcgtggcaggtgaccttctccagcagtttagaacagtgaggtcctttccagggagtaaggagtataaagtcaaagccatcggtggcattgattgggacagtcatcctttcggctacaatctcacactacaggctaaagataaaggaactccgccccagttctcttctgttaaagtcattcacgtgacttctccacagttcaaagccgggccagtcaagtttgaaaaggatgtttacagagcagaaataagtgaatttgctcctcccaacacacctgtggtcatggtaaaggccattcctgcttattcccatttgaggtatgtttttaaaagtacacctggaaaagctaaattcagtttaaattacaacactggtctcatttctattttagaaccagttaaaagacagcaggcagcccattttgaacttgaagtaacaacaagtgacagaaaagcgtccaccaaggtcttggtgaaagtcttaggtgcaaatagcaatccccctgaatttacccagacagcgtacaaagctgcttttgatgagaacgtgcccattggtactactgtcatgagcctgagtgccgtag

SEQ ID NO: 287649 - DNA, 13773 bp, Artificial Sequence
  derived and/or modified sequence
atgggccgccacctggccctgctgctgctgctgctgctgctcttccagcactttggagacagtgatggcagccagaggctggagcagacccccctgcagttcacccacctggagtacaacgtgacagtgcaggagaacagcgctgccaagacctacgtgggccaccctgtgaagatgggcgtgtacatcacccacccagcctgggaggtgcgctacaagatcgtgtctggggacagcgagaacctcttcaaggccgaggagtacatcctgggggacttctgcttcctgcgcatccgcaccaagggcggcaacacagccatcctgaaccgggaggtgaaggaccactacaccctgattgtgaaggccctggagaagaacaccaacgtggaggcccggaccaaggtgcgggtgcaggtgctggacaccaatgacctgcggcccctcttcagccccaccagctacagcgtgtccctgcctgagaacacagccatccgcaccagcatcgcccgggtgtctgccacagatgctgacatcggcaccaatggagagttctactacagcttcaaggacagaacagacatgtttgccatccaccccaccagcggggtcatcgtgctgaccggccgcctggactacctggagaccaagctgtatgagatggagatcctggccgctgaccggggcatgaagctgtatggcagcagcggcatcagctccatggccaagctgactgtgcacatcgagcaggccaatgaatgtgcccctgtgatcacagctgtgaccctgagccccagcgagctggaccgggaccctgcctatgccatcgtgacagtggatgactgtgaccagggcgccaacggggacatcgccagcctgagcatcgtggccggggacctgctgcagcagttcagaacagtgcgctccttccctggcagcaaggagtacaaggtgaaggccatcggcggcatcgactgggacagccaccccttcggctacaacctgaccctgcaggccaaggacaagggcaccccaccccagttcagctctgtgaaggtgatccacgtgaccagcccccagttcaaggccggccctgtgaagtttgagaaggatgtgtacagagctgagatcagcgagtttgccccacccaacacccctgtggtgatggtgaaggccatcccagcctacagccacctgcgctacgtgttcaagagcacccctgggaaggccaagttcagcctgaactacaacacaggcctcatcagcatcctggagcctgtgaagaggcagcaggccgcccactttgagctggaggtgaccaccagtgacaggaaggccagcaccaaggtgctggtgaaggtgctgggcgccaacagcaaccccccagagttcacccagacagcctacaaggccgcctttgatgaaaatgtgcccatcggcaccaccgtgatgagcctgtctgctgtggaccctgatgaaggagaaaatggctacgtgacctacagcatcgccaacctgaaccacgtgccctttgccatcgaccacttcaccggggctgtgtccaccagcgagaacctggactatgagctgatgccccgggtgtacaccctgcgcatccgggccagtgactggggcctgccctaccgccgggaggtggaggtgctggccaccatcaccctgaacaacctgaatgacaacacccccctgtttgagaagatcaactgtgagggcaccatcccccgggacctgggcgtgggggagcagatcaccaccgtgtctgccattgatgctgatgagctgcagctggtgcagtaccagatcgaggccggaaatgagctggacttcttcagcctgaaccccaacagcggcgtgctgagcctgaagaggagcctgatggatggcctgggcgccaaggtgtccttccacagcctgcgcatcacagccacagatggagaaaattttgccacccccctgtacatcaacatcaccgtggccgccagccacaagctggtgaacctgcagtgtgaggagactggagtggccaagatgctggccgagaagctgctgcaggccaacaagctgcacaaccagggcgaggtggaggacatcttctttgacagccacagcgtgaatgcccacatcccccagttccgcagcaccctgcccaccggcatccaggtgaaggagaaccagcctgtgggcagcagcgtcatcttcatgaacagcacagacctggacaccggcttcaacgggaagctggtgtatgctgtgtctggaggaaatgaagacagctgcttcatgattgacatggagaccggcatgctgaagatcctgagccccctggaccgggagaccacagacaagtacaccctgaacatcaccgtgtatgacctgggcatcccccagaaggccgcctggaggctgctgcacgtggtggtggtggatgccaatgacaaccccccagagttcctgcaggagagctactttgtggaggtgtctgaggacaaggaggtgcacagcgagatcatccaggtggaggccacagacaaggacctgggccccaacggccacgtgacctacagcatcgtgacagacacagacaccttcagcattgacagcgtgactggagtggtgaacatcgcccggcccctggaccgggagctgcagcacgagcacagcctgaagattgaggcccgggaccaggcccgggaggagccccagctgttcagcacagtggtggtgaaggtgtccctggaggatgtgaatgacaacccccccaccttcatcccccccaactacagagtgaaggtgcgggaggacctgcctgagggcaccgtcatcatgtggctggaggcccatgaccctgacctgggccagagcggccaggtgcgctacagcctgctggaccatggagagggcaactttgatgtggacaagctgagcggggctgtgagaattgtgcagcagctggactttgagaagaagcaggtgtacaacctgactgtgcgggccaaggacaagggcaagcctgtgtccctgagcagcacctgctacgtggaggtggaggtggtggatgtgaatgaaaacctgcacccccctgtgttcagcagctttgtggagaagggcaccgtgaaggaggatgcccctgtgggcagcctggtgatgacagtgtctgcccatgatgaagatgccaggagagatggagagatccgctacagcatcagagatggcagcggcgtgggcgtcttcaagatcggggaggagaccggggtgattgagaccagtgaccggctggaccgggagagcaccagccactactggctgactgtgtttgccacagaccagggcgtggtgcccctgagcagcttcatcgagatctacatcgaggtggaggatgtgaatgacaatgccccccagaccagcgagcctgtgtactacccagagatcatggagaacagccccaaggatgtgtctgtggtgcagatcgaggcctttgatcctgacagcagcagcaatgacaagctgatgtacaagatcaccagcggcaacccccagggcttcttcagcatccaccccaagacaggcctcatcaccaccaccagcaggaagctggaccgggagcagcaggatgagcacatcctggaggtgacagtgacagacaatggcagcccccccaagagcaccatcgcccgggtcatcgtgaagatcctggatgaaaatgacaacaagccccagttcctgcagaagttctacaagatccggctgcctgagcgggagaagccagaccgggagagaaatgcccggcgggagcccctgtaccacgtgattgccacagacaaggatgagggccccaatgctgagatctcctacagcattgaagatggaaatgaacatggcaagttcttcatcgagcccaagacaggagtggtgagcagcaagcgcttctctgctgctggggagtatgacatcctgagcatcaaggctgtggacaatggccggccccagaagagcagcaccacccggctgcacatcgagtggatcagcaagcccaagcccagcctggagcccatcagctttgaggagagcttcttcaccttcaccgtgatggagagtgaccctgtggcccacatgattggagtcatctctgtggagcccccaggcatccccctgtggtttgacatcaccggcggcaactatgacagccactttgatgtggacaagggcaccggcaccatcatcgtggccaagcccctggatgctgagcagaagagcaactacaacctgactgtggaggccacagatggcaccaccaccatcctgacccaggtgttcatcaaggtgattgacaccaatgaccaccggccccagttcagcaccagcaaatatgaggtggtgattcctgaggacacagcccctgagacagagatcctgcagatctctgctgtggaccaggatgagaagaacaagctgatctacaccctgcagagcagccgggaccccctgagcctgaagaagttccggctggaccctgccaccggcagcctgtacaccagcgagaagctggaccacgaggccgtgcctgcccacctgactgtgatggtgcgggaccaggatgtgcctgtgaagaggaactttgccagaattgtggtgaatgtgtctgacaccaatgaccacgccccctggttcaccgccagcagctacaagggccgggtgtatgaatctgctgctgtgggctctgtggtgctgcaggtgacagccctggacaaggacaagggcaagaatgctgaggtgctgtacagcattgagagcggcacctttggaaacatcggcaacagcttcatgattgatcctgtgctgggcagcatcaagacagccaaggagctggacaggagcaaccaggccgagtatgacctgatggtgaaggccacagacaagggcagcccccccatgtctgagatcacctctgtgcgcatctttgtgaccatcgctgacaatgccagccccaagttcaccagcaaggagtacagcgtggagctgtctgaaacagtgtccatcggcagctttgtgggcatggtgacagcccacagccagagctctgtggtgtatgagatcaaggatggcaacacaggagatgcctttgacatcaacccccacagcggcaccatcatcacccagaaggccctggactttgagaccctgcccatctacaccctcatcatccagggcaccaacatggccggcctgagcaccaacaccaccgtgctggtgcacctgcaggatgaaaatgacaatgcccctgtgttcatgcaggccgagtacacaggcctcatcagcgagagcgccagcatcaacagcgtggtgctgacagacagaaatgtgcccctggtgatccgggctgctgatgctgacaaggacagcaatgccctgctggtgtaccacatcgtggagcccagcgtgcacacctactttgccatcgacagcagcactggagccatccacacagtgctgagcctggactatgaggagaccagcatcttccacttcaccgtgcaggtgcatgacatgggcaccccccggctgtttgctgaatatgctgccaacgtgacagtgcacgtgattgacatcaatgactgcccccctgtgtttgccaagcccctgtatgaggccagcctgctgctgcccacctacaagggcgtgaaggtgatcaccgtgaatgccacagatgctgacagcagcgccttcagccagctgatctacagcatcacagagggcaacattggagagaagttctccatggactacaagacaggagccctgactgtgcagaacaccacccagctgcggagccgctatgagctgactgtgcgggccagtgatggccgctttgctggcctgacctctgtgaagatcaacgtgaaggagagcaaggagagccacctgaagttcacccaggatgtgtacagcgctgtggtgaaggagaacagcacagaagctgagaccctggccgtcatcacagccatcggcaaccccatcaatgagcccctcttctaccacatcctgaacccagaccggcgcttcaagatcagcaggaccagcggcgtgctgagcaccaccggcaccccatttgaccgggagcagcaggaggcctttgatgtggtggtggaggtgacagaggagcacaagcccagcgctgtggcccacgtggtggtgaaggtgattgtggaggaccagaatgacaatgcccctgtgtttgtgaacctgccctactatgctgtggtgaaggtggacacagaggtgggccacgtgatccgctacgtgacagctgtggaccgggacagcggcagaaatggagaggtgcactactacctgaaggagcaccacgagcacttccagatcggccccctgggggagatcagcctgaagaagcagtttgagctggacaccctgaacaaggagtacctggtgacagtggtggccaaggatggcggcaacccagccttctctgctgaggtgattgtgcccatcaccgtgatgaacaaggccatgcctgtgtttgagaagcccttctacagcgctgagattgctgagagcatccaggtgcacagccctgtggtgcacgtgcaggccaacagccctgagggcctgaaggtgttctacagcatcacagatggagaccccttcagccagttcaccatcaacttcaacacaggagtcatcaacgtgattgcccccctggactttgaggcccacccagcctacaagctgagcatccgggccacagacagcctgactggagcccatgctgaggtgtttgtggacatcatcgtggatgacatcaatgacaacccccctgtgtttgcccagcagagctatgctgtgaccctgtctgaggccagcgtcatcggcacctctgtggtgcaggtgcgggccacagacagcgacagcgagcccaacagaggcatctcctaccagatgtttggaaaccacagcaagagccatgaccacttccacgtggacagcagcacaggcctcatcagcctgctgcggaccctggactatgagcagagccggcagcacaccatctttgtgcgggctgtggatggcggcatgcccaccctgagcagtgatgtgattgtgacagtggatgtgacagacctgaatgacaacccccccctgtttgagcagcagatctatgaggcccgcatcagcgagcacgcccctcatggccactttgtgacctgtgtgaaggcctatgatgctgacagcagtgacatcgacaagctgcagtacagcatcctgtctggaaatgaccacaagcacttcgtcatcgacagcgccaccggcatcatcaccctgagcaacctgcacagacatgccctgaagcccttctacagcctgaacctgtctgtgtctgatggagtcttccgcagcagcacccaggtgcacgtgacagtgattggaggcaacctgcacagccctgccttcctgcagaatgaatatgaggtggagctggctgaaaatgcccccctgcacaccctggtgatggaggtgaagaccacagatggagacagcggcatctacggccacgtgacctaccacatcgtgaatgactttgccaaggaccgcttctacatcaatgaaagaggccagatcttcaccctggagaagctggaccgggagaccccagctgagaaggtgatctctgtgcggctgatggccaaggatgctgggggcaaggtggccttctgcaccgtgaatgtcatcctgacagatgacaatgacaatgccccccagttccgggccaccaagtatgaggtgaacatcggcagcagcgctgccaagggcacctctgtggtgaaggtgctggccagtgatgctgatgagggcagcaatgctgacatcacctacgccattgaagctgacagcgagagcgtgaaggagaacctggagatcaacaagctgagcggggtcatcaccaccaaggagagcctcatcggcctggagaatgagttcttcaccttctttgtgcgggctgtggacaatggcagccccagcaaggagagcgtggtgctggtgtatgtgaagatcctgcccccagagatgcagctgcccaagttcagcgagcccttctacaccttcaccgtgtctgaagatgtgcccatcggcacagaaattgacctgatccgggcagagcacagcggcaccgtgctgtacagcctggtgaagggcaacaccccagagagcaacagagatgagagctttgtgattgaccggcagagcggccgcctgaagctggagaagagcctggaccacgagaccaccaagtggtaccagttcagcatcctggcccgctgcacccaggatgaccacgagatggtggcctctgtggatgtgtccatccaggtgaaggatgccaatgacaacagccctgtgtttgagagcagcccctatgaggccttcatcgtggagaacctgcccggcggcagcagggtcatccagatccgggccagtgatgctgacagcggcaccaacggccaggtgatgtacagcctggaccagagccagagcgtggaggtgattgagagctttgccatcaacatggagaccggctggatcaccaccctgaaggagctggaccacgagaagagggacaactaccagatcaaggtggtggccagtgaccacggggagaagatccagctgagcagcacagccatcgtggatgtgacagtgacagatgtgaatgacagccccccacgcttcaccgctgagatctacaagggcaccgtgtctgaagatgacccccagggcggcgtgattgccatcctgagcaccacagatgctgacagcgaggagatcaaccggcaggtgacctacttcatcactggaggagaccccctgggccagtttgctgtggagaccatccagaatgagtggaaggtgtatgtgaagaagcccctggaccgggagaagagggacaactacctgctgaccatcacagccacagatggcaccttcagcagcaaggccatcgtggaggtgaaggtgctggatgccaatgacaacagccctgtgtgtgagaagaccctgtacagcgacaccatcccagaagatgtgctgcccgggaagctgatcatgcagatcagcgccacagatgctgacatccgcagcaatgctgagatcacctacaccctgctgggcagcggggctgagaagttcaagctgaacccagacaccggggagctgaagaccagcacccccctggaccgggaggagcaggccgtgtaccacctgctggtgcgggccacagatggcggcggccgcttctgccaggccagcatcgtgctgaccctggaggatgtgaatgacaatgcccctgagttctctgctgacccctatgccatcaccgtgtttgagaacacagagcccggcaccctgctgaccagggtgcaggccacagatgctgatgctggcctgaacaggaagatcctgtacagcctgattgattctgcagatggccagttcagcatcaatgagctgagcggcatcatccagctggagaagcccctggaccgggagctgcaggccgtgtacaccctgagcctgaaggctgtggaccagggcctgccccggcggctgacagccactggaacagtgattgtgtctgtgctggacatcaatgacaacccccctgtgtttgagtaccgggagtatggagccaccgtgtctgaggacatcctggtgggcacagaggtgctgcaggtgtatgctgccagccgggacatcgaggccaatgctgagatcacctacagcatcatctctggaaatgaacatggcaagttcagcattgacagcaagacaggagctgtgttcatcatcgagaacctggactatgagagcagccatgagtactacctgactgtggaggccacagatggcggcacccccagcctgagtgatgtggccaccgtgaatgtgaatgtgacagacatcaatgacaacacccctgtgttcagccaggacacctacaccaccgtcatcagtgaagatgctgtgctggagcagagcgtcatcaccgtgatggctgatgatgctgatggccccagcaacagccacatccactacagcatcattgatggcaaccagggcagcagcttcaccattgatcctgtgcggggggaggtgaaggtgaccaagctgctggaccgggagaccatcagcggctacaccctgactgtgcaggccagtgacaatggcagccccccccgggtgaacaccaccaccgtgaacattgatgtgtctgatgtgaatgacaatgcccctgtgttcagccggggcaactacagcgtcatcatccaggagaacaagcctgtgggcttctctgtgctgcagctggtggtgacagatgaggacagcagccacaacggcccccccttcttcttcaccatcgtgactggaaatgatgagaaggcctttgaggtgaacccccagggcgtgctgctgaccagcagcgccatcaagaggaaggagaaggaccactacctgctgcaggtgaaggtggccgacaacgggaagccccagctgagcagcctgacctacatcgacatccgggtcatcgaggagagcatctaccccccagccatcctgcccctggagatcttcatcaccagcagtggagaggagtacagcggcggcgtcatcggcaagatccacgccacagaccaggatgtgtatgacaccctgacctacagcctggacccccagatggacaacctcttctctgtgagcagcactggaggcaagctgattgcccacaagaagctggacatcggccagtacctgctgaatgtgtctgtgacagatggcaagttcaccaccgtggccgacatcaccgtgcacatccggcaggtgacccaggagatgctgaaccacaccatcgccatccgctttgccaacctgaccccagaggagtttgtgggggactactggaggaacttccagagggccctgaggaacatcctgggcgtgagaagaaatgacatccagatcgtgtccctgcagagcagcgagccccacccccacctggatgtgctgctgtttgtggagaagccaggcagcgcccagatcagcaccaagcagctgctgcacaagatcaacagctctgtgacagacatcgaggagatcatcggcgtgcgcatcctgaatgtgttccagaagctgtgtgccggcctggactgcccctggaagttctgtgatgagaaggtgtctgtggatgaatctgtgatgagcacccacagcacagcccggctgagctttgtgacccccaggcaccacagagctgctgtgtgcctgtgcaaggagggccgctgcccccctgtgcaccacggctgtgaagatgacccctgcccagagggctctgaatgtgtgtctgacccctgggaggagaagcacacctgtgtgtgccccagcggccgcttcggccagtgccccggcagcagctccatgaccctgactggaaacagctatgtgaagtaccgcctgacagaaaatgaaaacaagctggagatgaagctgaccatgaggctgcggacctacagcacccatgctgtggtgatgtatgcccggggcacagactacagcatcctggagatccaccacggccgcctgcagtacaagtttgactgtggcagcggccctggcatcgtgtctgtgcagagcatccaggtgaatgatggccagtggcatgctgtggccctggaggtgaatggaaattatgcccggctggtgctggaccaggtgcacacagccagcggcacagcccctggcaccctgaagaccctgaacctggacaactacgtgttcttcggcggccacatccggcagcagggcaccaggcatggccgcagcccccaggtgggcaatggcttccggggctgcatggacagcatctacctgaatggccaggagctgcccctgaacagcaagcccaggagctatgcccacatcgaggagagcgtggatgtgtccccaggctgcttcctgacagccacagaggactgtgccagcaacccctgccagaatggaggagtgtgcaaccccagccctgctgggggctactactgcaagtgcagcgccctgtacatcggcacccactgtgagatctctgtgaacccctgcagcagcaagccctgcctgtatggaggcacctgtgtggtggacaatggaggctttgtgtgccagtgccggggcctgtacacaggccagcgctgccagctgagcccctactgcaaggatgagccctgcaagaatggaggcacctgctttgacagcctggatggagctgtgtgccagtgtgacagcggcttccggggggagcgctgccagagcgacattgatgagtgcagcggcaacccctgcctgcacggggccctgtgtgagaacacccacggcagctaccactgcaactgcagccatgagtaccggggccgccactgtgaagatgctgcccccaaccagtatgtgtccaccccctggaacatcggcctggccgagggcattggaattgtggtgtttgtggccggcatcttcctgctggtggtggtgtttgtgctgtgcaggaagatgatcagcaggaagaagaagcaccaggccgagcccaaggacaagcacctgggccctgccacagccttcctgcagaggccctactttgacagcaagctgaacaagaacatctacagcgacatccccccccaggtgcctgtgcggcccatctcctacacccccagcatccccagcgacagcaggaacaacctggacaggaacagctttgagggcagcgccatccctgagcaccctgagttcagcaccttcaaccctgagagcgtgcacggccacaggaaggctgtggccgtgtgcagcgtggcccccaacctgcccccacctccacccagcaacagccccagcgacagcgacagcatccagaagcccagctgggactttgattatgacaccaaggtggtggacctggacccctgcctgagcaagaagcccctggaggagaagcccagccagccctacagcgcccgggagagcctgtctgaggtgcagagcctgagcagcttccagagcgagagctgtgatgacaatggctaccactgggacaccagtgactggatgcccagcgtgcccctgcctgacatccaggagttccccaactatgaggtgattgatgagcagacccccctgtacagcgctgaccccaatgccatcgacacagactactacccaggcggctatgacattgaaagtgacttccccccacctcctgaggacttccctgctgctgatgagctgccccccctgcccccagagttcagcaaccagtttgagagcatccaccccccccgggacatgcctgctgctggcagcctgggcagcagcagcaggaaccggcagcgcttcaacctgaaccagtacctgcccaacttctaccccctggacatgtctgagccccagaccaagggcaccggggagaacagcacctgccgggagccccacgccccctacccacctggctaccagaggcactttgaggccccagctgtggagagcatgcccatgtctgtgtatgccagcacagccagctgcagtgatgtgtctgcctgctgtgaggtggagagcgaggtgatgatgtctgactatgagagcggagatgatggccactttgaggaggtgaccatcccccccctggacagccagcagcacacagaggtgtag

SEQ ID NO: 287650 - DNA, 13767 bp, Artificial Sequence
  derived and/or modified sequence
atgggccgccacctggccctgctgctgctgctgctgctgctcttccagcactttggagacagtgatggcagccagaggctggagcagacccccctgcagttcacccacctggagtacaacgtgacagtgcaggagaacagcgctgccaagacctacgtgggccaccctgtgaagatgggcgtgtacatcacccacccagcctgggaggtgcgctacaagatcgtgtctggggacagcgagaacctcttcaaggccgaggagtacatcctgggggacttctgcttcctgcgcatccgcaccaagggcggcaacacagccatcctgaaccgggaggtgaaggaccactacaccctgattgtgaaggccctggagaagaacaccaacgtggaggcccggaccaaggtgcgggtgcaggtgctggacaccaatgacctgcggcccctcttcagccccaccagctacagcgtgtccctgcctgagaacacagccatccgcaccagcatcgcccgggtgtctgccacagatgctgacatcggcaccaatggagagttctactacagcttcaaggacagaacagacatgtttgccatccaccccaccagcggggtcatcgtgctgaccggccgcctggactacctggagaccaagctgtatgagatggagatcctggccgctgaccggggcatgaagctgtatggcagcagcggcatcagctccatggccaagctgactgtgcacatcgagcaggccaatgaatgtgcccctgtgatcacagctgtgaccctgagccccagcgagctggaccgggaccctgcctatgccatcgtgacagtggatgactgtgaccagggcgccaacggggacatcgccagcctgagcatcgtggccggggacctgctgcagcagttcagaacagtgcgctccttccctggcagcaaggagtacaaggtgaaggccatcggcggcatcgactgggacagccaccccttcggctacaacctgaccctgcaggccaaggacaagggcaccccaccccagttcagctctgtgaaggtgatccacgtgaccagcccccagttcaaggccggccctgtgaagtttgagaaggatgtgtacagagctgagatcagcgagtttgccccacccaacacccctgtggtgatggtgaaggccatcccagcctacagccacctgcgctacgtgttcaagagcacccctgggaaggccaagttcagcctgaactacaacacaggcctcatcagcatcctggagcctgtgaagaggcagcaggccgcccactttgagctggaggtgaccaccagtgacaggaaggccagcaccaaggtgctggtgaaggtgctgggcgccaacagcaaccccccagagttcacccagacagcctacaaggccgcctttgatgaaaatgtgcccatcggcaccaccgtgatgagcctgtctgctgtggaccctgatgaaggagaaaatggctacgtgacctacagcatcgccaacctgaaccacgtgccctttgccatcgaccacttcaccggggctgtgtccaccagcgagaacctggactatgagctgatgccccgggtgtacaccctgcgcatccgggccagtgactggggcctgccctaccgccgggaggtggaggtgctggccaccatcaccctgaacaacctgaatgacaacacccccctgtttgagaagatcaactgtgagggcaccatcccccgggacctgggcgtgggggagcagatcaccaccgtgtctgccattgatgctgatgagctgcagctggtgcagtaccagatcgaggccggaaatgagctggacttcttcagcctgaaccccaacagcggcgtgctgagcctgaagaggagcctgatggatggcctgggcgccaaggtgtccttccacagcctgcgcatcacagccacagatggagaaaattttgccacccccctgtacatcaacatcaccgtggccgccagccacaagctggtgaacctgcagtgtgaggagactggagtggccaagatgctggccgagaagctgctgcaggccaacaagctgcacaaccagggcgaggtggaggacatcttctttgacagccacagcgtgaatgcccacatcccccagttccgcagcaccctgcccaccggcatccaggtgaaggagaaccagcctgtgggcagcagcgtcatcttcatgaacagcacagacctggacaccggcttcaacgggaagctggtgtatgctgtgtctggaggaaatgaagacagctgcttcatgattgacatggagaccggcatgctgaagatcctgagccccctggaccgggagaccacagacaagtacaccctgaacatcaccgtgtatgacctgggcatcccccagaaggccgcctggaggctgctgcacgtggtggtggtggatgccaatgacaaccccccagagttcctgcaggagagctactttgtggaggtgtctgaggacaaggaggtgcacagcgagatcatccaggtggaggccacagacaaggacctgggccccaacggccacgtgacctacagcatcgtgacagacacagacaccttcagcattgacagcgtgactggagtggtgaacatcgcccggcccctggaccgggagctgcagcacgagcacagcctgaagattgaggcccgggaccaggcccgggaggagccccagctgttcagcacagtggtggtgaaggtgtccctggaggatgtgaatgacaacccccccaccttcatcccccccaactacagagtgaaggtgcgggaggacctgcctgagggcaccgtcatcatgtggctggaggcccatgaccctgacctgggccagagcggccaggtgcgctacagcctgctggaccatggagagggcaactttgatgtggacaagctgagcggggctgtgagaattgtgcagcagctggactttgagaagaagcaggtgtacaacctgactgtgcgggccaaggacaagggcaagcctgtgtccctgagcagcacctgctacgtggaggtggaggtggtggatgtgaatgaaaacctgcacccccctgtgttcagcagctttgtggagaagggcaccgtgaaggaggatgcccctgtgggcagcctggtgatgacagtgtctgcccatgatgaagatgccaggagagatggagagatccgctacagcatcagagatggcagcggcgtgggcgtcttcaagatcggggaggagaccggggtgattgagaccagtgaccggctggaccgggagagcaccagccactactggctgactgtgtttgccacagaccagggcgtggtgcccctgagcagcttcatcgagatctacatcgaggtggaggatgtgaatgacaatgccccccagaccagcgagcctgtgtactacccagagatcatggagaacagccccaaggatgtgtctgtggtgcagatcgaggcctttgatcctgacagcagcagcaatgacaagctgatgtacaagatcaccagcggcaacccccagggcttcttcagcatccaccccaagacaggcctcatcaccaccaccagcaggaagctggaccgggagcagcaggatgagcacatcctggaggtgacagtgacagacaatggcagcccccccaagagcaccatcgcccgggtcatcgtgaagatcctggatgaaaatgacaacaagccccagttcctgcagaagttctacaagatccggctgcctgagcgggagaagccagaccgggagagaaatgcccggcgggagcccctgtaccacgtgattgccacagacaaggatgagggccccaatgctgagatctcctacagcattgaagatggaaatgaacatggcaagttcttcatcgagcccaagacaggagtggtgagcagcaagcgcttctctgctgctggggagtatgacatcctgagcatcaaggctgtggacaatggccggccccagaagagcagcaccacccggctgcacatcgagtggatcagcaagcccaagcccagcctggagcccatcagctttgaggagagcttcttcaccttcaccgtgatggagagtgaccctgtggcccacatgattggagtcatctctgtggagcccccaggcatccccctgtggtttgacatcaccggcggcaactatgacagccactttgatgtggacaagggcaccggcaccatcatcgtggccaagcccctggatgctgagcagaagagcaactacaacctgactgtggaggccacagatggcaccaccaccatcctgacccaggtgttcatcaaggtgattgacaccaatgaccaccggccccagttcagcaccagcaaatatgaggtggtgattcctgaggacacagcccctgagacagagatcctgcagatctctgctgtggaccaggatgagaagaacaagctgatctacaccctgcagagcagccgggaccccctgagcctgaagaagttccggctggaccctgccaccggcagcctgtacaccagcgagaagctggaccacgaggccgtgcaccagcacaccctgactgtgatggtgcgggaccaggatgtgcctgtgaagaggaactttgcccgcatcgtggtgaatgtgtctgacaccaatgaccacgccccctggttcaccgccagcagctacaagggccgggtgtatgagagcgctgctgtgggctctgtggtgctgcaggtgacagccctggacaaggacaagggcaagaatgctgaggtgctgtacagcattgaaagtggcaacatcggcaacagcttcatgattgatcctgtgctgggcagcatcaagacagccaaggagctggacaggagcaaccaggccgagtatgacctgatggtgaaggccacagacaagggcagcccccccatgtctgagatcacctctgtgcgcatctttgtgaccatcgctgacaatgccagccccaagttcaccagcaaggagtacagcgtggagctgtctgaaacagtgtccatcggcagctttgtgggcatggtgacagcccacagccagagctctgtggtgtatgagatcaaggatggcaacacaggagatgcctttgacatcaacccccacagcggcaccatcatcacccagaaggccctggactttgagaccctgcccatctacaccctcatcatccagggcaccaacatggccggcctgagcaccaacaccaccgtgctggtgcacctgcaggatgaaaatgacaatgcccctgtgttcatgcaggccgagtacacaggcctcatcagcgagagcgccagcatcaacagcgtggtgctgacagacagaaatgtgcccctggtgatccgggctgctgatgctgacaaggacagcaatgccctgctggtgtaccacatcgtggagcccagcgtgcacacctactttgccatcgacagcagcactggagccatccacacagtgctgagcctggactatgaggagaccagcatcttccacttcaccgtgcaggtgcatgacatgggcaccccccggctgtttgctgaatatgctgccaacgtgacagtgcacgtgattgacatcaatgactgcccccctgtgtttgccaagcccctgtatgaggccagcctgctgctgcccacctacaagggcgtgaaggtgatcaccgtgaatgccacagatgctgacagcagcgccttcagccagctgatctacagcatcacagagggcaacattggagagaagttctccatggactacaagacaggagccctgactgtgcagaacaccacccagctgcggagccgctatgagctgactgtgcgggccagtgatggccgctttgctggcctgacctctgtgaagatcaacgtgaaggagagcaaggagagccacctgaagttcacccaggatgtgtacagcgctgtggtgaaggagaacagcacagaagctgagaccctggccgtcatcacagccatcggcaaccccatcaatgagcccctcttctaccacatcctgaacccagaccggcgcttcaagatcagcaggaccagcggcgtgctgagcaccaccggcaccccatttgaccgggagcagcaggaggcctttgatgtggtggtggaggtgacagaggagcacaagcccagcgctgtggcccacgtggtggtgaaggtgattgtggaggaccagaatgacaatgcccctgtgtttgtgaacctgccctactatgctgtggtgaaggtggacacagaggtgggccacgtgatccgctacgtgacagctgtggaccgggacagcggcagaaatggagaggtgcactactacctgaaggagcaccacgagcacttccagatcggccccctgggggagatcagcctgaagaagcagtttgagctggacaccctgaacaaggagtacctggtgacagtggtggccaaggatggcggcaacccagccttctctgctgaggtgattgtgcccatcaccgtgatgaacaaggccatgcctgtgtttgagaagcccttctacagcgctgagattgctgagagcatccaggtgcacagccctgtggtgcacgtgcaggccaacagccctgagggcctgaaggtgttctacagcatcacagatggagaccccttcagccagttcaccatcaacttcaacacaggagtcatcaacgtgattgcccccctggactttgaggcccacccagcctacaagctgagcatccgggccacagacagcctgactggagcccatgctgaggtgtttgtggacatcatcgtggatgacatcaatgacaacccccctgtgtttgcccagcagagctatgctgtgaccctgtctgaggccagcgtcatcggcacctctgtggtgcaggtgcgggccacagacagcgacagcgagcccaacagaggcatctcctaccagatgtttggaaaccacagcaagagccatgaccacttccacgtggacagcagcacaggcctcatcagcctgctgcggaccctggactatgagcagagccggcagcacaccatctttgtgcgggctgtggatggcggcatgcccaccctgagcagtgatgtgattgtgacagtggatgtgacagacctgaatgacaacccccccctgtttgagcagcagatctatgaggcccgcatcagcgagcacgcccctcatggccactttgtgacctgtgtgaaggcctatgatgctgacagcagtgacatcgacaagctgcagtacagcatcctgtctggaaatgaccacaagcacttcgtcatcgacagcgccaccggcatcatcaccctgagcaacctgcacagacatgccctgaagcccttctacagcctgaacctgtctgtgtctgatggagtcttccgcagcagcacccaggtgcacgtgacagtgattggaggcaacctgcacagccctgccttcctgcagaatgaatatgaggtggagctggctgaaaatgcccccctgcacaccctggtgatggaggtgaagaccacagatggagacagcggcatctacggccacgtgacctaccacatcgtgaatgactttgccaaggaccgcttctacatcaatgaaagaggccagatcttcaccctggagaagctggaccgggagaccccagctgagaaggtgatctctgtgcggctgatggccaaggatgctgggggcaaggtggccttctgcaccgtgaatgtcatcctgacagatgacaatgacaatgccccccagttccgggccaccaagtatgaggtgaacatcggcagcagcgctgccaagggcacctctgtggtgaaggtgctggccagtgatgctgatgagggcagcaatgctgacatcacctacgccattgaagctgacagcgagagcgtgaaggagaacctggagatcaacaagctgagcggggtcatcaccaccaaggagagcctcatcggcctggagaatgagttcttcaccttctttgtgcgggctgtggacaatggcagccccagcaaggagagcgtggtgctggtgtatgtgaagatcctgcccccagagatgcagctgcccaagttcagcgagcccttctacaccttcaccgtgtctgaagatgtgcccatcggcacagaaattgacctgatccgggcagagcacagcggcaccgtgctgtacagcctggtgaagggcaacaccccagagagcaacagagatgagagctttgtgattgaccggcagagcggccgcctgaagctggagaagagcctggaccacgagaccaccaagtggtaccagttcagcatcctggcccgctgcacccaggatgaccacgagatggtggcctctgtggatgtgtccatccaggtgaaggatgccaatgacaacagccctgtgtttgagagcagcccctatgaggccttcatcgtggagaacctgcccggcggcagcagggtcatccagatccgggccagtgatgctgacagcggcaccaacggccaggtgatgtacagcctggaccagagccagagcgtggaggtgattgagagctttgccatcaacatggagaccggctggatcaccaccctgaaggagctggaccacgagaagagggacaactaccagatcaaggtggtggccagtgaccacggggagaagatccagctgagcagcacagccatcgtggatgtgacagtgacagatgtgaatgacagccccccacgcttcaccgctgagatctacaagggcaccgtgtctgaagatgacccccagggcggcgtgattgccatcctgagcaccacagatgctgacagcgaggagatcaaccggcaggtgacctacttcatcactggaggagaccccctgggccagtttgctgtggagaccatccagaatgagtggaaggtgtatgtgaagaagcccctggaccgggagaagagggacaactacctgctgaccatcacagccacagatggcaccttcagcagcaaggccatcgtggaggtgaaggtgctggatgccaatgacaacagccctgtgtgtgagaagaccctgtacagcgacaccatcccagaagatgtgctgcccgggaagctgatcatgcagatcagcgccacagatgctgacatccgcagcaatgctgagatcacctacaccctgctgggcagcggggctgagaagttcaagctgaacccagacaccggggagctgaagaccagcacccccctggaccgggaggagcaggccgtgtaccacctgctggtgcgggccacagatggcggcggccgcttctgccaggccagcatcgtgctgaccctggaggatgtgaatgacaatgcccctgagttctctgctgacccctatgccatcaccgtgtttgagaacacagagcccggcaccctgctgaccagggtgcaggccacagatgctgatgctggcctgaacaggaagatcctgtacagcctgattgattctgcagatggccagttcagcatcaatgagctgagcggcatcatccagctggagaagcccctggaccgggagctgcaggccgtgtacaccctgagcctgaaggctgtggaccagggcctgccccggcggctgacagccactggaacagtgattgtgtctgtgctggacatcaatgacaacccccctgtgtttgagtaccgggagtatggagccaccgtgtctgaggacatcctggtgggcacagaggtgctgcaggtgtatgctgccagccgggacatcgaggccaatgctgagatcacctacagcatcatctctggaaatgaacatggcaagttcagcattgacagcaagacaggagctgtgttcatcatcgagaacctggactatgagagcagccatgagtactacctgactgtggaggccacagatggcggcacccccagcctgagtgatgtggccaccgtgaatgtgaatgtgacagacatcaatgacaacacccctgtgttcagccaggacacctacaccaccgtcatcagtgaagatgctgtgctggagcagagcgtcatcaccgtgatggctgatgatgctgatggccccagcaacagccacatccactacagcatcattgatggcaaccagggcagcagcttcaccattgatcctgtgcggggggaggtgaaggtgaccaagctgctggaccgggagaccatcagcggctacaccctgactgtgcaggccagtgacaatggcagccccccccgggtgaacaccaccaccgtgaacattgatgtgtctgatgtgaatgacaatgcccctgtgttcagccggggcaactacagcgtcatcatccaggagaacaagcctgtgggcttctctgtgctgcagctggtggtgacagatgaggacagcagccacaacggcccccccttcttcttcaccatcgtgactggaaatgatgagaaggcctttgaggtgaacccccagggcgtgctgctgaccagcagcgccatcaagaggaaggagaaggaccactacctgctgcaggtgaaggtggccgacaacgggaagccccagctgagcagcctgacctacatcgacatccgggtcatcgaggagagcatctaccccccagccatcctgcccctggagatcttcatcaccagcagtggagaggagtacagcggcggcgtcatcggcaagatccacgccacagaccaggatgtgtatgacaccctgacctacagcctggacccccagatggacaacctcttctctgtgagcagcactggaggcaagctgattgcccacaagaagctggacatcggccagtacctgctgaatgtgtctgtgacagatggcaagttcaccaccgtggccgacatcaccgtgcacatccggcaggtgacccaggagatgctgaaccacaccatcgccatccgctttgccaacctgaccccagaggagtttgtgggggactactggaggaacttccagagggccctgaggaacatcctgggcgtgagaagaaatgacatccagatcgtgtccctgcagagcagcgagccccacccccacctggatgtgctgctgtttgtggagaagccaggcagcgcccagatcagcaccaagcagctgctgcacaagatcaacagctctgtgacagacatcgaggagatcatcggcgtgcgcatcctgaatgtgttccagaagctgtgtgccggcctggactgcccctggaagttctgtgatgagaaggtgtctgtggatgaatctgtgatgagcacccacagcacagcccggctgagctttgtgacccccaggcaccacagagctgctgtgtgcctgtgcaaggagggccgctgcccccctgtgcaccacggctgtgaagatgacccctgcccagagggctctgaatgtgtgtctgacccctgggaggagaagcacacctgtgtgtgccccagcggccgcttcggccagtgccccggcagcagctccatgaccctgactggaaacagctatgtgaagtaccgcctgacagaaaatgaaaacaagctggagatgaagctgaccatgaggctgcggacctacagcacccatgctgtggtgatgtatgcccggggcacagactacagcatcctggagatccaccacggccgcctgcagtacaagtttgactgtggcagcggccctggcatcgtgtctgtgcagagcatccaggtgaatgatggccagtggcatgctgtggccctggaggtgaatggaaattatgcccggctggtgctggaccaggtgcacacagccagcggcacagcccctggcaccctgaagaccctgaacctggacaactacgtgttcttcggcggccacatccggcagcagggcaccaggcatggccgcagcccccaggtgggcaatggcttccggggctgcatggacagcatctacctgaatggccaggagctgcccctgaacagcaagcccaggagctatgcccacatcgaggagagcgtggatgtgtccccaggctgcttcctgacagccacagaggactgtgccagcaacccctgccagaatggaggagtgtgcaaccccagccctgctgggggctactactgcaagtgcagcgccctgtacatcggcacccactgtgagatctctgtgaacccctgcagcagcaagccctgcctgtatggaggcacctgtgtggtggacaatggaggctttgtgtgccagtgccggggcctgtacacaggccagcgctgccagctgagcccctactgcaaggatgagccctgcaagaatggaggcacctgctttgacagcctggatggagctgtgtgccagtgtgacagcggcttccggggggagcgctgccagagcgacattgatgagtgcagcggcaacccctgcctgcacggggccctgtgtgagaacacccacggcagctaccactgcaactgcagccatgagtaccggggccgccactgtgaagatgctgcccccaaccagtatgtgtccaccccctggaacatcggcctggccgagggcattggaattgtggtgtttgtggccggcatcttcctgctggtggtggtgtttgtgctgtgcaggaagatgatcagcaggaagaagaagcaccaggccgagcccaaggacaagcacctgggccctgccacagccttcctgcagaggccctactttgacagcaagctgaacaagaacatctacagcgacatccccccccaggtgcctgtgcggcccatctcctacacccccagcatccccagcgacagcaggaacaacctggacaggaacagctttgagggcagcgccatccctgagcaccctgagttcagcaccttcaaccctgagagcgtgcacggccacaggaaggctgtggccgtgtgcagcgtggcccccaacctgcccccacctccacccagcaacagccccagcgacagcgacagcatccagaagcccagctgggactttgattatgacaccaaggtggtggacctggacccctgcctgagcaagaagcccctggaggagaagcccagccagccctacagcgcccgggagagcctgtctgaggtgcagagcctgagcagcttccagagcgagagctgtgatgacaatggctaccactgggacaccagtgactggatgcccagcgtgcccctgcctgacatccaggagttccccaactatgaggtgattgatgagcagacccccctgtacagcgctgaccccaatgccatcgacacagactactacccaggcggctatgacattgaaagtgacttccccccacctcctgaggacttccctgctgctgatgagctgccccccctgcccccagagttcagcaaccagtttgagagcatccaccccccccgggacatgcctgctgctggcagcctgggcagcagcagcaggaaccggcagcgcttcaacctgaaccagtacctgcccaacttctaccccctggacatgtctgagccccagaccaagggcaccggggagaacagcacctgccgggagccccacgccccctacccacctggctaccagaggcactttgaggccccagctgtggagagcatgcccatgtctgtgtatgccagcacagccagctgcagtgatgtgtctgcctgctgtgaggtggagagcgaggtgatgatgtctgactatgagagcggagatgatggccactttgaggaggtgaccatcccccccctggacagccagcagcacacagaggtgtag

SEQ ID NO: 287651 - DNA, 1467 bp, Artificial Sequence
  derived and/or modified sequence
atgggccgccacctggccctgctgctgctgctgctgctgctcttccagcactttggagacagtgatggcagccagaggctggagcagacccccctgcagttcacccacctggagtacaacgtgacagtgcaggagaacagcgctgccaagacctacgtgggccaccctgtgaagatgggcgtgtacatcacccacccagcctgggaggtgcgctacaagatcgtgtctggggacagcgagaacctcttcaaggccgaggagtacatcctgggggacttctgcttcctgcgcatccgcaccaagggcggcaacacagccatcctgaaccgggaggtgaaggaccactacaccctgattgtgaaggccctggagaagaacaccaacgtggaggcccggaccaaggtgcgggtgcaggtgctggacaccaatgacctgcggcccctcttcagccccaccagctacagcgtgtccctgcctgagaacacagccatccgcaccagcatcgcccgggtgtctgccacagatgctgacatcggcaccaatggagagttctactacagcttcaaggacagaacagacatgtttgccatccaccccaccagcggggtcatcgtgctgaccggccgcctggactacctggagaccaagctgtatgagatggagatcctggccgctgaccggggcatgaagctgtatggcagcagcggcatcagctccatggccaagctgactgtgcacatcgagcaggccaatgaatgtgcccctgtgatcacagctgtgaccctgagccccagcgagctggaccgggaccctgcctatgccatcgtgacagtggatgactgtgaccagggcgccaacggggacatcgccagcctgagcatcgtggccggggacctgctgcagcagttcagaacagtgcgctccttccctggcagcaaggagtacaaggtgaaggccatcggcggcatcgactgggacagccaccccttcggctacaacctgaccctgcaggccaaggacaagggcaccccaccccagttcagctctgtgaaggtgatccacgtgaccagcccccagttcaaggccggccctgtgaagtttgagaaggatgtgtacagagctgagatcagcgagtttgccccacccaacacccctgtggtgatggtgaaggccatcccagcctacagccacctgcgctacgtgttcaagagcacccctgggaaggccaagttcagcctgaactacaacacaggcctcatcagcatcctggagcctgtgaagaggcagcaggccgcccactttgagctggaggtgaccaccagtgacaggaaggccagcaccaaggtgctggtgaaggtgctgggcgccaacagcaaccccccagagttcacccagacagcctacaaggccgcctttgatgaaaatgtgcccatcggcaccaccgtgatgagcctgtctgctgtgtag

SEQ ID NO: 287652 - DNA, 13773 bp, Artificial Sequence
  derived and/or modified sequence
atgggccggcacctggccctgctgctgctgctgctgctgctgttccaacactttggagattcagatgggagtcagaggttggagcagacccccctgcagttcacgcatctggaatacaatgtgaccgttcaagaaaattccgcggcgaagacttacgtgggccacccggttaaaatgggggtgtacatcacgcacccagcttgggaagtcaggtacaagatcgtctctggcgacagcgagaacctcttcaaggccgaagagtacatactaggcgatttttgctttctgcgtatccgaactaagggaggtaatactgcaattcttaaccgtgaggtcaaagatcactatactttaatcgtaaaagctctggagaagaacaccaacgtcgaagccagaactaaagtgagagtgcaggtgcttgacacaaacgatctccggcctctgttttctccaacaagttactcagtgagtttacctgagaacactgccatcagaacctctattgccagagtctccgcaacagatgccgacatcggaactaacggcgaattctattactcattcaaggacagaacagacatgtttgcgatccaccctacatccggcgtgattgtgttgacaggcagactggattatctggaaacgaagctgtatgaaatggagattttggctgcagataggggcatgaagctctacgggagtagtggcatttcttcgatggcgaagctgacagtgcatattgaacaggcaaatgagtgcgctcctgtaattaccgccgttacgctgtcaccaagcgagctggatagggaccctgcctacgccatagtcacagtggacgactgcgatcagggtgcaaacggagatatcgctagtctgtccattgtcgcgggtgatttgttacaacagttcaggacagttagaagcttccccggcagcaaagagtacaaggttaaagctatcgggggcatcgattgggactcacaccctttcggctacaatctgacacttcaggctaaggataagggcacacctcctcagttcagctcggtcaaggtaatccatgtaacaagtccacaatttaaggcgggcccagtaaagttcgagaaggacgtgtatcgggccgaaatcagtgagttcgcgcctcctaacactcccgtggtgatggtgaaagctattccagcttacagccaccttcgctatgtctttaaaagcacccccggaaaagcaaaattttccttaaactataatacaggcctcatttcgatcctggaacccgtcaaacggcagcaggctgctcattttgaactcgaggtgactacttctgatagaaaagcaagtaccaaagtcttagtgaaagtacttggagctaacagcaacccacccgaattcacacagacagcatacaaggcagccttcgatgagaacgtacctatcggcactaccgtcatgagtctatccgccgtggacccagacgagggggagaacgggtacgttacctattcgatcgctaacttgaaccacgtaccctttgcgatcgatcatttcacgggtgccgtatctacctccgaaaacttggactacgagctaatgcctcgcgtctataccctgcgcattagggccagtgattggggcctgccttataggcgcgaggtggaggtcttggcgactatcacattaaacaatttgaatgataataccccactgtttgaaaaaatcaactgcgagggtaccattccacgtgacctgggagtcggcgagcaaattactaccgtaagcgccatcgatgcagacgaactacaactcgtgcagtaccagatcgaggccggcaacgagttggattttttttcgttgaatcccaacagcggcgttctctccttaaaacgcagtctgatggacggcctgggagctaaagtctcattccattccctgcggattacagctacagatggagagaactttgcaacccccctatatatcaacattaccgttgcggcatcacacaagctagtgaacctgcagtgcgaggaaacaggagttgcaaagatgctggcagaaaaactcctacaagccaataaattgcacaaccaaggagaggtggaagacatttttttcgattcccacagcgttaacgcccacattccacaatttcggagcaccctgccaaccggaattcaagttaaggagaatcaacccgtgggcagttcagtcatattcatgaattctaccgatttagacaccggattcaacgggaaattagtctatgccgtgtccggagggaatgaagattcttgctttatgattgatatggagacagggatgctaaagatcttgtcaccacttgacagagaaacaactgataaatacaccctcaacataacagtgtatgacctcggcattccccagaaagctgcatggagactgcttcatgtcgtcgtcgtcgatgccaatgacaatccgcctgaatttctccaggagtcctacttcgtagaggtgtctgaggataaggaagtgcactctgaaattatccaggtggaggccactgacaaggacctgggacctaacggccacgtgacatacagcatagtcactgatactgatacatttagcattgacagtgtgactggagtggtgaacatagcacgtcctttggaccgcgaacttcagcatgagcactcccttaaaatcgaagccagagaccaggcacgggaggaaccacagctgttctccacagtggtagtgaaggtaagcctcgaggatgtgaatgacaaccccccgacattcatcccacccaactatcgagttaaggtgcgagaggatctgcccgagggaacagtcatcatgtggcttgaagcacacgatccagacttggggcagtccggtcaagtgaggtatagtctccttgatcatggagagggaaactttgacgtcgataaactgtctggagctgtcagaatcgtgcagcagttggacttcgagaaaaagcaggtgtacaatcttacagtaagggcaaaggacaaaggaaaacctgtatccctgtcgagtacatgttacgtcgaagttgaagtcgtggacgttaatgaaaatctgcaccccccagtcttttcctctttcgtggaaaaagggaccgtcaaagaagatgcaccagtcgggtctctcgtcatgacggtcagcgcacacgatgaggacgccaggagggacggcgaaatacggtactccatccgcgatgggtccggcgttggtgtcttcaagatcggcgaggagacaggggtgattgaaacaagcgatcgactcgatcgtgagtctacaagccattactggctgaccgtttttgctaccgatcagggagtggttccattgtcttcatttattgagatctacattgaggtagaggatgtgaacgacaacgctccgcagacctcggaaccagtctactatcccgagataatggagaattcaccaaaagatgtgtcggttgtacagattgaggcttttgaccccgatagtagctctaacgacaaactgatgtacaaaatcaccagtgggaaccctcagggctttttttccatccatcctaagactggcctgataacaactacgtcccgtaagttagaccgagagcagcaggacgaacacatcctggaagtgacagttactgataacggatcgccaccaaaatccaccattgctagggtgatcgtaaagatccttgacgaaaatgataataaacctcagtttctacaaaaattctacaaaattaggctacctgagcgtgaaaaacctgatcgggagcggaatgccaggcgtgaaccactctaccatgttatcgcaacagataaggatgaagggcctaatgccgaaatttcctatagtatcgaagatgggaatgaacatggcaagttcttcattgaacctaagaccggtgttgtcagtagcaaaagatttagtgccgccggtgagtatgacatactaagtatcaaagccgtggataacggccggccacagaagtcttccaccaccagactgcacattgaatggatcagtaagcctaagccctctctggagccaattagctttgaggagagttttttcaccttcactgttatggagagcgaccctgttgcacacatgattggggtcatatctgtggagccaccaggtatacctctctggtttgatatcacaggtgggaactacgattcccactttgatgtcgataaagggaccggtacgattatagtggcaaagcccctggatgcagaacagaagtcgaattataatttgaccgtcgaagctaccgacggaaccacgacgattctgacccaagtgtttattaaagtcatagataccaatgaccaccgacctcagttttctacctccaaatacgaggtggtgatcccagaagatacagcacccgagacagagattcttcaaattagcgctgtagatcaagacgagaaaaataaacttatatatacgttgcaaagtagcagagaccctctgagcctgaagaagttcaggctcgaccccgctaccgggagcctatacacatctgaaaaactcgatcatgaagctgtgccagcccacctcacagtgatggtgcgtgaccaggacgtccccgtgaagcgcaattttgccagaatcgttgttaacgtctctgacactaacgaccatgccccatggtttaccgcctcctcttataagggtcgggtctatgagtctgcggctgttggatctgttgtgctgcaagttacggcactagacaaagacaaaggaaagaatgcggaggtgttgtacagcattgagagtggaacttttggcaatattggcaattcattcatgatagatccagtgctcggcagcattaaaactgccaaagagttagatcgatccaaccaggcagaatatgaccttatggtcaaggcaacggacaaagggtctcccccaatgagcgaaattacatcagtgcggattttcgtcactattgccgataacgcatcacccaagttcacctcaaaggagtactccgtagagctctcggagacagtttcaattggctcttttgttggtatggtcacggcccacagtcagtcttcagtggtatacgaaatcaaggatggaaacactggagacgctttcgatatcaatccacacagcggcaccattataactcagaaggccctcgactttgagaccttgccaatttatacacttattatccagggtacaaacatggctgggctgagcactaatactaccgtgctggtgcatctgcaagacgagaatgataatgcgccggtgttcatgcaagctgagtataccggactgatctctgaatcagcaagcattaactcagttgtgcttacagacagaaacgtgccgctggttatccgggcagccgatgctgataaagactcaaacgctcttctggtgtatcatatagtcgagcctagcgtgcacacttatttcgccattgattcgtccacaggggctatccatactgtgcttagtctcgattacgaggaaacgagcatcttccattttacggtccaggtacacgacatggggacccccagactgttcgccgaatatgctgccaatgtgacggtccacgttatcgacatcaacgactgccccccagtgtttgccaagcctttgtacgaggcctccctgctgctccccacctacaagggggtcaaagtcatcaccgtgaacgcaacggatgccgatagttcagccttctcacagctaatttatagtataaccgagggcaatatcggagagaaattcagcatggattacaaaaccggagcattgaccgtgcaaaataccacacaactcagatcccgatacgagctgactgtaagggcctccgacggccggttcgctgggctgactagcgtgaaaatcaatgtcaaagagtccaaagagagccatttgaaatttactcaagacgtatactcagctgtggtcaaggaaaacagtacggaggccgagacccttgccgttattacagccattggcaaccctattaacgagccactgttttaccacatattaaatccagacagaaggttcaagatctctcgtacatctggagtgttgtcgactaccggcaccccttttgatcgtgagcagcaggaagctttcgacgtggtagtcgaggtgaccgaagagcataaacctagtgccgtggctcatgtggtagtaaaagtaatagtggaggaccaaaatgacaacgccccagtgtttgtaaacctgccttattatgcagtggttaaagtggacacagaggtcgggcacgtcataaggtatgtcaccgctgtcgatcgagactccgggcggaatggcgaggtacattattacctgaaggagcatcacgaacatttccagattggccccctgggtgaaatttcattaaaaaaacaattcgagctggacacgctgaacaaagaatacctggtgacagtggtggctaaggacggtggcaatccagcctttagtgctgaagtgattgtgcccatcaccgtcatgaataaagctatgcccgttttcgagaaacccttctactccgctgagatagccgaatccatccaggtacactctccagtagtgcacgtgcaggcaaattcacccgagggactcaaagtgttctactctattacggacggggaccctttctcacaatttacaataaactttaatacgggggttatcaacgtgatcgcacccttagactttgaagcccatcctgcttataagctgagtatacgggccacagacagcctaaccggcgcacacgctgaggtcttcgtcgacatcatagttgacgacatcaatgataacccccctgtctttgcgcagcagtcctacgccgtgaccctgtccgaagcaagcgttatcggaactagtgtcgtgcaggtgcgggcaactgactccgattccgaacctaaccggggtatttcctatcaaatgtttgggaaccactcaaaatcccatgatcactttcacgtggattctagcacaggcctcatctctctgctaagaaccttagattatgagcagtctcgacagcatactatattcgttagggccgtcgatggagggatgcccactctcagctccgacgtgattgtgaccgtagacgtaactgatcttaatgataatcctcctctatttgaacagcaaatatacgaggcacgaatcagcgagcatgcccctcatggccactttgtaacatgtgttaaagcgtacgatgccgatagtagcgatattgacaaactccaatactcaattctatctgggaacgatcacaagcactttgtgatcgactccgctactggcattatcactctgagtaacctccacaggcatgcccttaaaccgttctatagtctgaatctgagtgtgtccgacggcgtgttccggagctccacccaggtgcatgtaacagtgatcggcggcaacctgcattcccccgccttcttacagaacgagtacgaagtggagctggccgagaatgcccctctgcataccttagtgatggaggtcaaaaccactgacggagacagtggaatctacggccacgtgacataccatatagtgaatgacttcgcgaaagacaggttctacatcaatgaacgcggacagatctttactctcgagaaactggaccgcgagactcctgctgaaaaggtcatcagcgttcgcctgatggccaaagatgctggcggtaaagtggcattttgcacagtgaatgtcatactcacagatgataacgacaacgctcctcaattcagagccactaaatatgaggtcaatataggaagctccgctgccaagggcacatccgtggtgaaggtactcgcctcagatgcagatgagggaagtaacgccgatatcacatatgcaatcgaggcagactcagagagcgttaaggagaacctagagatcaacaagttgtctggggtaataactactaaggaaagcctgattggacttgaaaatgagttcttcacattctttgttcgcgccgtggataacgggtcaccttccaaagagtcggtggttttggtttatgtgaaaatcctgccgccagagatgcagctgccaaaatttagcgaaccattttacacattcacggtgtcagaagatgttccgatcgggactgaaattgacctgattagagctgagcacagtggtacagtcttgtacagcttggttaaaggcaataccccagaaagcaaccgcgacgagagtttcgttattgatcggcagtctggaagactgaagttggagaagtccttggatcatgagaccactaagtggtaccagttttccattctggcccgttgtacacaggacgatcacgagatggtcgcttccgtcgatgtcagcatccaggtgaaagacgcaaacgataatagtccagtatttgaatcctcaccctacgaggcctttattgttgaaaatttacccggaggtagccgcgtcatccaaatcagagcgagtgatgcagattcagggactaacgggcaggtcatgtactctttggatcagagtcagagcgtggaagtgatcgaaagctttgctattaatatggagaccggctggatcaccacattgaaagagctcgatcatgagaagagagacaactatcagatcaaagtggtagcctctgaccatggggagaagattcagctgtcgagcacagcgattgtagatgtgactgtcacagatgtcaacgacagccctccaaggtttaccgcagagatctataagggcaccgtctctgaagatgatccccagggaggcgtgatcgcgattctatccaccaccgacgccgactcagaggagattaaccggcaggttacttacttcatcaccggtggcgaccccctgggacagttcgccgtggagactatccagaacgaatggaaggtctacgtgaagaaaccacttgacagagaaaagcgggacaattatcttctcactattactgccacggatggaaccttcagctccaaagctatcgtggaagtgaaagtcctggacgctaatgataattcgccagtgtgcgagaaaactctgtattccgacacaatcccagaagacgtcctgccaggaaagctgatcatgcagatttcagccaccgatgcggacattcgttctaatgccgagattacttatacattactgggttctggcgccgaaaagtttaagctgaatccagacactggagaactcaaaacctcgaccccactggacagagaggagcaggcagtctatcatctgctggttagagccacggacggcggtgggcgattttgtcaggcctctatagtgctgacgctggaagatgttaatgacaacgccccagagttcagtgccgatccttatgcaattacagttttcgagaatacggagccaggcaccctgctcactagggtgcaggccactgacgccgacgcaggtcttaacaggaagattctttatagccttatcgattctgccgacggtcagttttccatcaatgaactgtcggggatcatacagttagaaaagcccctggaccgcgagttgcaggccgtttacaccctgtccctgaaggctgttgatcagggacttcctaggcgcctgaccgccaccggtaccgttatagtgtccgttctagacatcaatgacaaccctcctgtctttgagtatagggagtatggggccactgtgagcgaagacatactcgtgggtaccgaggtcctccaggtttatgcagcgagccgtgacatcgaggctaatgctgaaatcacgtactccataatctccggaaacgaacacggaaaattcagtatcgacagtaaaacaggtgcggtcttcatcatagagaatctggactacgagagttcgcacgagtattatctaaccgtggaagccactgatggaggcactccctccctgagtgatgtcgccacagtgaatgtgaacgtgacggatattaacgacaacaccccagttttctcccaggacacatacacgacagtgatctctgaggacgctgtccttgagcaatccgtgatcaccgtgatggcagacgacgccgatggccctagtaactcccatatccactacagcatcattgacggcaaccaaggctctagcttcactattgacccagtccggggcgaggttaaagtgaccaaactattggacagggaaacgatcagtggctatactctgacagtgcaagcatccgataatggcagtccgccacgcgtcaacactaccactgtaaacattgacgtctccgatgttaacgacaacgcccccgtgttctcgcgtggtaattattcagtcattattcaggagaataaaccggtgggattttctgtgctgcagctggtggtcaccgatgaagacagctcccataatggaccacccttttttttcactattgtgacgggaaatgatgagaaagctttcgaggtgaacccacagggcgtcctactgacatcgagcgccatcaaacgcaaggagaaggatcactatttacttcaagtgaaggtcgcagataatggtaagcctcagctgtcttcactcacctatattgacatccgcgtgatcgaagaatcaatttatccgcctgccatactgcctcttgagattttcatcacaagctccggggaagagtacagcggaggagtgatcggaaaaatccacgccacggaccaagacgtatatgacaccctgacttactccctggacccccagatggacaacctgttctctgtctcctcaacaggcggcaagcttatcgcacacaagaagctggatatcgggcagtacctgctcaacgtcagcgtaacagacggcaaatttaccactgtcgccgatattaccgtccacataagacaagttactcaggaaatgctcaaccacactattgccatcaggttcgcgaatctcacacctgaggagttcgtgggcgactactggaggaatttccaaagggcgcttcggaatattctcggagtccgcaggaatgacatccaaatcgttagcctccagagctccgaaccccaccctcacctggacgtgctcctgtttgtagaaaagcctggcagcgctcaaattagcaccaaacagctgctgcacaagattaactcctccgtgacagacattgaagaaatcattggcgtccgcatcctgaacgtctttcagaaactctgcgccgggctcgactgcccgtggaagttctgtgatgaaaaagtctccgtggacgaatccgtgatgagtacccactctaccgctcgcctgtctttcgtcaccccaagacaccacagagctgccgtatgtctgtgtaaggaaggacgctgtccaccagtacatcacggttgcgaggatgacccttgcccagaaggaagcgagtgcgtctcggacccatgggaggaaaaacatacatgcgtgtgtcccagcgggcgctttggccagtgcccgggaagttctagtatgacactcactgggaattcatatgtaaagtatcggctgaccgaaaatgaaaataaactcgagatgaaattaactatgaggctgagaacatacagcacccatgccgtggtgatgtacgccagggggacggactactctattctcgagatccaccatggaaggctgcagtataaatttgattgcggcagcgggcctggtatagtcagtgtgcagtccatccaagttaatgacggacaatggcacgcagttgctttagaagtcaacggaaactacgccagactggtattggaccaagtgcacacggcaagcggcacggccccaggaacccttaaaacactcaacctggataactatgtcttcttcggcggccacatacgccagcaaggcacccgccatggccggtctccgcaagtgggcaacgggttcaggggctgcatggattccatttacctgaacgggcaggaactgccgctaaactccaagcccaggtcatatgctcacatagaggaaagcgtagatgtgtcccccggttgctttttgactgcgacagaagactgcgctagcaatccttgccaaaatggtggtgtttgtaatccctcgccagcggggggctattattgtaagtgctccgctctgtatataggcacacattgcgagatctcagttaacccctgttcatcaaaaccttgtctgtatggcggtacttgtgtcgtagacaacggaggattcgtgtgtcaatgtcgcgggctctacaccggtcagagatgccagcttagtccttactgcaaagacgagccttgtaaaaacggcggaacctgcttcgatagcttggacggagccgtatgtcagtgtgatagcgggtttcgaggggaaaggtgtcaatcagatatcgacgaatgctccggcaacccatgcctgcacggagcactatgcgaaaacactcatggcagttatcactgtaactgctcacatgaatacagaggccgacattgcgaggatgcagcccctaaccaatatgtctccacgccctggaatattgggctcgctgagggcattggtattgttgtgttcgttgctggtatctttctgctggtggtcgttttcgtgctgtgcagaaaaatgataagccgcaaaaagaagcatcaggcagaacctaaggacaagcatctaggccctgccacagctttcctccagaggccttactttgattcgaaactgaacaaaaatatttactccgacatacctccacaggtccctgtaaggccaatctcctacaccccctctatcccctctgattcccgcaataatcttgaccgtaactccttcgagggcagcgctatccccgagcaccccgagttcagcacattcaatcccgaatccgtccatgggcaccgaaaggcagttgctgtatgctccgtcgcacccaacctgccccctccgcccccaagcaacagcccgagtgactctgacagcatccagaaaccttcctgggactttgattacgatacgaaggtggttgatctggatccctgcctcagcaaaaaacccctggaggaaaaaccctcccaaccatactcagcacgcgagtctctatcagaggtgcagagcctctcttcatttcagagcgaaagttgtgacgacaacgggtaccattgggacacctcagactggatgccgtctgtaccactgccagacattcaggaattcccgaattacgaggttattgacgagcagacccccctctatagtgcagatccaaatgcgatcgataccgattactacccaggcggctacgacatcgaatcagattttcctcccccccccgaggattttcccgccgccgacgagctgcctcccctgccgcccgagtttagcaaccagttcgagagtattcacccaccgagggacatgcccgcggctggctcactgggatcctccagcaggaaccgtcagcgttttaacctgaatcagtacttacctaatttctaccccttagatatgagtgagccacagaccaagggaaccggggagaattcaacctgtcgtgaacctcatgccccataccctcctggctaccaacggcacttcgaagcccctgcagtggagagtatgccaatgtcagtatatgcttcaactgcaagctgctctgacgtaagcgcctgctgcgaggtagagtccgaggtgatgatgtctgactacgagtcgggggatgatgggcactttgaagaggttacaatccctcctctggattctcagcagcacacagaagtgtag

SEQ ID NO: 287653 - DNA, 13767 bp, Artificial Sequence
  derived and/or modified sequence
atgggccggcacctggccctgctgctgctgctgctgctgctgttccaacactttggggatagcgatggctctcaacggcttgagcagacccctctccaatttacccacctagaatataatgtgacggttcaagaaaactccgctgcaaagacatacgttggacatccagtgaagatgggagtctacatcactcacccagcgtgggaggtgaggtataaaatagtgtcaggagatagtgagaatttgttcaaggcagaagaatacatcctgggggacttctgtttcttgcgcatcagaactaagggaggcaatactgccatccttaatagagaggtcaaggaccactacacactgatagtgaaggcattggagaagaatacgaatgtcgaggctcgcacgaaggtccgggtgcaggtgctagacactaacgacttacgtcccttgtttagtcccactagttactccgtctcactacccgagaatacagctattagaaccagcatcgccagggtaagcgctactgacgcagacatcgggactaacggggagttttattactcgttcaaagatcggacagacatgttcgccatccaccccacatcaggggtcatcgtgctgaccggacggctggattatcttgagaccaaactgtatgaaatggaaatcctggccgcggaccgcggaatgaaattgtatggttcttctggaattagctccatggccaagcttacggtccacattgaacaggccaacgaatgtgctcccgttatcacagcagtgacgttgagccctagcgaactcgacagagatccggcctatgccatcgtgacagtggacgactgcgaccagggcgcaaatggggatatcgccagcctgtccattgtggccggtgacctccttcagcagtttagaaccgttcggtcctttccgggctccaaagagtacaaggtaaaagcaatcgggggaatcgattgggatagtcatcctttcggatataacttaactttacaggctaaggataaggggactccaccccaattctcaagtgtgaaagtcatccacgtgacatccccccagttcaaggcggggcccgtcaagttcgagaaggacgtttaccgagctgaaatctccgagtttgccccaccaaatacccctgttgtgatggtcaaagcaataccagcctattctcacctccgatacgtcttcaagagcacaccaggcaaagcgaagttctctctgaactataacacgggccttataagtatcctggaacccgtgaagcgccagcaagccgctcactttgaactggaagtaactacttccgatcggaaagcctccacaaaagtgttagttaaagtcctgggtgcgaattcaaacccccctgagtttacacagactgcctacaaagcagccttcgacgagaatgttcctattgggaccaccgtgatgagcctctctgctgtggatcccgacgagggggaaaatggctacgtaacctatagcatcgcgaaccttaaccacgtgccattcgcaattgatcactttacaggagcggtgtcaacctcagaaaaccttgactatgaactgatgccaagggtatataccctaagaattcgcgctagcgattggggcctgccctacaggagagaagtagaggtgctcgccactataactcttaataatctgaatgacaacacccccctgtttgagaagattaattgtgaaggcactataccgagggatttgggagtgggagagcagatcactaccgtgtctgccattgatgccgacgagctccaattggtgcagtatcagattgaagccggtaatgagctggatttttttagtctcaacccgaatagcggggtgctgtctctgaaaagatctcttatggatggattgggagcaaaggtctcatttcactccttgaggatcactgctaccgacggggagaattttgctaccccgctgtatataaacattacagttgccgccagccataaactggtcaacctccagtgcgaagagactggagtcgctaagatgctggctgagaagctgctccaggccaacaagttgcacaaccagggtgaggtggaggacatcttcttcgattcccattcagtgaatgcacacattccacagtttcgttctactcttcctacgggcatccaggtgaaggagaaccagcctgtgggcagcagcgtcatattcatgaattcaactgatctggatacaggctttaacgggaagctggtgtacgcggtttccggggggaacgaggactcttgttttatgatcgatatggagacggggatgctaaagatcctttcaccactggaccgagagactaccgacaaatacaccttaaacatcaccgtgtacgatcttggtataccccaaaaggctgcgtggcgactcctgcacgtcgtcgtcgttgacgccaatgataatccaccagaatttctgcaagaaagttactttgtggaggtgagtgaagacaaggaggttcacagtgagataatacaagtggaagcaaccgacaaggatctagggccgaacggtcacgtgacatattcgatagtgaccgacaccgatacttttagtattgactcagtgactggtgtggtgaatattgcaaggcctctggatcgtgagctgcaacacgagcattccctcaaaatcgaagctagagatcaggctagggaggaaccccagctattcagcactgtcgtggtcaaagtgtctctggaagacgttaacgataaccctccaaccttcatcccccccaattatagagtcaaagtgagagaagacctccccgaaggaacggtgatcatgtggctcgaagcacatgacccggatctggggcaaagtggccaggtgagatacagcctattagaccacggagaggggaactttgatgtggacaagctgagcggggcagtgagaatagtgcaacagctggacttcgaaaagaaacaggtctacaatctcaccgttagggccaaggacaaaggtaaacctgtttctctctctagtacttgctacgtcgaagtggaggtggtcgatgtaaatgaaaaccttcatcctccagtgttcagtagctttgtggaaaaaggcaccgtaaaggaagatgccccagttgggtcattggttatgaccgtgtcggctcatgatgaggacgctcggagagacggggagatccgctactctatcagggacgggagtggggtcggtgtattcaagatcggtgaagaaactggtgtgatcgagacatctgaccgactggaccgcgaaagcacttcacattattggctgaccgtgttcgctacagatcagggggtagtcccactgtctagcttcatcgagatctacatcgaagtggaagatgtgaatgacaacgctccgcagacatcagaaccagtgtattatcccgagattatggaaaacagccccaaagatgtgtctgtggtccaaattgaagctttcgacccagactctagttccaacgataagttgatgtataagattacctctgggaatccacagggattcttttccattcacccaaagacgggtttgattacaacgaccagccgcaagctagaccgcgagcagcaggacgagcacatactggaggtgactgtcaccgacaatggcagtccacccaagagtactatcgctcgggtgattgtaaagattctggatgagaatgataataaaccacagtttttgcaaaaattttataaaatccgtctgcccgaacgtgagaagccagatagagaacgcaacgcgcggagagaaccactgtatcacgtaattgcgaccgacaaagatgagggacccaacgctgagatctcttacagcatcgaggacgggaacgagcatgggaagtttttcattgagccaaaaaccggggttgtgtcgtcaaaacggtttagtgcagcaggagaatatgatatcctcagcattaaggcagtggataacggacggccccaaaaaagctctacaactagactccatatcgagtggattagcaagcctaaaccaagcttggagccaatctcgtttgaggaatcgtttttcacgttcactgtgatggagtcagaccctgtggctcacatgattggcgtcatctccgtcgagccaccaggcatccccttatggtttgacatcactggcggcaattacgactcacattttgacgtcgacaaggggacaggaaccataatcgtagctaaacccttggatgcagaacaaaaatccaattacaacctcacggtggaggccaccgatgggacgaccacgattctgacccaggtgtttatcaaggtcatcgataccaatgatcacaggccccagttttccacatccaagtacgaggtcgtgattccggaagatacagcacccgaaactgagatccttcagatctctgcagtcgaccaggacgaaaagaacaagcttatttatacacttcagagctccagagacccattgtcattgaagaaattcagattagatcccgctactggtagtctttatactagcgaaaagttggaccacgaggccgttcatcaacatacactgaccgtaatggtgcgcgatcaggacgttcctgtcaaaagaaattttgccaggatcgttgtgaatgtttcagacaccaatgaccacgcaccctggtttaccgcctccagttacaaaggtagagtgtacgaaagtgcggccgtgggatccgtagtccttcaggtcactgcccttgataaggacaagggaaagaacgcagaagtgctgtattcaatagagtcaggtaatatcggcaattcattcatgatcgatccagtgctgggatccatcaaaaccgctaaagagctggacaggagcaaccaggccgaatatgacctgatggtgaaggccactgataagggttcacccccaatgagcgagataacatccgtgaggatatttgtaaccatcgcagacaatgcaagtccgaagttcacctccaaggaatacagtgtcgagctttcagaaacagtttccattggctcgtttgttggtatggtgacggctcactctcagagtagtgtggtttatgagattaaggacggaaacactggagatgccttcgacattaatccccattctggaacgattataacccaaaaggcactggactttgagacgctcccaatttatactctcatcattcaagggaccaacatggccggactatccactaataccacagttcttgttcacctccaggacgagaacgataacgcccctgtatttatgcaggctgagtatacaggcctgatctcagaaagtgccagtatcaatagtgtggtcttgaccgatagaaatgtgccacttgtgattcgggcagctgacgctgacaaagattcgaacgctctgcttgtctaccacatcgtggagccgtctgtgcatacatacttcgccattgactcgtctaccggcgcaatccacaccgtcctgagcctggactatgaagagacatctatctttcatttcaccgtgcaggtgcacgatatgggcacacccagactgtttgcagagtatgccgcaaacgttactgtgcacgtgattgatatcaacgactgcccccctgtgttcgcgaaaccattatacgaggcctcgctccttctccccacttacaagggagttaaggtcataacagtcaacgcaacagatgcagactcaagcgccttttcccagctcatctactccattactgagggtaacataggggagaagttttcaatggattacaaaacgggtgcccttaccgtgcagaataccacccaactgaggtccagatacgaattaaccgttcgggccagcgacggaagattcgcgggccttacaagcgttaagattaatgtaaaagaaagcaaggaatctcacttaaaattcacacaagacgtgtattccgccgtggtcaaggagaactctaccgaggccgagacgctggcggtgatcactgccatcggtaaccctataaatgagccactcttttatcatatactgaaccctgatcgccggtttaaaatttcaaggacttcgggtgttctgtccactaccggcacaccgttcgaccgtgagcagcaagaggcttttgatgttgtcgtcgaggtcaccgaggagcataaaccgtctgcagtcgcccatgttgtagtgaaggtgatcgttgaagatcagaacgacaatgctcccgtattcgtcaaccttccttactatgcggtcgtgaaggtggacacggaggtcgggcatgttatcagatatgtaaccgccgtggatagagatagcggacggaatggtgaagtccactactatttgaaagaacatcatgagcattttcagattggaccacttggagagattagtctcaaaaaacagttcgaactggacacactcaacaaagagtacctcgtcactgtcgttgccaaagacgggggtaatccagctttttctgcggaagtgatagtaccaatcacggtcatgaacaaggcaatgccagtgttcgaaaaaccgttttacagcgccgagattgccgagagtatccaggttcacagccctgtggtgcacgtgcaggccaactctccagagggactgaaggtgttttactccattactgacggcgatccattcagtcagttcaccatcaatttcaacacgggggttatcaacgttattgcgcctctggacttcgaggcacatcccgcctacaagctatcaattagggcaaccgactccttgactggggcccacgctgaagtgttcgtcgacataattgttgacgatatcaacgacaacccgcccgttttcgctcagcaatcctatgccgtcacacttagcgaggcatcagtgatcgggacatcagtcgtgcaggtgagggctacagattctgactccgagcccaacagagggatatcataccaaatgtttgggaatcatagcaagtcacacgaccacttccatgtcgattcgtctactggactgatatcgttattgcgtaccctggattacgagcagtccagacagcatactatctttgtccgggctgtcgatggcggaatgcccaccctaagttccgatgttattgtcaccgtcgatgtgacagatctgaacgacaatccacccctatttgaacagcagatctatgaagcgcgcattagtgagcatgcaccccatggtcatttcgtcacctgtgtgaaggcttatgatgcagatagctctgacatcgataaactgcagtacagcattctttctggaaatgatcacaagcattttgtgatcgatagtgcaactggtatcatcaccctgtctaacctacatcgccacgccctgaagcccttctattccctcaacctgagcgtcagcgacggagtgttccggtcatctactcaggtccatgtgactgtgatcggaggtaatctgcacagccccgcttttctgcaaaatgaatatgaggtggaattggccgaaaacgcccccctccataccctggtcatggaagtgaaaacgactgatggcgattccggaatctatgggcacgtcacctaccacatagtaaacgactttgctaaagacaggttctacatcaatgaacgtggtcagatatttacactcgaaaagctcgatcgggaaacccctgccgagaaagtaatcagcgtccgtctcatggcaaaggatgccggaggaaaagttgctttttgcactgttaatgtgatactgacggatgataatgataatgccccgcagtttcgcgctactaagtacgaagtcaacattgggtctagtgcagctaaaggtacgtcggtagtgaaggtgttggcaagcgacgccgatgagggaagcaacgccgacatcacatacgcaattgaggcggattcagaatctgtgaaggagaacctagagatcaataaactctcaggtgtcattaccaccaaggaatctctaatagggctggagaatgaatttttcaccttctttgttcgggctgtcgacaatggcagcccttctaaagagtcagtcgtgctggtgtacgttaaaattctccccccggaaatgcaactgcctaaatttagtgaacctttctacacatttacagtgtccgaagatgtccctatcggcacggagatcgaccttattagagctgaacactccggcacggtcttgtattctcttgtgaaaggaaatacacctgagtctaatagggatgaaagttttgtgatcgatcgccagtctgggaggctgaagctggaaaaatcgttggaccatgagacaaccaaatggtatcagttcagtatactcgcacggtgtacacaggacgaccacgaaatggtcgcatcagtggacgtgtcaattcaggttaaagatgccaatgacaattcgccagtctttgaatcatcaccttatgaggcgttcattgttgaaaatctgcccggtggctcccgtgtcatccagatccgcgcgtccgacgctgattccggcaccaatggacaagtgatgtacagcttagaccagagtcagagcgtagaggtcatcgaaagtttcgcaataaacatggagacgggttggattacaacactcaaggagctcgaccacgaaaagcgagacaattaccagattaaggtggtggcatcggatcacggagagaagatccagctgagctctacagcaatcgtcgatgtgactgtgactgatgttaacgactcaccgcctcgattcaccgccgagatctataaaggcacagtgtccgaagacgacccacaggggggcgtgatcgctattttgagcactactgatgcggattccgaggagattaatcggcaggtgacatacttcatcaccggcggagatccgctcggacaatttgccgtggaaacaatccagaatgagtggaaggtgtatgtgaaaaaacccctggatagagagaagcgagacaattacctcctcaccattactgccacggatggaaccttttccagtaaggctatcgtggaggtgaaagtgcttgatgctaacgacaatagccccgtctgtgagaaaaccctgtatagtgacaccattcccgaggacgtccttcccggcaaactgattatgcagatttcagctacagatgcagacattcgttccaatgccgagattacttataccctgctagggtccggggccgaaaagttcaagctgaaccccgatacgggagaattaaagacttcaaccccgctggacagagaggagcaggctgtctatcacctcctggtgagggccacagacggtggaggtagattttgtcaggcgagtatagtgctcaccttggaggacgtgaacgacaacgcacctgagttttccgctgacccctacgcaataaccgtgtttgagaacaccgagccaggaaccctgctaacaagagtacaggctacagatgcagatgcagggctgaatcgaaagatcctctattccctgattgattctgccgacggtcaattttccatcaatgagctatcagggataatccagctagagaagcctcttgatcgagaattgcaagctgtgtatactctcagtctcaaagcagttgaccaaggccttcctcgaaggctgacagctactgggaccgtaatcgtctctgtgctagacattaacgataacccccctgtgttcgaatatcgtgaatatggcgctactgtcagtgaggacatcctggtaggaaccgaagtcctgcaggtgtacgctgcttctcgggacattgaggcgaacgcggaaatcacatactccattatttccggaaacgaacacggaaagttctctatcgatagtaaaaccggggcggttttcattatcgaaaacttggactatgagtcaagccatgaatattatctcacagttgaggctaccgacgggggcactccctcgttgtcagacgttgctacagtgaacgtcaatgtgaccgatatcaatgacaacaccccggtgttttctcaggatacctacacgaccgtgatctcggaggacgctgtgctagagcagagcgtcatcaccgtcatggcagacgatgcagatgggccctccaactcccatattcactatagtatcattgatggcaaccagggctcctccttcacgatcgacccagtgcgcggcgaggtcaaggttactaagttgctggatcgtgaaaccattagcggctacacactcacagtgcaggcttcagacaatggatccccccccagggtgaatacgactacagtcaacatcgatgtgtcggatgtaaacgacaacgctccagtttttagcagggggaattactctgtgattattcaggaaaataagcccgtagggttcagcgtgctccagctggtagtgaccgacgaggattctagccacaacggaccaccattcttctttaccattgttaccggcaacgacgagaaggcttttgaggtgaatccacaaggggtgctgcttactagttccgcaattaaaaggaaagaaaaggatcattacctgctccaggttaaagtggctgacaacggtaaaccacagttgagctccttgacttatattgatatcagggtaattgaggaatcgatctacccacctgctattctgcctcttgaaatcttcatcacctcctccggagaggaatatagcggaggcgttatcggcaagattcatgcaaccgatcaggatgtgtatgacactttaacatactctctggacccgcaaatggacaacctgttttctgtgagctccaccggaggcaagctgatcgcccacaagaagctagatatcgggcagtatctgctaaatgtatccgtgactgacgggaaatttaccacagtggcagacatcacggtacacatccgccaggtgactcaggaaatgctgaatcacacaatcgccatacggttcgccaaccttacgccagaggaatttgtgggcgactattggaggaatttccagagagccctgagaaacattctgggcgtgcgacgtaacgacatccaaattgtgagtctgcagtcctccgagccccacccacacctggacgtgcttctgtttgtcgagaagcccggcagtgcacaaatctccacaaagcagcttcttcacaaaatcaactccagcgttaccgacattgaggaaatcattggcgtacggatcctaaatgtattccaaaaactgtgcgccggattggattgtccatggaagttttgcgacgaaaaggtgtctgtcgatgaatctgtgatgtccacccatagcacagctcgccttagcttcgtgactccgaggcaccaccgagcagctgtctgtctctgtaaggagggtcgctgccccccagtgcaccacggctgtgaagatgatccatgtccggaggggtccgagtgcgtgtcggacccatgggaggaaaagcacacatgcgtctgcccctctggtcggtttgggcagtgtccgggaagctcatctatgaccctaacagggaactcctacgtgaaataccgcctgacggaaaacgaaaataaactcgagatgaagcttacaatgcgcttgcgcacatattccacacacgcagttgtgatgtacgctcgaggaaccgactattccatcctagaaattcatcacggacgcctccagtataagttcgactgcgggtccggacccggtatcgtgagtgtccagtccatccaggttaatgatggacagtggcacgctgtggccttggaagtgaacggtaattacgccagactagtgctggatcaggtgcacacagcgtctgggacggctccaggcacactcaaaacactgaacttagacaattacgtgttctttggaggtcacattcgacagcagggaacccgccacggccggtcaccacaagtggggaatggcttcagggggtgtatggacagcatctatttgaacggccaagagctgccactgaatagcaaaccaagatcctacgcccacattgaggaatctgttgacgtgtcccccggttgctttttgactgcaacagaagactgcgctagtaacccttgccaaaacggaggcgtgtgcaacccctctccggccggcggttactattgtaagtgttccgctctgtatataggtacacactgtgagatttctgtgaatccatgtagcagcaaaccgtgtctctacggtggcacgtgcgtcgtggacaatggggggtttgtatgtcagtgcagagggctttacaccggccagaggtgtcagctctctccctactgtaaggatgagccttgcaaaaacggcggtacatgctttgatagtttggatggagcggtctgtcagtgcgatagcggattcaggggagagcggtgccaaagtgacattgacgagtgtagtggaaatccttgccttcacggagccctctgtgaaaatacacacggttcgtatcattgtaattgcagccacgagtatcgcggtcgccattgcgaagacgcagctccaaaccagtacgtatcaaccccttggaacattggcctggcggaaggcatcggcatagtagtcttcgtggccggcatcttcctgctcgtggttgttttcgtgttatgtcgcaaaatgataagccgaaagaaaaagcaccaggctgaacctaaagataagcatctgggcccagccacggctttcctgcaacgcccatactttgactcaaaacttaacaaaaacatctacagcgacatcccgcctcaggtgcctgtgcgtccaattagctataccccctctatcccgtcagacagccggaataatctggatcgaaattccttcgaaggctctgctatcccagaacatccagaatttagcacttttaaccccgagtccgtgcacggccaccgaaaagctgtggctgtgtgcagcgtcgcgccaaacctaccgcctcctcccccgagcaattcaccttcagatagtgattctattcagaagccttcttgggacttcgattacgataccaaagtagtcgacctagatccctgtctgtccaaaaagccgctggaagagaagcctagccaaccttacagtgcaagggagagcttgtccgaagtccaaagcctgagctcattccaatcagaaagctgcgacgacaatgggtatcactgggataccagtgactggatgccatccgtgccactccccgacatccaggagtttcctaattatgaggtcatcgacgagcaaacccccctctattcagccgaccccaacgccatcgatacagattactaccctggaggttacgacatcgagtccgacttcccaccaccacctgaagatttccccgctgccgacgaactcccaccactccctccagaattctccaatcaatttgaatctattcacccaccaagggacatgccagctgccgggagcctgggcagttctagcagaaaccgccagcgcttcaatctcaaccagtatctgcccaatttttaccctctagatatgtccgagccccagacaaaaggaactggagagaactcaacctgccgcgaacctcacgctccgtatccgccagggtaccaacgccactttgaggcaccggctgtagagagcatgccaatgtctgtgtatgccagcactgcaagctgtagcgacgtgtcagcttgctgtgaagtcgaatccgaagtcatgatgtcggactacgagagtggagatgacggccatttcgaggaggtgactatcccccccctcgacagtcagcagcatacggaagtctag

SEQ ID NO: 287654 - DNA, 1467 bp, Artificial Sequence
  derived and/or modified sequence
atgggccggcacctggccctgctgctgctgctgctgctgctgttccaacatttcggcgacagtgacggatcccaaagactagaacagacccccctccagtttacacacctggagtataatgttactgtgcaggagaattccgcagccaagacctacgtcggacatcccgtgaagatgggtgtttacattacacacccagcctgggaagtaagatataagattgtgagcggagatagcgagaatctgttcaaggcagaagagtatatactgggcgacttttgcttcttaagaatccgaacaaagggaggtaacacagcaatcctgaatcgggaggtaaaggatcattacactctgatcgtcaaggccctagaaaaaaatactaacgtcgaagcacgcaccaaggttcgcgtgcaggtactggatactaatgacctaagacccctgttttctcccacatcttattcagtgtccctccccgaaaatacagccatacgcacgtctattgctcgggtgagtgcaacggatgccgacatagggaccaatggcgagttctattatagttttaaggatcgtaccgacatgttcgccattcaccctacctcaggggtaattgtgctgaccgggcgtctggactacctcgaaactaagttgtacgagatggagatcctggccgccgatcgggggatgaagctctatgggagcagtggaatctccagtatggcaaaactgaccgtgcatatcgaacaagccaatgaatgcgccccagtgattaccgccgtaactctcagtccttcagaactggatagggatcccgcctacgctattgtaaccgtggacgattgtgatcagggcgctaacggggatattgccagtctttccatcgtggcaggagatctcctgcagcagttcagaactgtgcgtagttttcctgggagcaaagaatacaaggtgaaggctatcggggggatcgactgggattcacaccctttcggatacaatttaaccctccaggctaaagataagggaaccccgcctcagtttagctcagtgaaagtgatccacgtgacaagccctcagtttaaggctgggcccgtaaaatttgagaaagacgtctatcgagcagaaattagcgaattcgccccccccaacactcctgtggtaatggttaaggccatccctgcctactctcacctccgttacgtgttcaaaagtacaccaggcaaagcaaaattctccctgaactacaacactggactgataagcatcctcgaacccgtcaagaggcagcaggccgcccacttcgagctagaggttacgaccagtgacaggaaggcgtctaccaaggttctggtaaaggtcttgggtgctaactccaatccgccggaatttacccaaacagcctataaagctgctttcgatgagaatgtcccaatcggtacgaccgttatgtccctgtctgccgtttag

SEQ ID NO: 287655 - DNA, 13773 bp, Artificial Sequence
  derived and/or modified sequence
atgggtagacatctcgcacttttgttacttctgcttctgcttttccagcactttggcgacagcgacggcagccagagactggagcagacacccctgcagtttacccatctggagtataacgtgacggtacaggaaaatagtgccgcaaaaacttacgtggggcatcctgtaaagatgggtgtgtatattacccatcccgcttgggaagtgaggtataagattgtatcaggtgactccgagaatctgttcaaagccgaggagtatattctcggcgacttttgtttcttgcggattaggactaaaggtggcaacactgctatactgaaccgcgaggtgaaggatcattacacgttgattgttaaggccctggagaagaatactaatgtcgaggctcggactaaggtcagagtgcaggtcctggacacgaacgaccttaggccgcttttctcacctacatcttatagtgtatcccttcctgagaacacagcaattcggactagtattgctcgcgtgagtgctacggacgcagatatcggcacaaacggtgagttctactattcttttaaggatcggacagacatgttcgcgatccacccaacctctggcgtgatcgtgttaaccgggagactggactacctggagacaaagttgtacgaaatggaaatactggccgctgaccggggtatgaagttatacggtagcagcggaatttccagcatggcgaaattgactgtccacattgagcaagctaatgagtgtgcccctgtcataactgcagttaccctgtctccctccgagctcgaccgggatcctgcttacgctattgtcaccgtagacgactgtgaccaaggggctaatggtgacatcgcaagcctgagtatcgtcgctggcgacctgctgcaacagtttcgcaccgtgcgatccttcccaggctctaaggagtataaggtcaaagcaatagggggaattgattgggactcgcacccttttggttacaatcttaccctccaggcaaaggacaagggtactccacctcagttttcatccgtgaaggttatacacgtcacctctccccagtttaaggccggacccgtgaagtttgagaaagatgtgtacagagcagaaataagcgaatttgcgcctccaaacactccagtagttatggtgaaggccatccccgcttatagccacctgaggtacgtcttcaagtccacccccggaaaggccaaattcagtttaaattacaacacaggcttgatcagcatcctggagcctgttaaaagacaacaggctgcccatttcgagttggaggtgacaacaagtgaccgcaaggcatctactaaggtgctggtcaaagtgctgggagccaatagtaacccaccggaattcacccagaccgcttacaaggccgcattcgatgagaacgtgcccattggaactacagtgatgtctctctctgccgtcgacccagatgagggggagaacggatatgtgacgtacagtattgcaaatctgaaccatgtcccttttgcaatcgatcacttcactggcgctgtgagcacctccgagaacttggattacgaactcatgcccagggtgtataccctgcggataagggcctctgactggggattgccctaccgcagagaagtggaggtcttggctaccatcacgcttaataacctgaatgataacaccccgttattcgaaaaaatcaactgcgaaggcaccatcccaagggacctgggtgtgggggaacagatcactacggtttccgccatcgacgctgatgagctgcagctcgtgcaataccagatcgaagcagggaacgaactggatttcttctcactaaacccgaattcaggtgtcctctccctaaaaagatctttaatggatggcctcggggctaaggtcagcttccattcactgagaatcaccgcaaccgacggagaaaatttcgctactccactatacatcaacatcacagtcgctgcttctcataagttggtgaatctacagtgtgaagagacaggcgtcgctaagatgctggccgagaaattactgcaggctaacaagttgcacaaccaaggagaagtggaggatattttcttcgacagtcattctgtcaatgcacacattccccaattcaggtcaacactccctacaggaattcaggtgaaggagaatcaaccagtagggtcttcagttatcttcatgaattcgaccgacctggacactgggtttaatggcaaacttgtgtacgctgttagcggtggaaatgaagattcgtgtttcatgatcgacatggagaccggcatgctgaaaattctaagtccccttgatcgggaaacaaccgacaagtacacactgaatattaccgtgtacgacttgggaatcccacagaaagcagcttggagactcctacacgtggtggtagtggatgcgaatgataacccaccagagtttttacaagaatcatattttgtggaggtctcagaggacaaagaggtccactccgaaataattcaggtcgaagccaccgataaagaccttggccctaacgggcacgttacctacagcatcgttaccgatactgacacattctcaatagatagtgtgacgggtgtagtgaatattgccaggcctctggatcgcgagctgcagcacgagcattccttgaaaatcgaggcacgtgaccaggctcgggaggagccacaactcttctctacggtcgttgttaaggtgtccctcgaagacgtgaatgacaatccccctacattcatccctcctaactaccgggtgaaagtgcgcgaagaccttcccgaaggaacagtaatcatgtggctggaggctcacgaccctgatctcggtcagtctgggcaggtgcggtactctcttcttgatcatggggagggcaattttgatgtggacaaactgtctggcgctgtcaggatcgtgcagcaacttgacttcgagaagaagcaggtgtataacctaaccgtgcgtgcgaaagacaaggggaaacctgtctcgctgtccagcacttgttatgtggaggtggaggtagttgacgtgaatgagaacctgcatccacctgtgttcagttctttcgttgagaagggcactgtgaaagaagacgcccctgtgggcagtttagtgatgactgtgagcgcgcatgacgaggacgccaggagggacggggagataaggtacagcattcgcgacggatccggcgtgggtgtttttaagataggcgaggagaccggggtcattgagacgtcagatcggctggatcgagaaagcactagtcactactggctcaccgtcttcgccaccgaccagggagtagtgccgttgtcctccttcatcgagatctatatagaggtggaggatgtgaacgacaacgcccctcagacctccgagccagtctactaccctgaaataatggaaaacagcccaaaggacgtgagcgtagtccagattgaggccttcgaccccgacagctcctctaacgataaattgatgtacaagattactagcggtaatccccagggattttttagtattcatcccaagactgggctgattaccactactagccgaaagctagaccgcgagcagcaggacgaacatatcctggaggttacggtgacagataatgggtcaccaccaaaaagcactattgcgagagttatcgtaaaaatattagacgagaacgataataagcctcaatttcttcagaagttctataagattaggctcccagagagggagaagcctgaccgtgaacggaacgctcggcgtgaacctctataccacgtgattgctaccgataaggatgaaggtccaaacgcagaaatatcttattcgatagaggatggcaatgagcacggtaagttctttattgagccgaaaactggtgtcgtaagctcgaaaaggttttccgcagcgggtgagtacgacatcctgtctatcaaggcggtggacaacggaagaccccaaaagtcgagcaccacccgcttacacattgaatggataagcaagcccaagccttctctggagcctatttcattcgaggaaagtttcttcactttcacagtgatggagagtgatcctgtggcccacatgatcggagtgataagcgtcgagcccccaggtatcccactatggtttgacattaccggtggcaactacgactcccattttgacgtggacaagggcaccgggaccattatcgtcgctaagcccctggatgcagaacagaagtctaactacaatctgacagtcgaagctactgacgggactaccacaattttaactcaagtgttcatcaaagtgatcgatactaatgaccatagaccacagttctctaccagtaagtacgaggtcgttattccagaagatacagcaccagagaccgagattttgcagatatcggctgtggaccaggacgagaagaacaagctgatctacaccctgcaaagctcgagggacccgctgtcccttaagaaattcagactggatcccgctactggttctctgtatactagcgaaaagctggaccatgaagccgtgcccgctcacctcacagtgatggttagggaccaggacgttcccgttaagagaaatttcgccagaatcgtggtgaacgtaagtgacaccaatgatcacgctccatggttcactgcctcatcttataaaggacgagtgtatgaaagtgcagctgtcggcagcgtcgttctccaggttactgcccttgataaagacaagggcaagaatgcggaggtgctatactccatcgagagcggcaccttcggtaacattggtaatagctttatgattgacccggtcctgggctcgataaaaacggctaaggaacttgaccgctcgaaccaggcagaatacgatctcatggttaaggcgacggacaaaggatcacctcctatgtcagaaatcacctccgtaagaatctttgtgactattgccgacaacgcatctcccaagttcacaagtaaggagtattctgtggagctctctgaaactgtcagtattgggagcttcgtaggaatggtgaccgcacattctcagtcgagcgtggtgtacgagataaaggatggaaacaccggtgatgcattcgacattaatcctcactcaggaacaatcattactcaaaaggcattggactttgaaaccttgcctatctacactctgattattcaaggcacaaacatggctggcctctctaccaatacgaccgttttggtacacctgcaggacgaaaacgataacgctccggtttttatgcaagctgagtatacagggctaatcagcgaatcagcatccattaacagcgtggtgttgacagatcgcaatgttcctttggtgatcagagctgctgatgctgataaagattccaatgcactgctcgtctaccatatcgtagaacctagtgtccatacatacttcgctatcgacagttctactggggctattcatacagtactcagtctcgactacgaagagactagtatattccatttcacagtgcaggtgcacgacatgggaactcccagattgttcgccgagtatgcagcgaacgtcactgttcacgttattgatattaatgactgcccaccggtttttgccaaacccctttatgaagcttctctgcttttgcctacgtataaaggcgtgaaggtgatcactgtgaacgctactgatgctgatagtagcgctttcagtcagctgatctactccatcactgaggggaatatcggggaaaagtttagtatggactacaaaaccggtgccttgacagtgcagaataccactcagctgagatctcgatacgagctgaccgtgagggccagcgacggccgatttgctggcctaacttccgttaagatcaacgttaaggaatcgaaggagagccacctgaaatttacacaggacgtgtattccgctgttgtgaaggagaatagcaccgaagcagagactttggccgtcatcacagcgattggaaatcctatcaacgagcccctcttctaccacatacttaacccagatcgcaggtttaagatttcaagaaccagcggagtgttaagcacaaccggcacgcctttcgacagagaacagcaggaggcattcgatgtggttgtcgaggtcacagaagagcacaagcctagtgccgtggctcatgtagtggtgaaggtgattgttgaggatcagaacgacaatgcccctgtatttgttaacctaccttactacgccgtcgtgaaagtggacaccgaagtgggtcacgtgattcgttacgtgacggccgtagacagggactctggtcgcaatggcgaggttcattattatctgaaagagcatcatgagcattttcagattggcccactaggcgaaataagtctcaagaagcagtttgagctagacactctgaataaggagtatcttgtgaccgtcgtcgccaaagatggaggaaatcctgcattttcagctgaggttattgttcccattaccgttatgaataaagctatgcctgtgtttgaaaagcctttttattctgccgaaatagctgagtcgatacaggtacacagccctgtcgtacacgttcaggctaattcccccgagggtttaaaggtcttttatagcatcacagatggcgacccattctcgcaatttactatcaatttcaatacaggcgtgataaatgtgattgccccacttgatttcgaagctcaccctgcttacaaactgtccattagagctactgattccctgacgggcgctcatgcagaggtgttcgtagacattatcgtggatgatatcaacgataatcctcccgtattcgctcagcaatcctacgccgtgaccctgagcgaggcctccgtgattggcacgagcgttgttcaggtgcgcgctactgactctgattccgagcctaatcggggtatctcctaccagatgtttgggaatcattcgaagtcacacgatcactttcacgtcgactcatccaccggcctgatatcattgctcagaaccctggactatgagcaatccaggcaacacactatcttcgttcgcgcagttgacggcggaatgcctactttaagttccgacgtcattgtgactgtggacgtgacagacctgaacgacaacccccctctctttgaacagcaaatttacgaggccagaatatctgagcacgctccccacggacattttgtaacgtgcgttaaagcctacgacgcagattcttctgacatcgacaaactgcagtattcaatcctgtcaggtaacgaccataagcattttgtgattgacagcgctacagggataattacactttccaatctgcacagacacgctctgaagcctttctacagtctgaacctttcggtgagcgacggtgtcttcaggagtagcactcaggttcacgtgaccgtcattggcggaaacctacactctccagcttttttgcagaacgaatacgaagtggaactggcagaaaacgcaccattgcacaccctggttatggaagtcaagaccactgacggcgacagcggcatatatggccacgtgacttaccacatcgtgaatgatttcgctaaagatcgcttctatatcaacgagcggggacagatcttcactctcgaaaagctcgatagggaaacccccgcagaaaaggttatctctgtgcgtctcatggccaaggacgccggagggaaggtggcattttgcacggtcaatgtcatattaaccgatgataacgataatgcgccacagttccgagcaaccaagtatgaggtcaacatagggtcctcagcagccaaagggacctctgtggtcaaggtgcttgcgtcggacgctgatgaggggtccaacgccgacatcacatatgccatcgaagcggattccgaaagtgtgaaggagaatctggagatcaataaactcagcggtgtcatcaccactaaggaatcactgataggcttggagaacgagttcttcacattttttgtgagggccgtcgacaatggtagtcccagcaaggagagtgtcgtcctggtgtatgtgaaaattcttccccctgaaatgcaactccctaaattttctgagcctttctacacttttacagtttcagaagatgtaccgattgggactgagatagatctcatccgagcagaacatagcggcacagtgctgtacagtctggtgaaaggcaacactcccgagagcaatagagacgagagctttgtgatagatcgccaaagcgggcgattgaagctggaaaagtccctcgaccatgagactacaaagtggtatcagttctccatcctggcacgctgcacgcaagacgaccacgaaatggttgcatcagtggatgtgagcatccaagttaaggacgctaatgacaatagcccagtgtttgagtcttctccttatgaggctttcatcgttgaaaacctcccgggtgggtcccgcgttattcagatacgagcttcagatgcggacagtggtacaaatggacaggtgatgtacagtcttgaccagtctcaatccgtggaggtgatcgaatcctttgccattaacatggagaccgggtggattactacgctcaaagagctagatcacgaaaaacgggataactaccagattaaggtggttgccagtgaccacggggagaagattcagctgtcgagcaccgcgatagtcgacgttactgtgaccgatgtgaacgacagcccgccacgcttcaccgcggaaatttataaagggaccgtgtccgaggatgacccacaaggtggtgtcatcgccattctgtctacgaccgatgcagattccgaagagatcaatcggcaggtgacctactttattaccggaggggaccctctggggcagtttgccgtggagactattcagaatgaatggaaggtgtacgtcaagaagccgctcgatcgagaaaagcgggataactatttgctcaccatcacagccactgacgggacatttagcagcaaagcgattgtcgaagtgaaggtgttggatgccaacgataactctcctgtttgtgagaaaactctgtactctgataccattcccgaagatgtgctgcccggaaagcttattatgcagatctccgcaacggacgccgacatccggagcaatgctgagatcacatacactctgttaggaagcggggctgagaagttcaaattgaacccagataccggagagttgaagacatcaactccactcgatcgcgaagaacaggctgtgtatcacctgttagtgagagcgactgacggaggaggaaggttctgccaagccagtatcgtgttaactcttgaggatgtaaatgataacgctcctgagttttcagccgatccgtatgcgatcactgtgttcgaaaataccgaacctggcaccttgctgaccagggtgcaggctactgacgccgatgccggactgaatagaaagatactttatagtctgatagattccgccgatgggcagtttagcataaacgagttgtccggtatcatacagctcgaaaagcccctcgacagagaacttcaggcagtttatacattatcattgaaagccgtggaccaagggctccctcgtaggctaacagccacaggaacggttatagtgagcgtactagacataaacgacaaccccccagtattcgagtacagggaatacggggcaaccgtgagcgaggacatcctagtcggcacagaggtcctgcaagtatacgcggcttctcgtgacatcgaagccaacgcagagattacttatagcattataagcggaaacgaacacgggaaattttctatcgatagtaagacaggcgcagtttttattatagagaatctcgactacgaatcctctcacgagtactatcttaccgttgaagccaccgacggcggtaccccttcactttctgatgtagcaactgtgaacgtgaatgtgacagacattaacgacaataccccggtatttagtcaggatacatatactaccgttatttctgaagacgcggttctggagcagagcgtgattacagttatggcagatgacgccgatggacccagcaatagccatatccattacagcataatagatggaaatcagggctcttcgtttactatcgatccagtgcgcggagaggtgaaggtcacaaaattgctcgacagagaaaccattagcggatatacgctcacagtgcaggcctcggacaacggcagcccccctcgtgtcaacacaaccacagtgaatatcgatgtgagtgatgtgaacgacaacgcccctgtgttcagccgaggcaactattctgtaattattcaggaaaataagcctgtcggtttctccgtgctgcagctggtggtcaccgacgaggattcatcacacaatggaccgccttttttcttcactatcgtgacagggaacgatgagaaagcctttgaagttaaccctcaaggcgttctgctgacctcaagtgcaatcaagcggaaggagaaagaccactacctgttgcaggtgaaagtggcagacaatggcaaaccacagctgtcttccttgacctatattgacattcgggtgatcgaggagtcaatctaccctccggctatattacctctcgaaatcttcattacttcatccggtgaagagtatagcgggggtgttatcggaaagatacatgctaccgaccaagacgtatatgacaccctcacctattcactggatccgcagatggataatctgtttagtgtgagctccaccggaggaaagctgattgcccataagaagctggacattggacaatatctgttaaacgtttccgttacagacggcaagttcaccaccgttgctgacatcaccgtacacattcggcaggtcactcaggagatgcttaatcataccattgccattcgttttgccaatctcacacccgaagagttcgtgggggactactggagaaattttcagagggcactccggaacattctcggggtgcggcgaaatgacatccagattgtgtccttacaatcctccgaaccccaccctcacttagatgtgcttctctttgtagaaaagcccggatccgctcagatctctacaaagcagctgctgcacaagatcaacagcagcgttaccgacattgaggagattatcggagtccgcatattaaacgtgttccagaaactctgcgctgggctggattgcccctggaagttttgcgatgaaaaggtgtcagtagatgagtcagtgatgtccacccactccacagctcgcctgtcctttgtcacgccaaggcatcaccgcgcagccgtgtgcctgtgtaaagaaggcagatgccctcccgtgcatcatggctgcgaagatgatccttgtcccgagggatctgaatgtgtctctgacccgtgggaggaaaagcacacctgcgtgtgcccgagcgggagatttggccagtgccctggaagctcgagtatgacactgaccggtaactcatacgtgaaataccgattaacggagaatgaaaacaagttggagatgaagctgaccatgagattacggacttattccactcacgcagtggtgatgtacgcccgagggactgactactccatcctcgaaatccaccatggcaggctacaatacaagtttgactgtggatctggacctggtattgtttccgtgcagtctatccaggtcaatgacggtcagtggcacgcggtcgctctagaggttaacgggaattacgcacgacttgtgctggatcaggtgcatacggcaagtggaactgcacccggaaccctaaagaccttgaacctggataattatgtcttcttcggtggacatatcagacagcaaggaaccaggcacggtaggtccccacaggtgggtaatggtttcaggggttgtatggactctatatatttgaacgggcaggagttgcccctcaattcaaaaccgaggtcatatgctcacatcgaagagtccgtggatgtgagcccagggtgctttctgaccgcgaccgaagactgtgctagcaacccatgtcaaaatggtggggtgtgcaatccctcccccgctggcggttattactgtaagtgctctgccctttacatcggaacacactgcgagatttcggtcaatccatgctcttccaagccctgcctatacggaggaacctgtgtagtggataatggaggttttgtctgtcaatgccgcggactgtacactggacagcgttgccagctatcaccatattgcaaagacgagccttgtaagaatggcggtacctgctttgattcgctagatggggctgtatgtcaatgtgattccggatttcgcggagaacggtgtcagagtgacattgacgaatgctcaggaaacccatgcctgcacggtgccctctgcgaaaatacccacggaagctatcactgcaattgttcccacgaatacaggggccgtcattgtgaggacgccgcacctaaccagtacgtgtctaccccgtggaacattggtctagccgaagggatcgggatcgttgtctttgtcgctggtattttcctattggtggtggtcttcgtgttatgcaggaagatgatttcccgcaagaagaagcaccaagccgagcccaaggataagcacctgggccctgccactgcgtttctccagcgcccttattttgactcaaagctcaacaaaaatatctattcggatatcccaccgcaggtgcccgtacgcccaataagttatacacctagcatcccatctgatagtcgcaacaatctcgaccgcaattcctttgagggatcggccatacctgaacaccctgagttttcgaccttcaaccccgaaagtgtccatggtcatagaaaggcggtggcagtgtgttcagtagcacccaatttgcctcctccccctccttccaattcccctagtgactctgactccatacagaagccgtcttgggattttgattatgacacaaaggttgtggacctcgacccctgcctttcaaagaagcccttagaggaaaagccttcccaaccctactctgctagagagtcactgagtgaggtacagagcctttccagttttcagtcggaatcctgcgatgacaatggctaccattgggacactagtgactggatgccctccgtgccgcttccagatatccaggaattcccaaattatgaggtgatcgatgagcagacacccctatattcggctgatcctaacgctattgacacagactactaccctgggggatacgatatagaaagcgatttcccccctccaccggaagatttccctgccgcagacgagttgcctcccctgcctcccgagttctccaatcagttcgagtcaatccacccacccagagacatgcctgcagcgggttccctaggttcctcgagccggaaccgtcagcgcttcaaccttaatcagtacctccctaacttctatcccttagacatgagcgagcctcagacgaagggtaccggggagaactcaacctgccgcgagccccacgctccttacccacctggttaccagagacatttcgaggcccctgcagtcgaatccatgcccatgtcggtatacgcctcaactgctagctgtagtgacgtgtcagcctgctgcgaggtggaatctgaagtcatgatgtctgactacgagtcaggagacgacggtcacttcgaggaggtgacaatcccgccactggattctcagcagcacactgaagtctag

SEQ ID NO: 287656 - DNA, 13767 bp, Artificial Sequence
  derived and/or modified sequence
atgggcagacacttagcgctgctgttgttgctcctgctcttgttccaacatttcggcgactctgacggctctcagaggctggagcaaacaccactgcagtttacccacctggaatacaacgtgactgtgcaggagaactccgccgctaagacgtacgtggggcacccagtgaagatgggagtgtacattacacacccagcctgggaggtgcgttacaagatcgtcagcggcgactccgagaatctgttcaaagccgaggaatatatcctgggagatttctgtttcctgcgcattcggacaaaaggcggaaacaccgccatcctgaacagagaggtgaaagaccactacaccttaatcgttaaagcccttgaaaagaatactaatgtggaggcaagaaccaaggtccgtgtgcaggtcctcgatacaaatgatctgaggccgttgttcagccctacgagttactctgtgtcactgcccgagaatactgcgatacggactagtatcgctagggtgtcggccaccgatgctgatatcggcacaaatggtgaattttactactcatttaaggatcgcactgatatgttcgctatccaccccaccagcggagtcattgttctgaccggacgtcttgactaccttgagacgaaactgtatgaaatggaaattctggcggctgacagaggaatgaagctgtacggcagttcagggatatcgtccatggccaagctcacggtgcacatcgagcaagctaacgagtgtgctcccgtgattacggctgttaccctgagccccagtgagctggatcgggacccagcgtatgccatcgtgacagtggacgattgcgaccagggagcaaacggcgatatcgcgtcgctcagcatcgttgccggagacctgctgcagcaattccggacagtccgcagtttcccagggtctaaggagtacaaggtcaaagcaatcggcggaatcgattgggactcccatccttttggctacaacctcacattgcaggccaaggataagggcacgcccccacagtttagtagtgtcaaagtgatccacgtcacatctcctcagttcaaggcgggacctgtaaaatttgagaaagacgtttatcgtgcggaaatcagcgagtttgcccctcccaacactcctgtggtcatggtgaaagctatacccgcttactcccatttgcgctatgtatttaaatctacacccggaaaagctaaattctcattgaattacaataccggcctgatctctatcctcgaacccgttaagcgccaacaagccgcacactttgagctagaagttaccaccagtgatcgcaaggcctcaacaaaggtgctggtgaaggtgctgggggcaaatagcaatcctccagagttcacccagaccgcttataaagctgcttttgacgagaacgtccccataggaaccaccgtgatgtcgctttctgcagtggaccccgacgagggtgaaaatggatacgtgacttatagtatagcaaatctcaaccacgtccctttcgcaatcgatcacttcaccggggctgtgtccacttccgaaaacttagactatgaactgatgcccagagtgtacaccttgcggattcgggcatccgattgggggctgccttacagacgggaagtggaggtgctggccacaataacattgaataacctaaatgataatacccccctgttcgagaagatcaattgtgagggaaccatacctcgggatttaggtgtcggagaacaaattacgacagtgagtgctatcgacgccgatgaactgcagctggtacaataccagattgaagcgggtaacgaacttgacttcttcagtttgaaccccaactccggtgtgttatctctcaagcgctctctcatggacggactgggcgctaaggtgtcgtttcattctctgcgcataacggcgactgacggagaaaacttcgcgactcctttatatattaacatcaccgtcgctgcatcccataagctggtcaatttgcagtgcgaagaaactggcgtggcgaaaatgttggctgagaagctgttacaagcaaacaagctgcacaatcagggggaggtcgaagatattttcttcgattctcattccgtaaacgcccatatcccccagttcaggtctactctgcccactggcatccaagtcaaggagaatcaacccgtcgggagcagcgtaatcttcatgaacagcactgatctagacactgggtttaatgggaagctggtgtatgcggtgtcaggtgggaacgaagactcttgtttcatgatcgatatggagaccggcatgcttaaaatcctcagccctctggatcgagagactaccgataaatatactctgaatatcaccgtgtatgatcttggcattccacagaaagccgcatggcggctacttcacgtcgtggtggtcgacgctaacgataatcctccagagttcttgcaggaaagttacttcgtggaggtcagtgaggacaaagaggtccacagtgaaattatacaagtggaggctaccgacaaggacctcggaccaaacggccatgtgacatacagtattgtaaccgacactgataccttttcaattgactccgtgaccggggtggtcaacatcgcaaggccattagacagagaactgcaacacgagcattccctaaagatcgaggctcgcgatcaagcccgagaggagccacagctgtttagcaccgtggtggtgaaggtgagcctggaagatgtgaacgacaacccccctacattcattcctcccaattaccgggtgaaggtgagagaagatctgccagaaggtacagtgatcatgtggctggaggcccacgatccggatttggggcaaagcgggcaggtccgctacagtctcctggaccacggagaggggaacttcgatgtcgataagctctcgggcgcagtcaggattgtccagcaactcgatttcgagaagaaacaggtgtataatctgaccgtgcgagctaaagacaaaggaaagccagtgtctttatcctccacatgttatgtagaggtggaggtggtcgatgtgaatgagaacctgcaccctcccgtcttcagtagtttcgtggaaaaaggcaccgtgaaggaggatgctcccgtaggctccctagtgatgaccgtgagtgcacatgatgaagacgcacgacgcgacggcgaaattaggtatagcatccgcgacggcagcggtgtgggcgtattcaaaatcggggaagaaacaggcgtaatcgagacgtcagaccggttagatagggagagtacctcccactactggctaactgttttcgctaccgatcagggtgtcgtgcccttatcctcgttcatcgaaatctatatagaagtagaagacgtcaacgacaacgcccctcagacctccgagccggtgtattaccccgagatcatggaaaattcaccaaaagatgtttccgttgtgcaaattgaagcctttgacccagacagctcaagcaacgacaaactgatgtacaaaattacttcaggcaaccctcagggctttttttcaatacaccctaaaacaggccttattaccaccacgtctagaaaactggatcgcgaacagcaagatgagcacatcctcgaggttacggtcactgataacggctccccccctaagagcaccatcgctagggtcatcgtcaagatattagacgagaatgacaacaaacctcaatttctgcagaaattttataaaattaggctgcctgagagagaaaagccagaccgagaaaggaacgcccgtagagaaccactgtatcatgtgatcgccactgataaggatgaagggccaaatgctgagatctcctattctatagaggatggcaacgaacacggcaaattctttatcgagccaaagacgggagtggtcagctccaagaggttttctgctgcaggagaatatgacattctgtccattaaggccgtcgataacgggagaccgcagaaatcctccactacccggctccatattgaatggattagcaagcctaaaccttccctggaaccgatctccttcgaagagtctttttttacattcacggttatggaaagtgaccctgtcgcgcatatgataggggtgatctcagttgaacccccaggtatcccgctgtggtttgatattacaggcggaaactatgactcacactttgacgtcgataagggcacaggtacaatcattgtggccaagccactcgacgctgagcaaaagagcaattacaatctcacagtcgaagccacagacggcaccacaaccattctgacccaggtctttatcaaggtaatcgataccaatgatcaccggccacaattcagtacttctaagtacgaggtggtcatccctgaggatactgctccagaaacagagatcctccagatttctgcggtagatcaggacgagaaaaacaagttaatctacactttacagtctagtcgggatcccctctccctgaagaagtttaggctcgatccagccaccgggagtctgtacacaagtgaaaagctggatcatgaggcagtgcatcagcacaccctgacagtcatggtcagggatcaggatgtcccagtcaagagaaacttcgcacggattgtggtgaatgtgagtgacacaaatgaccatgcaccctggttcaccgcctcgtcatacaagggacgcgtctatgagagcgcagccgttggatcagttgtactacaggtgacagcactagataaagacaagggtaagaacgcggaggttctatactcaattgagtctgggaacataggcaattcctttatgattgatcctgttctcgggtctatcaagaccgcaaaggagttggataggtccaaccaggcagaatacgatctcatggtgaaagccacagacaagggcagcccgcctatgagtgagataacttccgttaggattttcgtgaccatcgccgataatgcctccccaaagttcacctctaaggaatactctgttgaactatcggagaccgtgtccattggctccttcgttgggatggtgaccgcccactctcagtcctccgtcgtctacgaaatcaaggatgggaacacaggagacgcctttgatattaacccacactccgggaccatcatcactcaaaaggcgttggacttcgaaaccctccctatttatacccttataatccaaggaacgaatatggccggattatctacgaacacgaccgtgctagtccatctccaggatgagaatgataatgcaccagtgtttatgcaagccgagtacactggcctgatcagtgaatccgcttctatcaattctgttgtactgactgaccgtaacgttccattggttatcagagcagcagacgccgacaaggatagcaacgccttactggtctaccacattgttgaaccaagtgtccacacttacttcgcgatcgatagttctactggcgctatacacaccgtactcagccttgattatgaggagaccagcatatttcatttcaccgtgcaagtacacgatatgggtacaccaaggttgttcgcggaatatgccgctaacgtcacagttcacgtcatcgacatcaacgactgccctcccgtgtttgccaagccgctgtacgaggctagcctgttgctcccaacctataaaggcgtcaaagtaatcaccgtcaatgccactgatgcggactcatcagctttcagtcagctcatttatagcattaccgagggaaacatcggagagaaattctccatggattacaagaccggagcactcacggtgcagaatactacccagctcagatctcgctatgaactgacggtgagggcgtccgacgggaggtttgccggattgacatctgtgaaaatcaacgtgaaagagtcaaaagagtctcatctcaagttcacccaggatgtctatagcgctgtcgtcaaggaaaacagtactgaggccgaaacacttgctgtgattaccgctattggcaaccccatcaatgagccgctgttttatcatatactaaaccccgacaggcgcttcaagatttcccgtacatcaggagttctgagcaccaccggaaccccgtttgaccgggaacaacaggaagcattcgatgtagtcgttgaggtgactgaggagcataaaccctccgcagttgcacacgtcgtggtgaaggtgattgtggaagaccagaacgataatgcaccggtcttcgttaatctcccctactacgctgtggtgaaggtagacaccgaagtgggtcacgtgattagatatgtcactgctgtcgaccgcgattccggcaggaatggagaggtacattattatctcaaagaacatcacgagcactttcaaatcgggccactgggagagatctctctgaagaaacaattcgaattggatacactgaataaggaatacctggtgactgtggttgctaaggacggtgggaacccagccttctcagcagaggtaattgtgccaatcacagtgatgaataaggctatgcctgtctttgaaaagcccttctactcggctgagatcgccgagtcaattcaggtccactcccccgtggtacatgttcaggccaatagcccggagggtttaaaggtgttttattccataacggatggcgatcccttcagccagttcaccatcaacttcaataccggggttatcaatgtgattgcgcctctggactttgaagcccaccccgcatataagctgtcaattagggcaactgatagtctgacaggggctcatgcggaagttttcgtggatatcattgtagatgacattaatgacaatcccccagttttcgctcagcagtcttatgcagtcacgctctcagaggcatctgtgattggtacgtcagtggtacaggtgcgagcaactgattcagactcggaaccaaaccgcggaatctcttatcaaatgttcgggaatcacagtaaaagccatgatcacttccatgtggacagctccaccggacttatcagtctgcttaggacactggattacgaacagagtaggcagcataccatcttcgtgagggccgttgatgggggaatgccaaccctttcctccgacgtaattgtgactgtggatgtgacagacctcaatgataacccgccactattcgaacagcagatctacgaggccagaatatccgagcacgcccctcatggccacttcgtgacctgcgttaaggcatacgatgccgactcctctgatattgacaaactccaatactcaatcctaagcgggaacgatcacaagcactttgttatcgatagcgccaccggaattattacgctgagcaatcttcataggcacgcactgaaacctttctattcactcaacttatcggttagcgatggggtgttcaggtcttccacccaagtccacgtcactgtgatcggcggaaacttgcacagtcccgcttttctacagaacgagtacgaagtcgaactggcagagaacgctccactccacacactcgttatggaggtcaaaaccaccgacggagattccggcatttatggacacgtgacctaccatatagtaaatgacttcgcgaaggacaggttttatattaatgagaggggtcagatcttcaccctcgagaaactggaccgagaaacacctgctgagaaagtaatttccgttcggttaatggccaaggacgcaggagggaaggtggcgttttgcaccgtgaacgtgatcctcaccgacgataacgacaatgccccacagttccgggcaacaaagtatgaggtcaatattgggtcttctgctgcaaaagggacaagtgtcgttaaggtactcgcctctgatgcagatgaggggtctaatgctgacataacatatgccatagaagcagatagtgagagtgttaaggaaaatctcgagattaataagctgtctggagttattacaaccaaagaatctctgatcggacttgaaaacgagttctttacattcttcgtgagggcagtcgataatggttccccatccaaagagtctgtagtgcttgtttacgtcaaaatcctccccccagagatgcagctgccgaagttttccgaacccttctacactttcactgtatctgaagacgtgccaatagggaccgaaatcgatctcatcagagccgaacacagcggtacggtgctgtacagtttggtgaagggcaatactccagaaagcaacagagacgagtcttttgtgatcgacagacagtctggcagactgaaactcgaaaaaagcctcgatcacgagaccactaagtggtaccagttctctatactggccaggtgtacccaagacgatcacgagatggtcgcaagtgtcgatgtcagcatccaggtgaaagacgccaatgataatagtcccgtgtttgaatcctccccatatgaggcttttatagtggagaacctgcctggcggaagccgcgtgatacaaatcagggcaagtgacgctgactctgggacaaacggtcaagtgatgtattcactggaccagagccagtctgtagaagtgattgagtcttttgcgatcaatatggagacaggatggattaccactctgaaagagctcgaccatgagaaaagggacaattaccagatcaaagtcgtagcttctgatcatggcgagaaaattcagctttcgagtacagcaatcgtggacgtgactgtcacagatgtgaatgatagcccaccacgattcacagccgagatatataaaggaaccgtcagtgaagatgacccacaggggggtgtaattgctatcctgagcacaacagatgccgactcagaggagattaaccggcaggttacctattttatcacgggtggcgatcctttgggacagtttgccgtcgagacaattcagaacgaatggaaagtttatgtcaagaagccgctggatcgggaaaaaagagataactacctgctaaccattactgccacagatggtacattctcatcgaaggccatcgttgaggtaaaggtgcttgacgctaatgataacagcccggtctgcgaaaaaactctgtatagcgacacaattcctgaagatgtgctacccggtaaactgattatgcagatctctgccactgatgctgacatacgcagcaatgcagaaataacttacacactcctcggaagcggagccgaaaaatttaagctaaacccagatacaggtgaactcaagacctccactccacttgacagagaggagcaggctgtgtaccacctgcttgtgcgagcaactgatgggggtggcaggttttgccaggcaagtattgtgcttaccttagaggacgtaaacgacaatgcacccgaatttagtgcagacccctacgcaatcaccgtgtttgaaaacaccgaacccggtactttactgacaagggtgcaggctacagatgcggacgccggactgaatcggaagattctctatagcctcattgattcagccgatggacagttcagtataaatgagctgtccggcatcattcaattggagaagcctctggacagggaactgcaagcagtgtatactctgtccctgaaggccgtggatcagggcctaccccgaaggctgaccgccaccggcaccgtgatcgtgtctgttctcgacatcaacgacaacccccctgtcttcgagtatcgggaatatggagccaccgtgtctgaagacatcttggtaggtaccgaggttctccaggtgtatgctgcgtctcgcgatatagaagcgaacgctgaaatcacctactccatcatctccggaaatgaacacggcaaattctccatcgattccaaaactggcgcagtatttattatcgagaatctggactacgagtcatcccatgaatactatttgacagtagaagccacagatggaggtactcctagtctaagtgatgtcgccactgttaacgtgaatgtgaccgatatcaacgataatactcctgtcttttcacaggatacatataccaccgtgatttcagaagatgccgttctagagcaatccgttatcaccgtgatggctgacgacgcagacgggccttctaactcccacatccactactctataattgatgggaaccagggttcgtccttcactatcgaccctgtccggggtgaggtgaaggttactaagttgctggacagggagactatcagcggttatactttgactgttcaggcctcggataacggcagccccccaagagtcaatacgaccaccgtcaacatcgacgtatctgacgtaaacgataatgctcccgtattcagtagaggtaactacagtgtcatcatccaggagaataagcctgtgggatttagcgttttgcagctcgtggttacagacgaagattccagtcacaacgggcctccatttttctttacgattgtgacaggcaacgacgaaaaggccttcgaagtgaatccccaaggcgtactactaacttcttccgctataaagcggaaggaaaaagaccactatctgttgcaggtgaaggtggctgataatgggaagccacagctgtcttctttgacatacatagacattcgcgtcattgaagagagcatctaccctccagccatcctcccccttgagatattcattacctcctctggtgaggagtactccggcggagtgatcggaaagatccacgccaccgatcaagacgtgtatgacacgctgacatatagtctggatccacagatggataatctgttttcagttagctctaccggtggaaagctgatcgcacacaaaaagctggacattggccagtaccttctcaatgtcagcgttaccgacggaaagttcacgaccgttgccgatataactgtgcatatacgacaggtgacccaggaaatgctcaaccacactattgcaattaggttcgccaatctgacacccgaggaattcgtgggcgactactggcgcaatttccagcgggctctcagaaacatcttgggcgtgcgccgtaacgacatacagatcgtatctctgcagagtagtgagccacacccacacctggatgtactgctgttcgtggagaagccgggaagcgcacagatttctaccaaacagctgctccataaaattaatagtagtgttaccgacattgaagaaataatcggcgttcgaatcctgaacgtgttccaaaaactctgtgcagggttagactgcccatggaagttttgtgatgagaaggtctctgttgatgagtcagtgatgtccacccattcgactgccaggctttcttttgtgacacctcgtcatcaccgagctgctgtgtgtctatgcaaggaaggcaggtgtcctccagtgcatcacggctgtgaagatgatccatgtcccgagggtagcgaatgcgtgtctgatccctgggaggagaaacacacatgcgtctgtccttctggcagatttggccagtgtcccggatctagcagtatgaccctgacaggaaatagttatgtcaaataccgactcacagagaatgagaataagttggagatgaagcttacaatgcggttaagaacctatagtacccacgcagtggtcatgtatgccaggggcacggactactccatcctggaaattcaccacggccgacttcagtataaattcgactgtggctccggaccgggtatagtcagcgtccaatcaatacaggttaatgacgggcaatggcatgcggttgcactcgaggtgaacggaaattacgcaaggcttgtgctggaccaagtgcacactgctagcgggactgcccctggaaccttgaaaactctaaacttggataactacgttttcttcggagggcacatccggcaacagggcacacgtcatggcaggtcgccccaggtgggcaatggctttcggggatgcatggattccatctatctgaacggccaggaactgccgcttaattctaagccacggtcctatgcacatattgaagagtcagtagacgttagtcctggatgctttctgacagcaactgaagattgcgcatctaacccttgccagaacggcggtgtgtgcaatcccagccctgcaggcggatactactgcaaatgttccgccctttatataggaacgcactgcgaaatctcagtcaatccatgcagtagcaaaccttgtctgtacgggggtacttgcgtcgttgacaatgggggttttgtatgtcagtgtagagggctgtacaccgggcagagatgccagctcagtccatattgtaaagatgaaccctgtaaaaatgggggaacatgttttgatagtctcgacggcgctgtctgtcagtgcgactctggctttcgaggggagaggtgccagagcgacatcgatgagtgtagtggcaacccatgtctgcacggcgctctctgtgagaatacccatggaagctaccactgcaattgtagccacgaatatcggggaagacattgcgaggacgccgctcccaaccaatacgtctctacaccttggaacatagggctcgcggagggcatcggaattgtggttttcgttgccggaatctttctgttagtagtggtcttcgtcctatgcaggaaaatgatctccagaaagaaaaaacaccaggcggaacctaaggataagcacctcggacctgcaaccgcctttctgcagcgaccctattttgattcaaagctcaataaaaatatatactccgacattccaccacaggtgcccgtgcgacctatcagctacacaccatctatacccagcgattctagaaacaaccttgaccgtaatagcttcgagggatcggccataccggagcacccagagtttagtacattcaacccagaatctgttcatgggcaccgtaaggccgtcgccgtctgtagtgtggccccaaacttaccgccaccccctccaagcaattctccttccgattccgattctatacagaagccttcatgggatttcgactatgacaccaaggttgttgacctggacccctgcctgtccaagaagcccttggaggaaaaaccttctcagccttactccgcgagagagtctctgtcagaggtgcagagtttatcctccttccagtctgaaagttgtgatgacaatggataccattgggatacgtctgattggatgccctctgtgcccctgccggacatccaggagttccctaactacgaagttatcgatgagcagaccccactttatagtgctgatccgaacgctatcgatacagactattatcctgggggatacgatatcgagagcgatttcccgcctcctcccgaggactttcccgctgcagatgagctcccacccctcccccctgagttttctaaccagttcgagagtattcacccgcctcgtgacatgccggctgccggatcccttggctcaagctcacgaaaccgccagaggttcaatctcaaccagtatcttcccaacttctatcccctggatatgagcgaacctcagacaaaagggacaggtgagaattcaacttgccgcgagccccacgcaccatatcctcccggttatcagcgccacttcgaggctccagcagttgagagcatgcctatgtctgtctatgcttccacggcctcttgttcggacgtgtctgcgtgctgcgaagtggagtccgaggtgatgatgagcgattatgagagtggcgacgacggacattttgaagaagtgactatccctcctctcgattcccagcagcacactgaagtgtag

SEQ ID NO: 287657 - DNA, 1467 bp, Artificial Sequence
  derived and/or modified sequence
atgggacgccacctggcactgctgctgttgctcctgctgctttttcaacacttcggtgattctgacgggagccagaggctcgaacagaccccactccaattcacccatctggagtataatgttacagtgcaggaaaattccgcagctaaaacatacgtgggacatcctgtcaaaatgggggtgtacattacccatcccgcatgggaagtgaggtataagatcgtgtccggggattccgagaacttattcaaggctgaggagtatattttgggagatttttgctttctcaggattcgcacaaaagggggtaacaccgccatcttgaacagagaggttaaagatcactatacactaatcgtaaaagcgctggaaaaaaacactaatgtagaggccagaactaaggttagggtgcaggtcctcgacactaacgacctaaggccactgttcagccccacatcctactccgtgagccttccagagaataccgccataagaacatccatagccagagtgtctgcgaccgatgcagatataggcaccaatggcgagttctactacagcttcaaggataggaccgatatgtttgctatccatccaaccagcggcgtgatcgtgctgaccggcaggctcgactacctagaaactaagctctacgagatggagatactggctgccgatcgcggaatgaaattatatggaagctcaggcatctcttccatggccaagctcactgtgcacatcgagcaggccaacgagtgtgcgccagttattaccgcggttaccttgtcccccagtgagctggatagagatcccgcttatgctattgtgacagtggacgactgtgaccagggcgctaacggcgacattgcctctctcagtatcgtcgccggagacctgctgcagcaattccggacagtgcggtctttccctgggagcaaggagtataaagtgaaggccatcggagggatcgactgggactcgcacccttttggatacaacctcaccctgcaggccaaagataagggcacacccccacagttttcctcagtaaaggtcatccacgtcacttctccccagtttaaggccggacccgtgaagttcgaaaaagacgtgtacagagccgagatcagcgaattcgcccctccaaacacgcctgtagttatggtgaaggcaatccctgcatattcccatctgcggtacgtattcaagtcaacaccagggaaagccaaattcagcctcaattataatactgggctcatttcgatcttggagcccgtcaaaagacagcaggcagcccacttcgagcttgaggtgacaacatcggatcgaaaggcatctaccaaagtgctggttaaagtcctaggggctaattcaaatccccctgaattcacccaaaccgcctataaggcagcctttgacgaaaacgttccaattggcaccaccgtcatgagcctgtccgctgtgtag

SEQ ID NO: 287658 - DNA, 423 bp, Artificial Sequence
  derived and/or modified sequence
atggccagctacccctaccggcagggctgccccggcgccgccggccaggcaccgggggcacctccaggtagctattatcccggccccccaaactcagggggtcagtacggatctggactgcctcccggtggtggatatggtggtcctgcacccggcgggccttacggaccacctgccgggggaggtccatacggccacccgaatcccgggatgttccccagtggcaccccaggggggccctatggcggagccgcccccggcggtccttacggccagccacccccttcctcatatggagctcagcaacccggactctacggccagggcatccatgctgagggagcagcacccgtatgggatatgctgtctttgtggcagagagagggtgccggagagctcgcacggatgcataatgctagttag

SEQ ID NO: 287659 - DNA, 438 bp, Artificial Sequence
  derived and/or modified sequence
atgaaaagagtcttggtgctgcttttggccgtcgcatttggacatgcactcgagaggggccgagattacgagaagaacaaagtgtgcaaggagttcagccacctcggcaaggaggattttacaagtttgagcttagtcctgtactcacggaaattcccctctgggacctttgagcaagtgtcccagctggttaaagaagtcgtgtccctgacagaggcctgttgcgccgaaggagccgatccggactgctacgatacaaggacatctgctctgtccgctaagagctgtgagagtaactccccatttcccgtgcatccagggaccgccgaatgctgcactaaagagggcctggaaaggaagctgtgcatggccgccttgaaacaccagccgcaagagttccctacgtacgtggagcctactaacgatgaaatctgctag

SEQ ID NO: 287660 - DNA, 438 bp, Artificial Sequence
  derived and/or modified sequence
atgaagagggtgctggtgctgctgctggccgtggcctttggacatgccctggagcggggccgggactatgagaagaacaaggtgtgcaaggagttcagccacctgggcaaggaggacttcaccagcctgagcctggtgctgtacagcaggaagttccccagcggcacctttgagcaggtgtcccagctggtgaaggaggtggtgtccctgacagaggcctgctgtgccgagggcgctgaccctgactgctatgacaccaggaccagcgccctgagcgccaagagctgtgagagcaacagccccttccctgtgcaccctggaacagctgagtgctgcaccaaggagggcctggagaggaagctgtgcatggccgccctgaagcaccagccccaggagttccccacctacgtggagcccaccaatgatgagatctgctag

SEQ ID NO: 287661 - DNA, 438 bp, Artificial Sequence
  derived and/or modified sequence
atgaagcgggtgctggtgctgctgctggccgtggccttcggccacgcactcgaaagaggacgtgactatgagaagaacaaggtgtgcaaggagttttctcacctgggcaaagaggacttcactagtctctctctcgtgttatactccaggaagttccctagtggaacttttgaacaggtgagccaactggttaaagaggtagtgtctctgaccgaagcgtgctgcgccgagggggctgacccagactgttacgatacccggacttccgcattatccgcaaagtcctgtgagagtaatagcccttttcctgtacacccaggtaccgcggagtgttgcactaaggaagggctggaaagaaaactctgcatggctgccttaaaacatcaaccacaggagttccctacctacgttgagccaaccaacgatgagatttgttag

SEQ ID NO: 287662 - DNA, 438 bp, Artificial Sequence
  derived and/or modified sequence
atgaaaagagtgctggtgttgctgcttgctgtcgcctttgggcatgctctggaacggggtcgcgattacgaaaagaataaagtctgtaaggaattcagtcatttgggcaaagaagatttcactagtctgtcactggtcctttacagtcgcaagtttcccagtggcacgttcgaacaggtgagtcagctggtgaaggaggttgtttccttgactgaggcctgctgtgccgagggtgctgaccctgactgctatgacacccggacttcggcactgtctgctaagagctgcgagtcaaattctcccttcccagtccatccgggtactgccgagtgttgcaccaaggaaggattagaaagaaagctgtgtatggcagctttgaaacatcagccccaggagttcccaacctacgttgagcctaccaatgatgagatctgctag

SEQ ID NO: 287663 - DNA, 438 bp, Artificial Sequence
  derived and/or modified sequence
atgaagagagtgctggtgctgctgctggccgtggccttcggccacgccctggagagaggcagagactacgagaagaacaaggtgtgcaaggagttcagccacctgggcaaggaggacttcaccagcctgagcctggtgctgtacagcagaaagttccccagcggcaccttcgagcaggtgagccagctggtgaaggaggtggtgagcctgaccgaggcctgctgcgccgagggcgccgaccccgactgctacgacaccagaaccagcgccctgagcgccaagagctgcgagagcaacagccccttccccgtgcaccccggcaccgccgagtgctgcaccaaggagggcctggagagaaagctgtgcatggccgccctgaagcaccagccccaggagttccccacctacgtggagcccaccaacgacgagatctgctag

SEQ ID NO: 287664 - protein, 995 aa, Artificial Sequence
  derived and/or modified sequence
MDDSVVIPSHQVSTLAKEAERNSYRLSWGTENLDNVALSSSPIHSGFLVSFMVDARGGAMRGCRHNGLRIIIPPRKCTAPTRVTCRLVKRHRLATMPPMVEGEGLASRLIEVGPSGAQFLGPVIVEIPHFAALRGKERELVVLRSENGDSWKEHFCDYTEDELNEILNGMDEVLDSPEDLEKKRICRIITRDFPQYFAVVSRIKQDSNLIGPEGGVLSSTVVPQVQAVFPEGALTKRIRVGLQAQPMHSELVKKILGNKATFSPIVTLEPRRRKFHKPITMTIPVPKASSDVMLNGFGGDAPTLRLLCSITGGTTPAQWEDITGTTPLTFVNECVSFTTNVSARFWLIDCRQIQESVTFASQVYREIICVPYMAKFVVFAKSHDPIEARLRCFCMTDDKVDKTLEQQENFAEVARSRDVEVLEGKPIYVDCFGNLVPLTKSGQHHIFSFFAFKENRLPLFVKVRDTTQEPCGRLSFMKEPKSTRGLVHQAICNLNITLPIYTKTETTTEIHPQDEQERIEERLAYIADHLGFSWTELARELDFTEEQIHQIRIENPNSLQDQSHALLKYWLERDGKHATDTNLVECLTKINRMDIVHLMETNTEPLQERISHSYAEIEQTITLDHSEGFSVLQEELCTAQHKQKEEQAVSKESETCDHPPIVSEEDISVGYSTFQDGVPKTEGDSSATALFPQTHKEQVQQDFSGKMQDLPEESSLEYQQEYFVTTPGTETSETQKAMIVPSSPSKTPEEVSTPAEEEKLYLQTPTSSERGGSPIIQEPEEPSEHREESSPRKTSLVIVESADNQPETCERLDEDAAFEKELTEELGELEASSDEEAMVTTRVVRRRVIIQGDDMPEIPPETVTEEEYIDEHGHTVVKKVTRKIIRRYVSSEGTEKEEIMVQGMPQEPVNIEEGDGYSKVIKRVVLKSDTEQSEVTLCEPSILSSTSQFQAEPVEGRRVSKVVKTTVVLGERMEKHLGDSSLATDLPSAKDDFEE

SEQ ID NO: 287665 - DNA, 2988 bp, Artificial Sequence
  derived and/or modified sequence
atggacgattccgtagtgattccatcccaccaagtgtcaacgctggcgaaggaggctgagcgcaacagttatagactttcctggggaacggaaaacctggacaatgtggcattgtcttcttcccccatccattcggggtttctcgtgagtttcatggtggatgcaagaggcggggccatgaggggctgtagacataacggcctgaggattatcattcctcctagaaaatgtaccgccccaacaagggttacttgtagactcgtgaagaggcaccgcctggctactatgcctccgatggtggaaggagaaggactggcctctcgcctcatcgaagttggcccttcgggcgctcagtttctgggccctgtcatcgtggagatcccccacttcgcagctcttagaggaaaggaacgagaacttgtggtgctcaggtctgaaaacggagattcgtggaaggaacacttctgcgattatacggaggacgagctgaatgaaatcctcaatggcatggacgaggtccttgattccccggaggatttggaaaaaaaacgaatttgtagaatcataacccgcgacttcccacagtattttgcggttgtatcgaggatcaagcaggattccaacttgattggacctgaaggtggcgtgctgtcgtccaccgtcgtcccccaggttcaggccgtctttccggaaggggcattgacgaagcgaatccgggtgggcctgcaggcacagcccatgcactctgagctagtgaaaaagatcctcgggaataaggcaacctttagccctatcgtcacactcgaaccaaggaggcgtaaattccataagcccattactatgactatcccagtgcccaaagcaagctcagatgttatgttaaacgggttcgggggagatgctcccaccctcaggttactttgcagcattacagggggaaccacaccagcacaatgggaggacataactgggaccacgcccttgacttttgtgaacgagtgcgtgtccttcacgaccaatgtaagcgcaagattttggctgattgattgccgccagatccaggagtcagttacttttgcgagccaggtctacagggaaattatctgtgttccctatatggccaagtttgtggtttttgcgaagagccatgatccaattgaagccagactgcgttgtttctgcatgaccgacgacaaggtggataaaaccctggagcagcaagagaactttgcagaggtggcccggtccagggatgtagaagttttggagggaaagcccatttatgtggattgttttggtaatctcgtacccctcacgaagtccggacagcaccacatcttttcgttttttgcgtttaaggaaaaccgactccctctatttgtaaaggtgcgggataccactcaagaaccgtgcgggcgccttagtttcatgaaggagcccaagtcaactagaggcttggtgcaccaggctatttgcaatctgaacatcaccctgcctatctacaccaaaactgaaacaaccactgagattcatccacaggatgagcaggagcggattgaagaaagacttgcctacatagcagatcatttgggttttagctggactgagctggcacgggaactcgattttacagaggagcaaattcatcagatccgtatagagaatcccaattccctgcaggatcagagccatgccctactgaagtattggctcgagcgagacggaaaacatgctacagatacaaacctcgtggagtgtctgactaagattaataggatggatatcgtgcatcttatggaaactaatacagagccactgcaggagcgcattagccatagttatgctgagatcgagcaaaccattacactggaccattcagagggcttctccgttctgcaggaagaactgtgtacagcccagcacaaacagaaggaggagcaggccgtgtctaaagaatcagagacatgtgatcaccccccaattgtttcagaggaagatatatccgtcggatattctaccttccaggacggcgttcctaagaccgagggcgactccagtgccaccgctctgttccctcagacccacaaggaacaggtccaacaggatttttctggaaagatgcaggatctccctgaggagagctctctggaatatcaacaagaatacttcgtgactacaccgggtactgaaacttctgagacacagaaagccatgatcgtgccgagcagcccttcgaagaccccagaagaggtgtctacacctgcagaagaggagaaattatacctgcagacacctacatcgagcgagaggggagggagcccaatcatccaagagcctgaagagccttcagagcaccgggaggagtcaagcccgcgcaagaccagcttggtgatcgtagaatccgcagataaccagcccgaaacctgtgaaaggctcgatgaggatgcagctttcgagaaggagctcaccgaagaattaggcgagctcgaagcctccagcgatgaagaagcaatggtgacaacccgagtcgtccgccgtcgcgtgatcatacagggagatgatatgcctgaaattcccccagagactgtgacagaggaagagtatattgacgagcacggtcacaccgtggttaagaaggtgactagaaaaattatacggcggtatgttagctccgagggaacagagaaggaggagataatggtccagggcatgccacaggagcccgtgaatattgaagagggcgacggttattccaaggtaattaaacgagttgttctcaagtctgacaccgagcagagcgaggtgaccctgtgcgaaccctctatcctctccagtacttcacagttccaggccgagcctgtggagggaaggcgggtgtccaaggttgttaagaccaccgtggtcctgggcgagagaatggagaagcatctgggggatagttccttagcgactgaccttcctagcgctaaagatgacttcgaggagtag

SEQ ID NO: 287666 - DNA, 2988 bp, Artificial Sequence
  derived and/or modified sequence
atggatgacagcgtggtgatccccagccaccaggtgtccaccctggccaaggaggccgagagaaattcctaccgcctgtcctggggcacagagaacctggacaacgtggccctgagcagcagccccatccacagcggcttcctggtgtccttcatggtggatgcccggggcggggccatgaggggctgccgccacaacggcctgcgcatcatcatcccccccaggaagtgcacagcccccaccagggtgacctgccgcctggtgaagaggcaccggctggccaccatgccacccatggtggagggggagggcctggccagccgcctcatcgaggtgggccccagcggggcccagttcctgggccctgtgattgtggagatcccccactttgctgccctgcggggcaaggagcgggagctggtggtgctgcggagtgaaaatggagacagctggaaggagcacttctgtgactacacagaagatgagctgaatgagatcctgaatggcatggatgaggtgctggacagccctgaggacctggagaagaagaggatctgccgcatcatcacccgggacttcccccagtactttgctgtggtgagccgcatcaagcaggacagcaacctgattggccctgagggcggcgtgctgagcagcacagtggtgccccaggtgcaggccgtgtttcctgagggcgccctgaccaagaggatccgggtgggcctgcaggcccagcccatgcacagcgagctggtgaagaagatcctgggcaacaaggccaccttcagccccatcgtgaccctggagcccaggaggaggaagttccacaagcccatcaccatgaccatccctgtgcccaaggccagcagtgatgtgatgctgaatggatttggaggagatgcccccaccctgcggctgctgtgcagcatcactggaggcaccaccccagcccagtgggaggacatcaccggcaccacccccctgacctttgtgaatgaatgtgtgtccttcaccaccaacgtgtctgcccgcttctggctgattgactgccggcagatccaggagagcgtgacctttgccagccaggtgtaccgggagatcatctgtgtgccctacatggccaagtttgtggtgtttgccaagagccatgaccccatcgaggcccggctgcgctgcttctgcatgacagatgacaaggtggacaagaccctggagcagcaggagaactttgctgaggtggcccggagcagagatgtggaggtgctggagggcaagcccatctacgtggactgcttcggcaacctggtgcccctgaccaagagcggccagcaccacatcttctccttctttgccttcaaggagaaccggctgcccctgtttgtgaaggtgcgggacaccacccaggagccctgtggccgcctgtccttcatgaaggagcccaagagcacccggggcctggtgcaccaggccatctgcaacctgaacatcaccctgcccatctacaccaagacagagaccaccacagagatccacccccaggatgagcaggagagaattgaggagcggctggcctacatcgctgaccacctgggcttctcctggacagagctggcccgggagctggacttcacagaggagcagatccaccagatcagaattgagaaccccaacagcctgcaggaccagagccacgccctgctgaagtactggctggagagagatggcaagcacgccacagacaccaacctggtggagtgcctgaccaagatcaacaggatggacatcgtgcacctgatggagaccaacacagagcccctgcaggagcgcatcagccacagctatgcagaaattgagcagaccatcaccctggaccacagcgagggcttctctgtgctgcaggaggagctgtgcacagcccagcacaagcagaaggaggagcaggccgtgtccaaggagagcgagacctgtgaccacccccccatcgtgtctgaggaggacatctctgtgggctacagcaccttccaggatggagtgcccaagacagaaggagacagcagcgccacagccctcttcccccagacccacaaggagcaggtgcagcaggacttcagcggcaagatgcaggacctgcctgaggagagcagcctggagtaccagcaggagtactttgtgaccaccccaggcacagagaccagcgagacccagaaggccatgattgtgcccagcagccccagcaagaccccagaggaggtgtccaccccagctgaggaggagaagctgtacctgcagacccccaccagcagcgagcggggcggcagccccatcatccaggagcctgaggagcccagcgagcaccgggaggagagcagccccaggaagaccagcctggtgattgtggagagcgctgacaaccagcctgagacctgtgagcggctggatgaagatgctgcctttgagaaggagctgacagaggagctgggggagctggaggccagcagtgatgaggaggccatggtgaccaccagggtggtgagaagaagagtcatcatccagggagatgacatgcctgagatccccccagagaccgtgacagaggaggagtacattgatgagcacggccacacagtggtgaagaaggtgaccaggaagatcatccgccgctacgtgtcctctgagggcacagagaaggaggagatcatggtgcagggcatgccccaggagcctgtgaacatcgaggagggagatggctacagcaaggtgatcaagagggtggtgctgaagagtgacacagagcagagcgaggtgaccctgtgtgagcccagcatcctgagcagcaccagccagttccaggccgagcctgtggagggcagaagagtgtccaaggtggtgaagaccaccgtggtgctgggggagaggatggagaagcacctgggggacagcagcctggccacagacctgcccagcgccaaggatgactttgaggagtag

SEQ ID NO: 287667 - DNA, 2988 bp, Artificial Sequence
  derived and/or modified sequence
atggacgacagcgtggtgatccccagccaccaggtgagcaccctggccaaggaagccgagagaaattcgtacagactctcttgggggaccgagaatttagacaacgtggccctgtcatcaagccctatacattctggctttttggtgtccttcatggtggacgcccgggggggcgctatgcgtgggtgccggcacaacggcctgcggatcatcattcctccaaggaaatgcacggcgccgacgcgggtgacatgccggttggtgaaacgacacaggttggcgacgatgccccctatggtggaaggcgaagggttagcttcaagattgattgaggttggtcccagcggggcccagttcctcgggcccgtgattgtcgagatcccgcattttgccgcacttcgggggaaggagcgggaactcgtcgtgcttagaagcgagaacggggactcgtggaaggaacacttctgtgactatactgaagatgagcttaatgagatcttgaatggcatggatgaggttctggattctcctgaagatctggagaaaaagaggatttgcagaatcatcacacgggattttccacaatatttcgccgtagtgtctcgaatcaagcaggactctaaccttatcggtcccgagggcggggtgctctccagtacagtggtcccacaggttcaggccgtatttccggagggcgctcttacgaagagaattcgagtgggactgcaagcccagccaatgcattcagagctggttaagaaaatcctgggcaacaaggcaacattttcccctatcgtcaccctggagcctaggagaaggaagttccacaaacctattactatgacaattccggttccgaaagcctcaagcgacgttatgttaaacggcttcggcggggatgcaccgacgctccgtctgttatgctctatcaccggcggcaccacccccgcacagtgggaggacattacgggtactacccccctgaccttcgttaacgagtgcgtatccttcaccactaacgtaagcgcaaggttttggctgatcgactgtcgacagatccaggagtccgtgacattcgcttcacaggtgtatcgtgaaatcatctgcgtgccctacatggcaaagttcgtcgtgttcgctaagtctcacgacccaattgaagcccgcctgagatgcttctgtatgacagatgataaggttgataaaactctcgaacagcaggagaacttcgctgaagtggcccgatcgagggacgtcgaggtgctggaaggaaagcccatttatgtggactgctttggcaaccttgttcctcttaccaagtctgggcaacaccacatcttttcctttttcgcatttaaagagaacaggctcccactgtttgttaaggttcgagacactacccaggaaccctgcggaagactgtcattcatgaaggagcccaagtcaacaagggggttggtacatcaggctatttgcaacctcaacatcaccttgcccatctacaccaagacagaaactactaccgagatacatccacaggacgagcaggagcgaatagaggagcgacttgcttatatcgcggaccatctggggtttagctggacagagctggcccgagaactggactttactgaggaacagatccaccagatacgtattgagaaccccaactcacttcaagatcagagtcacgccctgctcaagtactggctggagagggatggaaagcatgcaacggacactaatctggttgagtgtctgaccaagataaatagaatggacatagtccatctcatggagacgaatacggagccactgcaggagcgaatctctcattcatacgcagaaatcgagcagactatcactctggatcattccgagggtttttccgtcctgcaggaggagctttgtacagcccaacataaacagaaagaggagcaggcggtcagcaaggaaagcgagacttgcgaccatcctcctattgtctctgaggaagacattagcgtcggatactctacttttcaggacggggtgcccaaaacagagggcgattctagtgctaccgctcttttcccgcagacccacaaagaacaggtgcagcaggatttctcagggaagatgcaagacttgcccgaggagtctagcctggagtaccagcaggaatattttgtcaccactcccggcactgaaacaagcgaaactcagaaggctatgatcgttccttcaagtcccagcaagacacctgaggaagtgtccacccctgcagaagaggaaaaactgtacctgcagacaccaaccagctctgagcggggggggtcacccatcattcaagagcccgaggaaccttccgaacatcgagaggaaagcagcccgaggaagacttccttggtcatcgtggaaagcgctgacaaccaaccagaaacatgcgagaggttggatgaggacgcagcgttcgagaaggagctcacggaagaacttggagaacttgaggcgtcctctgacgaggaagctatggtgaccaccagagtagtgcggaggagagtgattatccaaggggacgatatgcctgagatccccccagagaccgttacggaagaagagtatattgatgagcatgggcacaccgttgtgaaaaaggtgacccgcaaaattatccgtcgatacgtgtcgagcgagggcaccgagaaagaagaaattatggttcagggcatgccccaggaaccagtgaatatcgaggaaggagatggctactctaaggtgatcaaacgcgtagtactcaagagcgacacagagcagagcgaagttaccttgtgtgagcccagcattctctcttcgacctcccagttccaggccgagcctgtggaaggcagaagggtgagcaaagtggtgaagacaaccgtggtgctcggggagcgcatggaaaagcacttaggtgacagctcactcgctaccgatctgccttctgccaaagatgatttcgaggaatag

SEQ ID NO: 287668 - DNA, 5848 bp, Artificial Sequence
  derived and/or modified sequence
ctcctcctcctgctttcctccagtaagtgcatacccgctagtggtctgtacaggcggcacggtttgatggcagagatattttctttccaaactgttcaaaatgatgaacgaagatgcagctcagaaaagcgacagtggagagaagttcaacggcagtagtcagaggagaaaaagacccaagaagtctgacagcaatgcaagcttcctccgtgctgccagagcaggcaacctggacaaagttgtggaatatctgaaggggggcatagacatcaatacctgcaatcagaatggactcaacgctctccatctggctgccaaggaaggccacgtggggctggtgcaggagctgctgggaagagggtcctctgtggattctgccactaagaagggaaataccgctcttcacattgcatctttggctggacaagcagaagttgtcaaagttcttgttaaggaaggagccaatattaatgcacagtctcagaatggctttactcctttatacatggctgcccaagagaatcacattgatgttgtaaaatatttgctggaaaatggagctaatcagagcactgctacagaggatggctttactcctctagctgtggcactccagcaaggacacaaccaggcggtggccatcctcttggagaatgacaccaaagggaaagtgaggctgccagctctgcatattgccgctaggaaagacgacaccaaatctgccgcacttctgcttcagaatgaccacaatgctgacgtacaatccaagatgatggtgaataggacaactgagagtggttttacccctttgcacatagctgcacattacggaaatgtcaacgtggcaactcttcttctaaaccggggagctgctgtggacttcacagccaggaatggaatcactcctctgcatgtggcttccaaaagaggaaatacaaacatggtgaagctcttactggatcgaggcggtcagatcgatgccaaaactagggatgggttgacaccacttcactgtgctgcacgaagtgggcatgaccaagtggtggaacttctgttggaacggggtgcccccttgctggcaaggactaagaatgggctgtctccactacacatggctgcccagggagaccacgtggaatgtgtgaagcacctgttacagcacaaggcacctgttgatgatgtcaccctagactacctgacagccctccacgttgctgcgcactgtggccactaccgtgtaaccaaactccttttagacaagagagccaatccgaacgccagagccctgaatggttttactccactgcacattgcctgcaagaaaaaccgcatcaaagtcatggaactgctggtgaaatatggggcttcaatccaagctataacagagtctggcctcacaccaatacatgtggctgccttcatgggccacttgaacattgtcctccttctgctgcagaacggagcctctccagatgtcactaacattcgtggtgagacggcactacacatggcagcccgagccgggcaggtggaagtggtccgatgcctcctgagaaatggtgcccttgttgatgccagagccagggaggaacagacacctttacatattgcctcccgcctgggtaagacagaaattgtccagctgcttctacaacatatggctcatccagatgcggccactacaaatgggtacacaccactgcacatctctgcccgggagggccaggtggatgtggcatcagtcctattggaagcaggagcagcccactccttagctaccaagaagggttttactcccctgcatgtagcagccaagtatggaagcctggatgtggcaaaacttctcttgcaacgccgtgctgccgcagattctgcagggaagaacggccttaccccgctccatgttgctgctcattatgacaaccagaaggtggcgctgctgttactggagaagggtgcttcccctcatgccactgccaagaatggctatactccgttacatattgctgccaagaagaatcaaatgcagatagcttccacactcctgaactatggagcagagacaaacattgtgacaaagcaaggagtaactccactccatctggcctcgcaggaggggcacacagatatggttaccttgcttctggataagggagccaatatccacatgtcaactaagagtggactcacatccttacaccttgcagcccaggaagataaagtgaatgttgctgatattctcaccaagcatggagctgatcaggatgctcatacaaagcttggttacacacctttaattgtggcctgtcactatggaaatgtgaaaatggtcaactttcttctgaagcagggagcaaatgttaacgcaaaaaccaagaacggctacacgcctttgcaccaggccgctcagcagggtcacacgcacatcatcaacgtcctgctccagcatggggccaagcccaacgccaccactgcgaatggcaacactgccttggcgattgctaagcgtctgggctacatctccgtggtcgacaccctgaaggttgtgactgaggaggtcaccaccaccaccacaactattacagaaaaacacaaactaaatgtacctgagacgatgactgaggttcttgatgtttctgatgaagagggtgatgacacaatgactggtgatgggggagaataccttaggcctgaggacctaaaagaactgggtgatgactcactacccagcagtcagttcctggatggtatgaattacctgcgatacagcttggagggaggacgatctgacagccttcgatccttcagttccgacaggtctcacactctgagccatgcctcctacctgagggacagtgccgtgatggatgactcagttgtgattcccagtcaccaggtgtcaactctagccaaggaggcagaaaggaattcttatcgcctaagctggggcactgagaacttagacaacgtggctctttcttctagtcctattcattcaggtttcctggttagttttatggtggatgcccgaggtggtgctatgcgaggatgcagacacaatgggctccgaatcattattccacctcggaaatgtactgctccaacgcgagtcacctgccgactggtcaagcgccacagactggcaacaatgcctccaatggtggaaggagaaggcctggccagtcgcctgatcgaagttggaccttctggtgctcagttccttgggcctgtgatcgtggagatccctcactttgcggcccttcgaggaaaggaaagggaactggtggtcctgcgcagtgagaatggggacagctggaaagagcatttctgtgactacactgaagatgaattgaatgaaattcttaacggcatggatgaagtactggatagcccagaagacctagaaaagaaacgaatctgccgcatcatcacccgagacttcccacagtactttgcagtggtgtctcgtatcaaacaggacagcaatctgattggcccagaaggaggtgtactgagcagcacagtggtgccccaggtgcaggccgtcttcccagagggggcactcaccaagcggatccgcgtaggcctgcaggctcaacctatgcacagtgagctggttaagaagatcctaggcaacaaagctaccttcagccctatagtcactttggaacctagaagaagaaaattccacaaaccaattaccatgaccattcctgtccccaaagcttcaagtgatgtcatgttgaatggttttgggggagatgcaccaaccttaagattactatgcagcataacaggtggaaccacccctgcccagtgggaagatattacaggaactacgccattaacatttgtcaatgaatgtgtttcctttacaacaaacgtgtctgccaggttctggctgatagattgtcgacagatccaggaatccgttacttttgcatcacaagtatacagagaaattatctgcgtaccttatatggccaaatttgtagtgtttgccaaatcacatgaccccattgaagccaggttgaggtgtttctgcatgactgatgataaagtggataagacccttgaacaacaagaaaattttgctgaggtggccagaagcagggatgtggaggtgttagaaggaaaacccatctacgttgattgtttcggcaacttggtaccattaactaaaagtggccagcatcatatattcagtttttttgccttcaaagaaaatagacttcctctatttgtcaaggtacgcgatacgactcaggaaccttgcggacgactatcatttatgaaggagccaaaatccacgagaggcctggtgcatcaagctatttgcaacttaaacatcactttgccgatttatacaaagacagaaaccaccacagaaattcatccacaggatgagcaggaacggatcgaggaaaggctggcttatattgctgatcaccttggcttcagctggacagaattagcaagagaactggatttcactgaggagcaaattcatcaaattcgaattgaaaatcccaactctcttcaagaccagagtcatgcactgttgaagtactggctagagagggatgggaaacatgctacagataccaacctcgttgaatgtctcaccaagatcaaccgaatggatattgttcatctcatggagaccaacacagaacctctccaggagcgcatcagtcatagttatgcagaaattgaacagaccattacactggatcatagtgaagggttctcggtacttcaagaggagttatgcactgcacagcacaagcagaaagaggagcaagctgtttctaaagaaagtgagacctgcgatcaccctcctatcgtctcagaggaagacatttctgttggttattccacttttcaggatggcgtccccaaaactgagggggacagctcagcaacagcactctttccccaaactcacaaggagcaagttcaacaggatttctcagggaaaatgcaagacctgcctgaagagtcatctctggaatatcagcaggaatattttgtgacaactccaggaacagaaacatcagagactcagaaggctatgatagtacccagctctcccagcaagacacctgaggaagttagcacccctgcagaggaggagaagctgtacctccagaccccaacatccagcgagcggggaggctctcccatcatacaagaacccgaagagccctcagagcacagagaggagagctctccgcggaaaaccagcctcgtaatagtggagtctgccgataaccagcctgagacctgtgaaagactcgatgaagatgcagcttttgaaaaggagctaacagaggaattaggggagctggaggccagctcagatgaggaggcgatggtaactaccagggttgtccgccggcgagtgattattcagggagacgatatgcctgaaatacccccagaaacagtcacagaagaagaatacattgatgagcatggacacaccgtggtaaagaaggttactaggaaaatcattaggcggtatgtatcctctgaaggcacagagaaagaagagattatggtgcagggaatgccacaggaacctgtcaacatcgaggaaggggatggctattccaaagttataaagcgtgttgtattgaagagtgacaccgagcagtcagaggtcactttgtgtgagcccagcattttgtccagtacctcacaatttcaggctgagccagtggaaggccgtagagtcagcaaagttgttaaaacaactgtggtacttggagagaggatggagaaacatctgggggattctagtttagccactgatcttccttcagccaaagatgactttgaagag

SEQ ID NO: 287669 - DNA, 2988 bp, Artificial Sequence
  derived and/or modified sequence
atggatgattccgtggtgatcccatctcatcaggtgagcacactggcaaaggaagccgaaagaaactcttacaggcttagttgggggacggagaatctagacaacgtggcactgtctagctcgcccatacacagcggattcttggtgtccttcatggtggacgcacggggtggagccatgcggggttgtcgacataatggtttgcgcatcattatcccccctcgcaaatgtactgcacccactcgggtgacatgtcgactggttaagagacatagactcgctaccatgccacctatggtagagggagaaggcctggcgagcagactgatagaagttggaccatctggagctcagtttctggggcctgtcatagtggagattccacattttgctgctctgcggggaaaggagcgggagctcgtcgtgctcagaagcgagaacggtgactcatggaaggaacatttctgcgattacacagaggatgagttgaacgagatactgaacggtatggacgaggtgttagactccccggaggaccttgaaaagaagaggatttgccgaatcataactagggattttccgcagtactttgcggtcgtgtcccgcataaagcaggacagtaacctcatcgggcctgaaggtggtgtcctgagttctactgtcgttccacaagttcaggcagtctttcccgagggggcacttaccaagcgaatcagagttggcttgcaggcccaaccgatgcactctgaactggtgaaaaagatccttggcaacaaagctaccttcagtccaattgtcaccctagagccaaggaggcgtaagttccataaacctatcacgatgacgatccctgtgcccaaggcatcttcggacgtgatgttgaacggatttggcggagatgctcccacacttcgactcctgtgttccataacagggggaaccacacctgcacagtgggaggacatcactggcacgacacctctaacgtttgtgaacgaatgtgtgagcttcaccaccaacgtcagcgctagattctggctgattgactgtcgtcagattcaggagtccgtgacatttgccagccaggtctaccgtgaaatcatctgtgtgccatatatggccaaatttgtagtctttgccaagagccacgatcctattgaagccagactgaggtgcttctgcatgactgatgataaagttgataagacattggaacagcaggagaatttcgccgaggttgccagatccagagatgtagaagtgctggaaggcaaacccatctacgtggactgttttggcaaccttgtcccccttaccaagtcgggacaacaccatatattcagttttttcgcatttaaggaaaatcggctgcctctgtttgtcaaggtcagagacactacacaagaaccttgcggcaggctttccttcatgaaggagcccaaaagcacacgcggactggttcaccaggccatctgcaatctgaacattaccctacccatctacacaaagaccgagacgacaactgagatccacccacaggacgagcaagaacggatagaggagcggctcgcctacattgcagaccatctcggtttctcttggaccgaactcgcccgtgagctggatttcaccgaagaacagatccatcaaataagaattgagaaccctaacagtctgcaagaccagtcacacgctttgttgaagtactggttggagcgcgacggaaagcacgcaactgacaccaatctggttgagtgcttaacaaagataaaccgcatggatattgtgcacctcatggaaaccaataccgaacccctgcaagaaaggatcagtcattcatacgccgagatagagcagactataacactcgatcactctgagggattcagtgtactgcaagaggagctgtgcacagctcaacataaacagaaggaggagcaggctgtgtccaaagagagcgaaacttgtgatcacccccctatcgtctctgaggaagatatttcagttggttactcgacgtttcaggacggggtgccaaaaaccgagggtgactccagcgctactgcactgtttccacaaactcacaaagaacaagttcagcaggacttctccggcaagatgcaagatttgcctgaagagtcctctctggagtatcagcaggagtattttgtcacaacaccgggtacggagacatctgagacgcagaaggcaatgattgtaccatcctccccatccaaaacccccgaggaggtctcaacaccggctgaagaggaaaagctgtaccttcagacaccaaccagttccgaaaggggcggttctccaattattcaggagccagaggaaccctcagagcacagagaggagtcctcaccacgtaagacttcactggttatcgtggaatctgccgataaccagccggagacttgtgagagactggacgaagatgccgcatttgagaaggagctcacagaagagctaggagagttggaggcctcttctgacgaagaagccatggttaccacccgcgtggtgcgtcgcagagtcattatacagggagatgatatgccggagataccgcctgagacggtgaccgaggaggagtatattgatgaacatggccacactgtggtaaaaaaggtaaccagaaaaattattcggaggtacgtgtcaagcgaaggcacggagaaggaagagattatggtgcagggtatgccccaggaacccgtgaacatcgaggagggagacgggtacagcaaggtgattaagcgagtggttttgaaatcagacaccgaacagtctgaagtgacgctgtgcgaaccctctatcctgagctctacatcacagttccaggcagaacccgtggaaggcagacgggtgtccaaggtggtgaagactaccgtcgtgctgggggaacggatggagaagcatttaggggactctagcctagcaacggacctgccaagcgcaaaagacgatttcgaggaatag

SEQ ID NO: 287670 - DNA, 2988 bp, Artificial Sequence
  derived and/or modified sequence
atggacgacagcgtggtgatccccagccaccaggtgagcaccctggccaaggaggccgagagaaacagctacagactgagctggggcaccgagaacctggacaacgtggccctgagcagcagccccatccacagcggcttcctggtgagcttcatggtggacgccagaggcggcgccatgagaggctgcagacacaacggcctgagaatcatcatcccccccagaaagtgcaccgcccccaccagagtgacctgcagactggtgaagagacacagactggccaccatgccccccatggtggagggcgagggcctggccagcagactgatcgaggtgggccccagcggcgcccagttcctgggccccgtgatcgtggagatcccccacttcgccgccctgagaggcaaggagagagagctggtggtgctgagaagcgagaacggcgacagctggaaggagcacttctgcgactacaccgaggacgagctgaacgagatcctgaacggcatggacgaggtgctggacagccccgaggacctggagaagaagagaatctgcagaatcatcaccagagacttcccccagtacttcgccgtggtgagcagaatcaagcaggacagcaacctgatcggccccgagggcggcgtgctgagcagcaccgtggtgccccaggtgcaggccgtgttccccgagggcgccctgaccaagagaatcagagtgggcctgcaggcccagcccatgcacagcgagctggtgaagaagatcctgggcaacaaggccaccttcagccccatcgtgaccctggagcccagaagaagaaagttccacaagcccatcaccatgaccatccccgtgcccaaggccagcagcgacgtgatgctgaacggcttcggcggcgacgcccccaccctgagactgctgtgcagcatcaccggcggcaccacccccgcccagtgggaggacatcaccggcaccacccccctgaccttcgtgaacgagtgcgtgagcttcaccaccaacgtgagcgccagattctggctgatcgactgcagacagatccaggagagcgtgaccttcgccagccaggtgtacagagagatcatctgcgtgccctacatggccaagttcgtggtgttcgccaagagccacgaccccatcgaggccagactgagatgcttctgcatgaccgacgacaaggtggacaagaccctggagcagcaggagaacttcgccgaggtggccagaagcagagacgtggaggtgctggagggcaagcccatctacgtggactgcttcggcaacctggtgcccctgaccaagagcggccagcaccacatcttcagcttcttcgccttcaaggagaacagactgcccctgttcgtgaaggtgagagacaccacccaggagccctgcggcagactgagcttcatgaaggagcccaagagcaccagaggcctggtgcaccaggccatctgcaacctgaacatcaccctgcccatctacaccaagaccgagaccaccaccgagatccacccccaggacgagcaggagagaatcgaggagagactggcctacatcgccgaccacctgggcttcagctggaccgagctggccagagagctggacttcaccgaggagcagatccaccagatcagaatcgagaaccccaacagcctgcaggaccagagccacgccctgctgaagtactggctggagagagacggcaagcacgccaccgacaccaacctggtggagtgcctgaccaagatcaacagaatggacatcgtgcacctgatggagaccaacaccgagcccctgcaggagagaatcagccacagctacgccgagatcgagcagaccatcaccctggaccacagcgagggcttcagcgtgctgcaggaggagctgtgcaccgcccagcacaagcagaaggaggagcaggccgtgagcaaggagagcgagacctgcgaccacccccccatcgtgagcgaggaggacatcagcgtgggctacagcaccttccaggacggcgtgcccaagaccgagggcgacagcagcgccaccgccctgttcccccagacccacaaggagcaggtgcagcaggacttcagcggcaagatgcaggacctgcccgaggagagcagcctggagtaccagcaggagtacttcgtgaccacccccggcaccgagaccagcgagacccagaaggccatgatcgtgcccagcagccccagcaagacccccgaggaggtgagcacccccgccgaggaggagaagctgtacctgcagacccccaccagcagcgagagaggcggcagccccatcatccaggagcccgaggagcccagcgagcacagagaggagagcagccccagaaagaccagcctggtgatcgtggagagcgccgacaaccagcccgagacctgcgagagactggacgaggacgccgccttcgagaaggagctgaccgaggagctgggcgagctggaggccagcagcgacgaggaggccatggtgaccaccagagtggtgagaagaagagtgatcatccagggcgacgacatgcccgagatcccccccgagaccgtgaccgaggaggagtacatcgacgagcacggccacaccgtggtgaagaaggtgaccagaaagatcatcagaagatacgtgagcagcgagggcaccgagaaggaggagatcatggtgcagggcatgccccaggagcccgtgaacatcgaggagggcgacggctacagcaaggtgatcaagagagtggtgctgaagagcgacaccgagcagagcgaggtgaccctgtgcgagcccagcatcctgagcagcaccagccagttccaggccgagcccgtggagggcagaagagtgagcaaggtggtgaagaccaccgtggtgctgggcgagagaatggagaagcacctgggcgacagcagcctggccaccgacctgcccagcgccaaggacgacttcgaggagtag

SEQ ID NO: 287671 - protein, 129 aa, Artificial Sequence
  derived and/or modified sequence
MKTGHFEIVTMLLATMILVDIFQVKAEVLDMADNAFDDEYLKCTDRMEIKYVPQLLKEEKASHQQLDTVWENAKAKWAARKTQIFLPMNFKDNHGIALMAYISEAQEQTPFYHLFSEAVKMAGQSREDY

SEQ ID NO: 287672 - protein, 175 aa, Artificial Sequence
  derived and/or modified sequence
MKTGHFEIVTMLLATMILVDIFQVKAEVLDMADNAFDDEYLKCTDRMEIKYVPQLLKEEKASHQQLDTVWENAKAKWAARKTQIFLPMNFKDNHGIALMAYISEAQEQTPFYHLFSEAVKMAGQSREDYIYGFQFKAFHFYLTRALQLLRKPCEASSKTVVYRTSQGTSFTFGGL

SEQ ID NO: 287673 - protein, 202 aa, Artificial Sequence
  derived and/or modified sequence
MKTGHFEIVTMLLATMILVDIFQVKAEVLDMADNAFDDEYLKCTDRMEIKYVPQLLKEEKASHQQLDTVWENAKAKWAARKTQIFLPMNFKDNHGIALMAYISEAQEQTPFYHLFSEAVKMAGQSREDYIYGFQFKAFHFYLTRALQLLRKPCEASSKTVVYRTSQGTSFTFGGLNQARFGHFTLAYSAKPQAANDQLTVLS

SEQ ID NO: 287674 - protein, 107 aa, Artificial Sequence
  derived and/or modified sequence
MKTGHFEIVTMLLATMILVDIFQVKAEVLDMADNAFDDEYLKCTDRMEIKYVPQLLKEEKASHQQLDTVWENAKAKWAARKTQIFLPMNFKDNHGIALMAYISEAQE

SEQ ID NO: 287675 - protein, 367 aa, Artificial Sequence
  derived and/or modified sequence
MLAVGAMEGTRQSAFLLSSPPLAALHSMAEMKTPLYPAAYPPLPAGPPSSSSSSSSSSSPSPPLGTHNPGGLKPPATGGLSSLGSPPQQLSAATPHGINDILSRPSMPVASGAALPSASPSGSSSSSSSSASASSASAAAAAAAAAAAAASSPAGLLAGLPRFSSLSPPPPPPGLYFSPSAAAVAAVGRYPKPLAELPGRTPIFWPGVMQSPPWRDARLACTPHQGSILLDKDGKRKHTRPTFSGQQIFALEKTFEQTKYLAGPERARLAYSLGMTESQVKVWFQNRRTKWRKKHAAEMATAKKKQDSETERLKGASENEEEDDDYNKPLDPNSDDEKITQLLKKHKSSSGGGGGLLLHASEPESSS

SEQ ID NO: 287676 - DNA, 1116 bp, Artificial Sequence
  derived and/or modified sequence
cgtgggatgttagcggtgggggcaatggagggcacccggcagagcgcattcctgctcagcagccctcccctggccgccctgcacagcatggccgagatgaagaccccgctgtaccctgccgcgtatcccccgctgcctgccggccccccctcctcctcgtcctcgtcgtcgtcctcctcgtcgccctccccgcctctgggcacccacaacccaggcggcctgaagcccccggccacgggggggctctcatccctcggcagccccccgcagcagctctcggccgccaccccacacggcatcaacgatatcctgagccggccctccatgcccgtggcctcgggggccgccctgccctccgcctcgccctccggttcctcctcctcctcttcctcgtccgcctctgcctcctccgcctctgccgccgccgcggctgctgccgcggccgcagccgccgcctcatccccggcggggctgctggccggactgccacgctttagcagcctgagcccgccgccgccgccgcccgggctctacttcagccccagcgccgcggccgtggccgccgtgggccggtaccccaagccgctggctgagctgcctggccggacgcccatcttctggcccggagtgatgcagagcccgccctggagggacgcacgcctggcctgtacccctcatcaaggatccattttgttggacaaagacgggaagagaaaacacacgagacccactttttccggacagcagatcttcgccctggagaagactttcgaacaaacaaaatacttggcggggcccgagagggctcgtttggcctattcgttggggatgacagagagtcaggtcaaggtctggttccagaaccgccggaccaagtggaggaagaagcacgctgccgagatggccacggccaagaagaagcaggactcggagacagagcgcctcaagggggcctcggagaacgaggaagaggacgacgactacaataagcctctggatcccaactcggacgacgagaaaatcacgcagctgttgaagaagcacaagtccagcagcggcggcggcggcggcctcctactgcacgcgtccgagccggagagctcatcctgaacgccg

SEQ ID NO: 287677 - DNA, 1104 bp, Artificial Sequence
  derived and/or modified sequence
atgctggcagtaggggccatggaagggacccgccagagcgcttttctgctgtccagcccacccctggctgcactccacagcatggcagaaatgaaaaccccactctatccggccgcatatccccccctcccagccggccccccgagctcgtcgagctcgagcagttcttccagctcgccttccccaccgctggggacacacaatccagggggccttaaaccccctgccacaggcggtctgtcaagcttgggtagtcctccgcagcagctcagtgcagcgacccctcacgggataaatgacatactttcgcgcccttccatgcctgtcgcatccggcgctgccctgcccagcgcgagtccttcggggagtagcagttcttcatcctcaagcgcatctgcttcatccgcatctgcagccgctgccgccgctgccgccgccgcagcagcagcatcctcccctgctggcctgctcgccggcctgccacgtttcagttcactgagcccccctcctcctccaccaggattatatttctctccgagcgccgccgcagttgccgcagttgggcgctaccctaagcctctcgctgaactgccaggccgaaccccaatcttctggcccggagtcatgcagtctcccccgtggcgggatgccagattggcctgcacccctcaccagggatctatcctactggacaaagatggtaagcggaagcatactcggccaacattttcgggccaacagatctttgccctggagaagacgttcgagcagacaaaatatctggcaggacctgaacgggcccgacttgcctacagccttgggatgaccgaaagtcaggtcaaggtttggttccaaaacagacggaccaagtggcgcaagaagcatgctgctgagatggctaccgctaagaagaagcaggattctgagactgagcgccttaagggggcctccgagaatgaagaggaggatgatgactataacaagcccctggatccaaacagtgatgacgaaaagattacacaactgctgaaaaagcacaagtcaagctccggtggaggcggtgggcttctcctacacgcttcagaaccagaatcatccagttag

SEQ ID NO: 287678 - DNA, 2707 bp, Artificial Sequence
  derived and/or modified sequence
ggcgagctgccgcctcccgcgtggagggtttggacatctctgctgcgcagctaggcgagcaactcccggcagcggcatttttggttcagttggcagctcgcctccgggcgcgccgagtgcctctccgctcgcgccctcggcgcttccggctcctctgagccccgcggggggcaccagccagcgccctcgctgcaaggctacggtctccggcgtggccgtgggatgttagcggtgggggcaatggagggcacccggcagagcgcattcctgctcagcagccctcccctggccgccctgcacagcatggccgagatgaagaccccgctgtaccctgccgcgtatcccccgctgcctgccggccccccctcctcctcgtcctcgtcgtcgtcctcctcgtcgccctccccgcctctgggcacccacaacccaggcggcctgaagcccccggccacgggggggctctcatccctcggcagccccccgcagcagctctcggccgccaccccacacggcatcaacgatatcctgagccggccctccatgcccgtggcctcgggggccgccctgccctccgcctcgccctccggttcctcctcctcctcttcctcgtccgcctctgcctcctccgcctctgccgccgccgcggctgctgccgcggccgcagccgccgcctcatccccggcggggctgctggccggactgccacgctttagcagcctgagcccgccgccgccgccgcccgggctctacttcagccccagcgccgcggccgtggccgccgtgggccggtaccccaagccgctggctgagctgcctggccggacgcccatcttctggcccggagtgatgcagagcccgccctggagggacgcacgcctggcctgtacccctcatcaaggatccattttgttggacaaagacgggaagagaaaacacacgagacccactttttccggacagcagatcttcgccctggagaagactttcgaacaaacaaaatacttggcggggcccgagagggctcgtttggcctattcgttggggatgacagagagtcaggtcaaggtctggttccagaaccgccggaccaagtggaggaagaagcacgctgccgagatggccacggccaagaagaagcaggactcggagacagagcgcctcaagggggcctcggagaacgaggaagaggacgacgactacaataagcctctggatcccaactcggacgacgagaaaatcacgcagctgttgaagaagcacaagtccagcagcggcggcggcggcggcctcctactgcacgcgtccgagccggagagctcatcctgaacgccgccgcccgccgcaccttcccggctccggcctccacctctggggccgcgaggggcgcggggaccgcgtgcacgccgcgcctgcccgctcctcggggcccggaggacccggccctgcctgcggggaccctttgctatttttgagatgtacatatctatttttttaaccttgaagttgtgggaggggatgtaggggagagagactccggggttgataaggcaagaaagaccaccaaatgcactgcgtaaatgtcgctactgaaacccgcagccgggccacggtcccagccgcgtccccataggcgggcagcggcctcagcgcccgggtccccctcgcccccagattttgcccccgcgggcggcggggtagggggcgccgagaggtgctgtggaagggttcacgctcaccgcatgggggacctcggagcgaagcgggcgggcgctgccacagatgggaagagggacgtttccccccccacacactgctgtgcaactaaagtaacctgttgaaggctctttgtaaataaatcgtgagttacactgactagaagttactttattgtgaatatttaaaatgtaaaatgcttttttgaatttcgtataaaaagatggactttcttccttctcctcctcccctttgaagagcgactcaagccacaccttcccttttattttgaacttaatttgagaagcgtagaatagaatgtccccaccttctccgtcccctcctctcgttcctctttcccgtttggatttgcagaatctcacctttgcccttcatctcttctcgccctgccctgccctgcccaccccctggatctacactgcgctcccgccccccggacttgaagtggaagacgtgggaaccagggagggcctctcacctgcctccctgttcctctctgaaattgcacagtcgtttgttgctatttattagtgatttaaagaaaatattggggagggaggggctacaatagcttgtatttaactcctttctgataaaaatgcgtgttaaagtaggtggtgggaattgttacaaccgctctgggtctgaaacataaaaattcatttagttactgtaattgaatttgaagtgttttgtatcataagaatactatagaatatgtaaattgttttctttttacagctaataatggtgatatattagcatctttaacctttattaatttatataaggaattcggtttgtaaagagaagaaaaccccctttgcaagaccagttaaatgtaatgcactttctgtttcaaaggataaatcaaattaaaaaaaacagtttgaagacgtctgttgccttgaatgaaagggtacagatcatctgatctcatcagagatctcaaataataaaagtcaagaccaca

SEQ ID NO: 287679 - DNA, 1104 bp, Artificial Sequence
  derived and/or modified sequence
atgctggccgtgggcgccatggagggcacccggcagagcgccttcctgctgagcagcccccccctggccgccctgcacagcatggccgagatgaagacccccctgtacccagctgcctacccacccctgcctgctggcccccccagcagcagcagcagcagcagcagcagcagcagccccagcccccccctgggcacccacaaccctgggggcctgaagcccccagccactggaggcctgagcagcctgggcagccccccccagcagctgtctgctgccaccccccacggcatcaatgacatcctgagccggcccagcatgcctgtggccagcggggccgccctgcccagcgccagccccagcggcagcagcagcagcagcagcagcagcgccagcgccagcagcgccagcgctgctgctgctgctgctgctgctgctgctgctgctgccagcagccctgctggcctgctggccggcctgccccgcttcagcagcctgagccccccacctcctcctcctggcctgtacttcagccccagcgctgctgctgtggccgctgtgggccgctaccccaagcccctggccgagctgcccggccgcacccccatcttctggccaggagtgatgcagagccccccctggagagatgcccggctggcctgcaccccccaccagggcagcatcctgctggacaaggatggcaagaggaagcacacccggcccaccttcagcggccagcagatctttgccctggagaagacctttgagcagaccaagtacctggccggccctgagcgggcccggctggcctacagcctgggcatgacagagagccaggtgaaggtgtggttccagaacagaaggaccaagtggaggaagaagcacgccgctgagatggccacagccaagaagaagcaggacagcgagacagagcggctgaagggggcctctgaaaatgaggaggaggatgatgactacaacaagcccctggaccccaacagtgatgatgagaagatcacccagctgctgaagaagcacaagagcagcagcggcggcggcggcggcctgctgctgcacgccagcgagcctgagagcagcagctag

SEQ ID NO: 287680 - DNA, 1104 bp, Artificial Sequence
  derived and/or modified sequence
atgctggccgtgggcgccatggagggcacccggcagagcgccttcctactgtcatcccctcccctggccgcactccatagtatggctgaaatgaagacccctctctatcccgccgcctatccccccctgccagccggccccccatcctcttccagctcatccagtagttcatcttctccctcaccccctctggggacccataatcccggggggttaaaacctccggctacagggggcctgagcagcctggggtcacccccccagcagctttcagccgccactcctcatggaattaacgatatccttagcagaccgagcatgcccgtggcctctggcgcagctctgcctagcgcaagcccaagtgggtcttcttcgtctagtagctctagcgccagcgcgtctagcgctagcgcagctgcggccgcagctgcagccgccgccgcggccgcttccagccctgcaggcctcctcgcagggttgccccgattttcttctctgagccccccacctcctccacccggtttatacttttccccctcagctgctgctgtggctgctgtgggtcgataccccaagcccctggctgagctcccagggaggaccccaatattttggccaggtgtcatgcagtctcctccctggcgggatgcacgtttggcttgtacaccccaccaaggttccattctactggataaagatggcaaacgaaaacatactcgcccaacgttcagtggccagcagatctttgccctcgagaagacctttgagcagactaaatatctagcaggtcccgagagagcgcgcctggcttattctctgggcatgacggaatctcaagtcaaggtgtggtttcaaaatcgccggactaagtggaggaaaaaacatgcagcagaaatggcaacggcgaagaaaaagcaagattctgagactgaacggctcaagggggcgtccgagaacgaggaggaggacgacgactacaacaagcctctcgacccaaactctgacgacgagaaaatcactcaattattaaaaaagcacaagtcgtcatcaggcggcggcggcggcctgctactgcatgcttcagaacccgaatctagtagctag

SEQ ID NO: 287681 - DNA, 1104 bp, Artificial Sequence
  derived and/or modified sequence
atgctcgcggtgggagccatggaggggacacgtcaatctgcattcttactgtccagtcctccactagcggcactgcactcgatggcggagatgaagactcctctgtatccagcagcataccccccacttccggctggccctccaagtagctctagctccagctctagctccagctctcccagtcctccactgggaacacataaccctgggggactgaagcccccagctacaggaggcctttcaagtctcggcagtccccctcagcagctgtctgctgctaccccacatgggataaacgacatcctaagtcgtccctcaatgccggttgcttcaggcgcagccctgccatcggcgtccccatcgggctcatcatcttccagcagcagctccgcatcggccagttccgcaagcgctgccgcagccgctgcggcagcagcggctgcagcagctagctcaccagctggcctcctggcagggttgccgcgattttcaagtttgtcccctcctccaccacctcccggactctattttagtccatcagccgcagccgtagcggctgtgggcagatatccgaagcctctggcagagctgcccggaagaacccccatcttttggcccggagtaatgcagtcgccgccttggagagacgccagactggcctgcactcctcaccagggctctattctcctggacaaagacggaaaaaggaaacatacacgtccaaccttttccggacagcagattttcgcccttgaaaagaccttcgaacagaccaaatatttggctggcccagagagagcccgtcttgcctatagtctcgggatgacagagagtcaggtcaaggtgtggttccagaacaggcgcactaagtggaggaagaagcacgctgccgaaatggcaaccgccaagaagaagcaggacagcgagacggagcgtctgaagggcgctagcgaaaacgaggaggaagatgatgattacaacaagcctctagatcctaactcagacgacgaaaagatcacacagctcctgaagaagcacaaatcttccagtggcggaggtggtgggttgctgctgcatgcgagcgagccagagtcatcttcctag

SEQ ID NO: 287682 - DNA, 1104 bp, Artificial Sequence
  derived and/or modified sequence
atgctggccgtgggcgccatggagggcaccagacagagcgccttcctgctgagcagcccccccctggccgccctgcacagcatggccgagatgaagacccccctgtaccccgccgcctacccccccctgcccgccggcccccccagcagcagcagcagcagcagcagcagcagcagccccagcccccccctgggcacccacaaccccggcggcctgaagccccccgccaccggcggcctgagcagcctgggcagccccccccagcagctgagcgccgccaccccccacggcatcaacgacatcctgagcagacccagcatgcccgtggccagcggcgccgccctgcccagcgccagccccagcggcagcagcagcagcagcagcagcagcgccagcgccagcagcgccagcgccgccgccgccgccgccgccgccgccgccgccgccgccagcagccccgccggcctgctggccggcctgcccagattcagcagcctgagcccccccccccccccccccggcctgtacttcagccccagcgccgccgccgtggccgccgtgggcagataccccaagcccctggccgagctgcccggcagaacccccatcttctggcccggcgtgatgcagagccccccctggagagacgccagactggcctgcaccccccaccagggcagcatcctgctggacaaggacggcaagagaaagcacaccagacccaccttcagcggccagcagatcttcgccctggagaagaccttcgagcagaccaagtacctggccggccccgagagagccagactggcctacagcctgggcatgaccgagagccaggtgaaggtgtggttccagaacagaagaaccaagtggagaaagaagcacgccgccgagatggccaccgccaagaagaagcaggacagcgagaccgagagactgaagggcgccagcgagaacgaggaggaggacgacgactacaacaagcccctggaccccaacagcgacgacgagaagatcacccagctgctgaagaagcacaagagcagcagcggcggcggcggcggcctgctgctgcacgccagcgagcccgagagcagcagctag

SEQ ID NO: 287683 - protein, 1194 aa, Artificial Sequence
  derived and/or modified sequence
MEQDRTNHVEGNRLSPFLIPSPPICQTEPLATKLQNGSPLPERAHPEVNGDTKWHSFKSYYGIPCMKGSQNSRVSPDFTQESRGYSKCLQNGGIKRTVSEPSLSGLLQIKKLKQDQKANGERRNFGVSQERNPGESSQPNVSDLSDKKESVSSVAQENAVKDFTSFSTHNCSGPENPELQILNEQEGKSANYHDKNIVLLKNKAVLMPNGATVSASSVEHTHGELLEKTLSQYYPDCVSIAVQKTTSHINAINSQATNELSCEITHPSHTSGQINSAQTSNSELPPKPAAVVSEACDADDADNASKLAAMLNTCSFQKPEQLQQQKSVFEICPSPAENNIQGTTKLASGEEFCSGSSSNLQAPGGSSERYLKQNEMNGAYFKQSSVFTKDSFSATTTPPPPSQLLLSPPPPLPQVPQLPSEGKSTLNGGVLEEHHHYPNQSNTTLLREVKIEGKPEAPPSQSPNPSTHVCSPSPMLSERPQNNCVNRNDIQTAGTMTVPLCSEKTRPMSEHLKHNPPIFGSSGELQDNCQQLMRNKEQEILKGRDKEQTRDLVPPTQHYLKPGWIELKAPRFHQAESHLKRNEASLPSILQYQPNLSNQMTSKQYTGNSNMPGGLPRQAYTQKTTQLEHKSQMYQVEMNQGQSQGTVDQHLQFQKPSHQVHFSKTDHLPKAHVQSLCGTRFHFQQRADSQTEKLMSPVLKQHLNQQASETEPFSNSHLLQHKPHKQAAQTQPSQSSHLPQNQQQQQKLQIKNKEEILQTFPHPQSNNDQQREGSFFGQTKVEECFHGENQYSKSSEFETHNVQMGLEEVQNINRRNSPYSQTMKSSACKIQVSCSNNTHLVSENKEQTTHPELFAGNKTQNLHHMQYFPNNVIPKQDLLHRCFQEQEQKSQQASVLQGYKNRNQDMSGQQAAQLAQQRYLIHNHANVFPVPDQGGSHTQTPPQKDTQKHAALRWHLLQKQEQQQTQQPQTESCHSQMHRPIKVEPGCKPHACMHTAPPENKTWKKVTKQENPPASCDNVQQKSIIETMEQHLKQFHAKSLFDHKALTLKSQKQVKVEMSGPVTVLTRQTTAAELDSHTPALEQQTTSSEKTPTKRTAASVLNNFIESPSKLLDTPIKNLLDTPVKTQYDFPSCRCVGLDRRVKLLGLKESSILVKKAKVLRDVLLLSGWFAEAAVKRSYCVWCGSELATPVRLQ

SEQ ID NO: 287684 - DNA, 3585 bp, Artificial Sequence
  derived and/or modified sequence
atggagcaggacagaaccaaccacgtggagggcaacagactgagccccttcctgatccccagcccccccatctgccagaccgagcccctggccaccaagctgcagaacggcagccccctgcccgagagagcccaccccgaggtgaacggcgacaccaagtggcacagcttcaagagctactacggcatcccctgcatgaagggcagccagaacagcagagtgagccccgacttcacccaggagagcagaggctacagcaagtgcctgcagaacggcggcatcaagagaaccgtgagcgagcccagcctgagcggcctgctgcagatcaagaagctgaagcaggaccagaaggccaacggcgagagaagaaacttcggcgtgagccaggagagaaaccccggcgagagcagccagcccaacgtgagcgacctgagcgacaagaaggagagcgtgagcagcgtggcccaggagaacgccgtgaaggacttcaccagcttcagcacccacaactgcagcggccccgagaaccccgagctgcagatcctgaacgagcaggagggcaagagcgccaactaccacgacaagaacatcgtgctgctgaagaacaaggccgtgctgatgcccaacggcgccaccgtgagcgccagcagcgtggagcacacccacggcgagctgctggagaagaccctgagccagtactaccccgactgcgtgagcatcgccgtgcagaagaccaccagccacatcaacgccatcaacagccaggccaccaacgagctgagctgcgagatcacccaccccagccacaccagcggccagatcaacagcgcccagaccagcaacagcgagctgccccccaagcccgccgccgtggtgagcgaggcctgcgacgccgacgacgccgacaacgccagcaagctggccgccatgctgaacacctgcagcttccagaagcccgagcagctgcagcagcagaagagcgtgttcgagatctgccccagccccgccgagaacaacatccagggcaccaccaagctggccagcggcgaggagttctgcagcggcagcagcagcaacctgcaggcccccggcggcagcagcgagagatacctgaagcagaacgagatgaacggcgcctacttcaagcagagcagcgtgttcaccaaggacagcttcagcgccaccaccaccccccccccccccagccagctgctgctgagcccccccccccccctgccccaggtgccccagctgcccagcgagggcaagagcaccctgaacggcggcgtgctggaggagcaccaccactaccccaaccagagcaacaccaccctgctgagagaggtgaagatcgagggcaagcccgaggccccccccagccagagccccaaccccagcacccacgtgtgcagccccagccccatgctgagcgagagaccccagaacaactgcgtgaacagaaacgacatccagaccgccggcaccatgaccgtgcccctgtgcagcgagaagaccagacccatgagcgagcacctgaagcacaacccccccatcttcggcagcagcggcgagctgcaggacaactgccagcagctgatgagaaacaaggagcaggagatcctgaagggcagagacaaggagcagaccagagacctggtgccccccacccagcactacctgaagcccggctggatcgagctgaaggcccccagattccaccaggccgagagccacctgaagagaaacgaggccagcctgcccagcatcctgcagtaccagcccaacctgagcaaccagatgaccagcaagcagtacaccggcaacagcaacatgcccggcggcctgcccagacaggcctacacccagaagaccacccagctggagcacaagagccagatgtaccaggtggagatgaaccagggccagagccagggcaccgtggaccagcacctgcagttccagaagcccagccaccaggtgcacttcagcaagaccgaccacctgcccaaggcccacgtgcagagcctgtgcggcaccagattccacttccagcagagagccgacagccagaccgagaagctgatgagccccgtgctgaagcagcacctgaaccagcaggccagcgagaccgagcccttcagcaacagccacctgctgcagcacaagccccacaagcaggccgcccagacccagcccagccagagcagccacctgccccagaaccagcagcagcagcagaagctgcagatcaagaacaaggaggagatcctgcagaccttcccccacccccagagcaacaacgaccagcagagagagggcagcttcttcggccagaccaaggtggaggagtgcttccacggcgagaaccagtacagcaagagcagcgagttcgagacccacaacgtgcagatgggcctggaggaggtgcagaacatcaacagaagaaacagcccctacagccagaccatgaagagcagcgcctgcaagatccaggtgagctgcagcaacaacacccacctggtgagcgagaacaaggagcagaccacccaccccgagctgttcgccggcaacaagacccagaacctgcaccacatgcagtacttccccaacaacgtgatccccaagcaggacctgctgcacagatgcttccaggagcaggagcagaagagccagcaggccagcgtgctgcagggctacaagaacagaaaccaggacatgagcggccagcaggccgcccagctggcccagcagagatacctgatccacaaccacgccaacgtgttccccgtgcccgaccagggcggcagccacacccagacccccccccagaaggacacccagaagcacgccgccctgagatggcacctgctgcagaagcaggagcagcagcagacccagcagccccagaccgagagctgccacagccagatgcacagacccatcaaggtggagcccggctgcaagccccacgcctgcatgcacaccgccccccccgagaacaagacctggaagaaggtgaccaagcaggagaacccccccgccagctgcgacaacgtgcagcagaagagcatcatcgagaccatggagcagcacctgaagcagttccacgccaagagcctgttcgaccacaaggccctgaccctgaagagccagaagcaggtgaaggtggagatgagcggccccgtgaccgtgctgaccagacagaccaccgccgccgagctggacagccacacccccgccctggagcagcagaccaccagcagcgagaagacccccaccaagagaaccgccgccagcgtgctgaacaacttcatcgagagccccagcaagctgctggacacccccatcaagaacctgctggacacccccgtgaagacccagtacgacttccccagctgcagatgcgtgggcctggacagaagagtgaagctgctgggcctgaaggagagcagcatcctggtgaagaaggccaaggtgctgagagacgtgctgctgctgagcggctggttcgccgaggccgccgtgaagagaagctactgcgtgtggtgcggcagcgagctggccacccccgtgagactgcagtag

SEQ ID NO: 287685 - DNA, 3585 bp, Artificial Sequence
  derived and/or modified sequence
atggagcaggatcggaccaaccacgttgaaggaaaccgcttgtcaccctttctcattccatcacctcctatttgtcagacagaacccctcgccacgaagttgcaaaacggaagtcccctgccagaaagggcacatcccgaagtgaacggggacactaaatggcactccttcaaatcgtactatggaatcccatgtatgaagggcagtcaaaatagtcgcgtttcccctgacttcacccaggaatctcgagggtacagtaaatgcctccagaatggtggtatcaagagaaccgtgtcagagccgtccctcagcggcctgttgcagattaaaaagttaaagcaggaccagaaagcaaatggtgagagaagaaactttggagttagccaggaacgtaacccaggcgagtcttcacaacccaatgtctctgacctgagtgacaagaaggaaagcgtttcatcagttgcgcaggagaatgccgtcaaagacttcacctcattctctacacataattgttccggcccagaaaatcccgaactgcagattttgaatgaacaggagggtaagagtgccaactaccacgataagaacattgttctgctgaagaataaagctgtgctcatgcctaacggtgctactgttagcgcctccagcgtggagcacacacatggagagttacttgagaagaccctcagtcagtactaccctgactgcgtgtccatcgcagtgcaaaagaccacgtcccacatcaatgcaatcaattcacaggccactaacgaactgtcttgcgagattacacatcctagtcatacgtctgggcagatcaacagcgcgcagacctccaattctgagctgccaccaaagccagcagccgtggtgtctgaagcctgtgatgccgatgatgcggataatgcctcaaagttggcagctatgctcaacacatgcagcttccagaagccagagcagctgcagcagcagaaatctgtgtttgaaatttgcccaagtcccgcagagaataacatccaaggcactaccaagctggcaagtggggaagagttctgtagcgggagtagttcgaatctgcaggcccctggcggctccagcgaacggtatctgaagcagaacgagatgaatggcgcgtatttcaagcagagtagtgtgttcactaaagattctttttccgcaacaactacacctccacctccgtctcagctcctgctaagcccccccccacccttgccacaagtgccccagctcccttctgaaggcaaaagtacacttaatggtggcgtactcgaggagcaccaccattaccccaaccaatctaacaccacgctgttgcgggaggtaaagatcgagggtaagcccgaggcccccccctcccagagtcccaacccaagtacacacgtttgttccccaagtcctatgctgagcgaaagaccccagaacaactgtgtgaatcggaatgacatacagaccgccggcacaatgaccgtccctttgtgcagtgaaaagactcgccctatgtcagagcacctgaagcacaatccaccaatcttcggttcatctggcgagctgcaggataattgccagcagctcatgaggaacaaagagcaagagatcctcaaaggccgggacaaggagcagaccagggatttagtgccacccacccagcactatttgaagccggggtggattgaacttaaggctcctcgtttccaccaggccgaatctcacctgaaacgtaacgaggcttcgctcccctccattctgcagtatcagcctaacctgagtaaccagatgacctcaaaacaatacaccggaaattccaacatgccaggaggtttgccacggcaggcctatacacagaagactacacagttggagcataaaagtcagatgtaccaggttgaaatgaatcaagggcagtcccaggggacagtggaccagcatctgcaattccagaagccttcacaccaggtccacttttcaaagactgaccatctgccgaaggctcatgtgcagtccctatgcgggacacgcttccacttccaacagagagcagattcacaaacagagaagctgatgtccccggtgctgaaacagcaccttaaccagcaggccagtgagaccgagcctttttcaaattcccacctactacagcacaaacctcacaaacaggccgctcaaacccaaccaagccaaagctctcatctgccgcaaaatcagcagcagcagcagaagttgcagattaaaaataaggaggagatcttgcagacctttccacaccctcagagtaataatgatcagcagcgcgagggatccttttttggacagactaaggtggaggaatgtttccatggggagaaccaatatagcaaatcgtctgagtttgagacacataatgtccaaatgggtctcgaggaggtgcagaatatcaatcgccggaacagtccttattcgcagacaatgaagagttctgcctgtaagattcaggtgtcttgctccaataatactcacctcgtgagtgagaacaaagaacagactacacatcccgagctctttgccggcaacaagactcaaaacttacatcacatgcaatatttcccaaataatgtgatacccaaacaggacctgctgcaccgctgttttcaagagcaggagcagaagagccagcaggcaagcgtcctacaggggtacaaaaacagaaaccaggacatgagcggacagcaggctgctcagcttgcccagcaaaggtacctgattcataatcacgcaaacgtgtttccggttccagatcaaggcggaagtcacacccaaaccccaccgcagaaggacacacagaagcacgctgccctgcggtggcacctactgcaaaaacaggaacaacagcagactcagcagccacagactgaatcatgccatagccagatgcaccggccgattaaggtggagcccggatgtaagccacatgcttgtatgcatacagctccgcccgaaaataagacttggaaaaaggtgacaaaacaagaaaacccaccggcgtcctgtgataacgttcagcaaaagtccataatcgagacgatggagcagcatctcaagcagttccacgcaaagagcttattcgaccacaaggcactcacactgaaatcgcagaaacaagttaaagtcgagatgtcagggcccgtgactgttctgacgcggcagacgacagccgcagaactggactcccacacccctgccctggagcaacagacaacctcatccgaaaagacaccaactaagagaacagccgccagcgtccttaataacttcatagaaagtccatctaagctgctggatacccccataaaaaatttgctggacacaccagtgaagacacagtacgacttcccatcttgtcggtgtgtcggactggataggcgcgtgaagttgctcgggctgaaggaatctagtatacttgtgaaaaaggctaaagtgcttagagacgtgttactgctgtctggttggtttgccgaagctgccgtgaagcgcagttattgcgtctggtgcggtagcgagctcgcgactcccgtgaggcttcagtag

SEQ ID NO: 287686 - DNA, 3585 bp, Artificial Sequence
  derived and/or modified sequence
atggagcaggacaggaccaaccacgtggagggcaaccggctgagccccttcctgatccccagcccccccatctgccagacagagcccctggccaccaagctgcagaatggcagccccctgcctgagcgggcccaccctgaggtgaatggagacaccaagtggcacagcttcaagagctactacggcatcccctgcatgaagggcagccagaacagccgggtgtccccagacttcacccaggagagccggggctacagcaagtgcctgcagaatggaggcatcaagaggacagtgtctgagcccagcctgagcggcctgctgcagatcaagaagctgaagcaggaccagaaggccaatggagagaggaggaactttggagtgtcccaggagagaaatcctggagagagcagccagcccaacgtgtctgacctgagtgacaagaaggagagcgtgtcctctgtggcccaggagaatgctgtgaaggacttcaccagcttcagcacccacaactgcagcggcccagaaaatcctgagctgcagatcctgaatgagcaggagggcaagagcgccaactaccatgacaagaacatcgtgctgctgaagaacaaggctgtgctgatgcccaatggagccaccgtgtctgccagctctgtggagcacacccacggggagctgctggagaagaccctgagccagtactacccagactgtgtgtccattgctgtgcagaagaccaccagccacatcaatgccatcaacagccaggccaccaatgagctgagctgtgagatcacccaccccagccacaccagcggccagatcaacagcgcccagaccagcaacagcgagctgccccccaagccagctgctgtggtgtctgaggcctgtgatgctgatgatgctgacaatgccagcaagctggccgccatgctgaacacctgcagcttccagaagccagagcagctgcagcagcagaagtctgtgtttgagatctgccccagccctgctgagaacaacatccagggcaccaccaagctggccagcggggaggagttctgcagcggcagcagcagcaacctgcaggcccctgggggcagcagcgagcgctacctgaagcagaatgagatgaatggagcctacttcaagcagagctctgtgttcaccaaggacagcttcagcgccaccaccaccccacctccacccagccagctgctgctgagccccccaccacccctgccccaggtgccccagctgcccagcgagggcaagagcaccctgaatggaggagtgctggaggagcaccaccactaccccaaccagagcaacaccaccctgctgcgggaggtgaagattgagggcaagccagaggccccacccagccagagccccaaccccagcacccacgtgtgcagccccagccccatgctgtctgagcggccccagaacaactgtgtgaacagaaatgacatccagacagctggcaccatgacagtgcccctgtgcagcgagaagacccggcccatgtctgagcacctgaagcacaacccccccatcttcggcagcagcggggagctgcaggacaactgccagcagctgatgaggaacaaggagcaggagatcctgaagggccgggacaaggagcagacccgggacctggtgccccccacccagcactacctgaagccaggctggattgagctgaaggccccccgcttccaccaggccgagagccacctgaagagaaatgaggccagcctgcccagcatcctgcagtaccagcccaacctgagcaaccagatgaccagcaagcagtacacaggcaacagcaacatgcctgggggcctgccccggcaggcctacacccagaagaccacccagctggagcacaagagccagatgtaccaggtggagatgaaccagggccagagccagggcaccgtggaccagcacctgcagttccagaagcccagccaccaggtgcacttcagcaagacagaccacctgcccaaggcccacgtgcagagcctgtgtggcacccgcttccacttccagcagagagctgacagccagacagagaagctgatgagccctgtgctgaagcagcacctgaaccagcaggccagcgagacagagcccttcagcaacagccacctgctgcagcacaagccccacaagcaggccgcccagacccagcccagccagagcagccacctgccccagaaccagcagcagcagcagaagctgcagatcaagaacaaggaggagatcctgcagaccttcccccacccccagagcaacaatgaccagcagcgggagggcagcttcttcggccagaccaaggtggaggagtgcttccacggggagaaccagtacagcaagagcagcgagtttgagacccacaacgtgcagatgggcctggaggaggtgcagaacatcaacagaagaaacagcccctacagccagaccatgaagagcagcgcctgcaagatccaggtgtcctgcagcaacaacacccacctggtgtctgagaacaaggagcagaccacccaccctgagctgtttgctggcaacaagacccagaacctgcaccacatgcagtacttccccaacaacgtcatccccaagcaggacctgctgcaccgctgcttccaggagcaggagcagaagagccagcaggcctctgtgctgcagggctacaagaacagaaaccaggacatgagcggccagcaggccgcccagctggcccagcagcgctacctgatccacaaccacgccaacgtgtttcctgtgcctgaccagggcggcagccacacccagaccccaccccagaaggacacccagaagcacgccgccctgcgctggcacctgctgcagaagcaggagcagcagcagacccagcagccccagacagagagctgccacagccagatgcaccggcccatcaaggtggagcccggctgcaagccccacgcctgcatgcacacagcccccccagagaacaagacctggaagaaggtgaccaagcaggagaaccccccagccagctgtgacaacgtgcagcagaagagcatcatcgagaccatggagcagcacctgaagcagttccacgccaagagcctgtttgaccacaaggccctgaccctgaagagccagaagcaggtgaaggtggagatgagcggccctgtgacagtgctgacccggcagaccacagctgctgagctggacagccacaccccagccctggagcagcagaccaccagcagcgagaagacccccaccaagaggacagctgcctctgtgctgaacaacttcatcgagagccccagcaagctgctggacacccccatcaagaacctgctggacacccctgtgaagacccagtatgacttccccagctgccgctgtgtgggcctggaccggcgggtgaagctgctgggcctgaaggagagcagcatcctggtgaagaaggccaaggtgctgagagatgtgctgctgctgagcggctggtttgctgaggccgctgtgaagaggagctactgtgtgtggtgtggcagcgagctggccacccctgtgcggctgcagtag

SEQ ID NO: 287687 - DNA, 3585 bp, Artificial Sequence
  derived and/or modified sequence
atggagcaggaccggaccaaccacgtggagggcaaccggctgagccccttcctgataccttctccacccatctgtcagacggagccgctggcaacaaagctgcaaaatggctcccccctgcctgagcgcgcccaccccgaagtgaatggcgacaccaagtggcactcattcaagtcctattacgggatcccctgcatgaagggatcacagaactcgcgcgttagtccagacttcacccaggagtccagggggtatagtaaatgtctgcagaacggcggtattaagagaacagtgtctgagccatccttaagcgggctactgcaaatcaaaaagctaaagcaggaccagaaggctaatggtgaacgcagaaattttggagtaagccaggagaggaaccctggagagtctagtcagcctaatgtgagtgatctgtcggataagaaggaatccgtgtcctccgtggcccaggaaaatgctgtgaaagacttcaccagcttctctacccacaactgttccggcccggaaaaccccgagctgcagattctcaacgaacaggagggtaagtccgccaactaccacgacaagaatatcgtcctcctcaagaacaaggcagttctcatgcccaatggggccacagtctctgctagctcggtggagcacacccatggggagttgcttgagaagacactgtcacagtactaccccgactgcgtgtcaatcgcagtacagaaaacaaccagccacattaacgctattaacagccaggctaccaatgagcttagctgtgagatcactcatccaagccacacctccggccagataaattcagcacagacatcgaacagtgagctgcctccaaaaccggctgcggtggtcagcgaagcctgcgacgcagatgacgccgacaacgcaagtaagctggcggccatgctaaatacatgtagttttcagaagcctgagcagctgcagcagcagaagtccgtctttgaaatctgccccagtcctgcggaaaacaacattcaggggaccaccaagctcgcgtctggggaagagttctgcagcggtagcagttccaacctccaagctccgggcggttcctctgagaggtatctgaaacaaaacgagatgaacggggcctatttcaagcagagttcagtgtttaccaaggactcctttagtgccaccactacgcctcctcccccctctcagctgctactaagtccccccccgccattgcctcaagtaccacaattgccaagtgaggggaaatctactcttaacggtggcgttctggaggagcatcatcattaccctaatcagtcgaacaccaccctgctaagagaggtgaaaattgagggcaagcccgaggctccaccttctcagtctccgaacccctctactcacgtgtgtagtccctcacctatgcttagcgagcgtccccaaaacaactgcgtgaaccgcaatgacatccagacagccggtactatgactgtaccactttgcagcgagaagactagacctatgagtgagcacttgaagcacaatccccctatctttggatcatcaggcgaactccaggataactgccagcagctgatgcgaaacaaggagcaagagattctcaaggggcgtgacaaagagcagactcgtgatctcgtgccccccacccagcattatctgaaaccagggtggattgaactgaaggcccccagatttcaccaggccgagtctcatctcaaacgaaacgaggcctctctgccatcgatcttgcagtaccagcctaacctgtcaaaccagatgacatccaagcaatatactggtaattccaacatgcccggtggcctgcctcgccaggcctatacccaaaaaaccacacaactcgagcacaaatcccagatgtaccaggtggagatgaatcagggtcagtctcaggggaccgtggaccagcatctccagttccagaagcccagtcatcaagttcactttagtaagactgaccatttacccaaagctcacgtccagtctctatgtgggacgcgctttcactttcagcagagggccgatagccagacagaaaagttgatgagtccagtgctgaagcaacacttaaatcagcaggcaagcgagaccgaaccattttctaattctcacttgcttcagcacaagcctcacaagcaggcagcccaaacccaaccatctcagtctagccacctgccacagaatcagcaacagcagcagaaactgcagattaagaacaaggaggagatactccagactttccctcatccacagagcaataacgaccagcagagggagggctcattttttggccagaccaaggtcgaagagtgttttcacggcgagaaccaatattccaaatcttctgagtttgagacccacaatgtccagatgggtctggaggaagttcaaaatatcaatcggcgcaattccccttacagtcaaacgatgaaaagctctgcctgtaagatccaggtgtcctgctcaaacaatactcacctggtgtctgagaataaagaacaaaccacgcatccagaattgttcgccggtaacaagacacagaacctgcatcacatgcagtactttccgaataacgtgatccctaaacaggacctattacatcggtgcttccaggagcaggaacagaagtctcagcaggcctcggtacttcagggttacaaaaataggaaccaggacatgtcagggcagcaggccgctcaacttgcccagcaacgctatctgattcataatcatgcgaacgtgtttcctgtccctgaccagggtggtagccatacgcagacacctcctcagaaggatactcagaaacacgccgctcttaggtggcatctgctccagaagcaggaacaacagcagactcagcagccacagactgaaagctgtcactctcagatgcatcgaccgatcaaggtggaaccaggatgcaaaccacacgcatgcatgcatacagccccgcccgaaaataaaacatggaagaaggttacgaaacaggagaatccgcccgcttcctgtgacaatgttcaacaaaaaagcataattgagacgatggagcagcatctgaagcagttccatgccaaatctttatttgatcataaggccctgacactgaagagccaaaagcaggtcaaagttgagatgtccggcccggtcaccgtattgactcggcagacgacagctgccgaactcgacagccacaccccagctctcgaacaacagacgacatcaagcgagaaaacccccactaagcgcaccgctgcaagtgtcctcaataactttattgagtcaccctcaaaattgctggatacccctataaaaaacctcttggatacaccagtaaagactcagtacgacttcccaagctgccgatgcgtcgggttggacaggcgagtcaagctcctcggtctgaaagaatccagtatcctggttaagaaagccaaagtgctgagggacgtgctgctcctgagcggctggttcgctgaagccgccgttaaaaggagttattgtgtctggtgcggaagtgaactggccactcctgtgcgccttcagtag

SEQ ID NO: 287688 - DNA, 3585 bp, Artificial Sequence
  derived and/or modified sequence
atggagcaggatcgaacgaaccatgttgaaggaaatcgcctctctccctttctgattccaagtcctcctatctgtcaaacggagccactggcgaccaaattgcagaacggctcacctctccctgagcgggctcatccagaagtgaacggcgacacaaagtggcactccttcaaatcctattacgggattccctgcatgaaaggctcacagaatagcagggtgagtcccgactttacacaggagagcagggggtattctaagtgcttgcagaatggcggtatcaaaagaacggtctcagaaccttcactctcagggcttctccagattaaaaaattaaaacaggatcagaaggctaacggagaaagacggaatttcggcgtgtcacaggaaagaaacccaggcgaatcctcacagcccaatgtgtcagacctgtctgataagaaggaaagcgtatcttccgtcgctcaggagaacgctgttaaagattttacttccttctcaacccacaactgctctgggccagagaatccagagctgcagatcctcaacgagcaagagggaaagagcgctaattatcatgacaagaatatagtcctgctaaagaataaggctgtgctaatgcccaacggcgcaacagtctcagcgagttccgtggagcatacccatggagagctgctggaaaagaccctgagccagtactatccggattgcgtctctatcgcagtgcagaagacaacttcacacatcaacgccatcaattcacaggccacaaacgaattgtcttgcgagataacccatccatcccatacgagcggccagatcaactcagcccagacctcgaactctgagcttccgcctaaaccagcagcggtcgtatccgaggcttgcgacgcagatgacgcagataatgccagcaaactggctgcgatgctaaacacttgttcgttccagaaaccagagcaactacaacagcagaagtccgtgttcgagatctgcccatcacccgcagagaataatattcaggggacgacaaagctagcctccggcgaagaattctgcagcgggagcagcagcaatctccaagcccctggcggatcctctgaaaggtatctcaaacagaatgagatgaacggcgcatacttcaaacagtcctcggtctttacaaaggactccttctctgccactacgacgcccccacctccatctcagctcttactgtctccccctccgccactgcctcaagtgcctcagctgccttcagaaggtaaaagcacgcttaacggtggggtgcttgaggagcaccatcactacccaaatcagtctaacaccacccttctgcgtgaagtcaaaatcgagggtaagcctgaagcgcctccctctcagtccccaaatcccagcacccacgtttgttcccctagtccaatgctctctgaaaggccccaaaacaactgcgtgaacaggaacgacatccagaccgctgggactatgaccgtgcccctgtgttctgagaaaactaggccaatgagtgagcatctaaagcacaatccgccaatcttcggtagcagtggagagttgcaagataattgccaacagttgatgaggaacaaggaacaggagatactgaaaggaagagacaaggagcagacccgggacctggttcctccaacccagcattatctcaaacctggttggatcgagctgaaggcgcctagattccaccaggccgagtcacaccttaagcgcaatgaggcctccttgccctcaattctccagtatcaacccaatctgtcgaatcagatgactagcaagcaatacactggaaattccaacatgccaggtggtttaccgaggcaggcttatacccagaagaccacccagctcgaacacaagagtcagatgtaccaggtggagatgaatcagggccagtcccagggcacagtggatcagcacctccaatttcagaaaccgagccaccaagtgcacttttcgaagaccgatcatcttcccaaagctcatgtccagtccctctgcggcaccagatttcactttcagcaacgtgcagattcccagaccgaaaaactcatgagcccagtgctgaaacagcaccttaatcaacaggcctcagagaccgagcctttctcgaattcccacctgttgcagcacaagcctcacaaacaggccgcacagactcagccctctcagagctcacacctcccccagaaccaacagcagcagcaaaagctgcaaattaagaacaaggaggagattctgcagaccttccctcatccccagagtaacaacgaccaacagagggagggtagttttttcggccagaccaaggtcgaggagtgcttccacggcgagaaccagtatagtaagtcgtccgagttcgaaactcacaacgtgcagatgggcctggaggaggtgcaaaatataaaccgaagaaattctccatatagccagactatgaagagtagcgcctgtaagatccaagtatcttgcagcaataatacacatctggtgtccgagaacaaggagcagacgacccatccggagttattcgcgggaaacaaaacccagaatttgcaccacatgcaatacttcccaaacaatgtaatccctaagcaggacctgctgcaccgctgctttcaggagcaggagcagaagtctcagcaggcttccgtactgcagggatataagaaccggaatcaggatatgagcgggcagcaggctgcacaactcgcccaacagcggtatctgattcacaaccacgctaatgtattcccagtgccagaccagggtggatcgcacacccaaaccccccctcaaaaagatacacagaaacacgccgctctcagatggcacttactgcaaaaacaggaacagcagcaaacccagcagccccagaccgagagttgtcatagccagatgcaccggccaatcaaggtggaaccaggctgtaagccccacgcatgtatgcataccgcaccccctgagaacaagacatggaaaaaagtcaccaagcaggagaatccccctgctagttgcgataacgtgcagcagaaaagtatcattgagacaatggagcaacatcttaaacagttccatgccaaatctctgtttgaccacaaggccctcacgttaaagagtcaaaaacaggtgaaggtggaaatgagcggcccagtcactgtgcttacccgacagaccaccgctgccgagttagacagtcacacccctgctctcgagcagcaaactacaagttccgagaaaaccccaaccaaacgaactgcagccagcgtgctgaataactttattgaaagccccagtaagttgctcgatacacctataaaaaatcttttagatacccccgtgaaaacacagtatgattttcctagctgtaggtgcgttggccttgacagacgtgtaaaattactgggccttaaagaaagctctatcttagtgaaaaaagcgaaggtcctaagagatgtgttgctgcttagcgggtggtttgccgaagccgcagtcaagcggagttattgtgtgtggtgcgggtccgagctggcaacgcctgtcagactacagtag

SEQ ID NO: 287689 - DNA, 10075 bp, Artificial Sequence
  derived and/or modified sequence
ccgtgccatcccaacctcccacctcgcccccaaccttcgcgcttgctctgcttcttctcccaggggtggagacccgccgaggtccccggggttcccgagggctgcacccttccccgcgctcgccagccctggcccctactccgcgctggtccgggcgcaccactccccccgcgccactgcacggcgtgagggcagcccaggtctccactgcgcgccccgctgtacggccccaggtgccgccggcctttgtgctggacgcccggtgcggggggctaattccctgggagccggggctgagggccccagggcggcggcgcaggccggggcggagcgggaggaggccggggcggagcaggaggaggcccgggcggaggaggagagccggcggtagcggcagtggcagcggcgagagcttgggcggccgccgccgcctcctcgcgagcgccgcgcgcccgggtcccgctcgcatgcaagtcacgtccgccccctcggcgcggccgccccgagacgccggccccgctgagtgatgagaacagacgtcaaactgccttatgaatattgatgcggaggctaggctgctttcgtagagaagcagaaggaagcaagatggctgccctttaggatttgttagaaaggagacccgactgcaactgctggattgctgcaaggctgagggacgagaacgaggctggcaaacattcagcagcacaccctctcaagattgtttacttgcctttgctcctgttgagttacaacgcttggaagcaggagatgggctcagcagcagccaataggacatgatccaggaagagcaaattcaactagagggcagccttgtggatggccccgaagcaagcctgatggaacaggatagaaccaaccatgttgagggcaacagactaagtccattcctgataccatcacctcccatttgccagacagaacctctggctacaaagctccagaatggaagcccactgcctgagagagctcatccagaagtaaatggagacaccaagtggcactctttcaaaagttattatggaataccctgtatgaagggaagccagaatagtcgtgtgagtcctgactttacacaagaaagtagagggtattccaagtgtttgcaaaatggaggaataaaacgcacagttagtgaaccttctctctctgggctccttcagatcaagaaattgaaacaagaccaaaaggctaatggagaaagacgtaacttcggggtaagccaagaaagaaatccaggtgaaagcagtcaaccaaatgtctccgatttgagtgataagaaagaatctgtgagttctgtagcccaagaaaatgcagttaaagatttcaccagtttttcaacacataactgcagtgggcctgaaaatccagagcttcagattctgaatgagcaggaggggaaaagtgctaattaccatgacaagaacattgtattacttaaaaacaaggcagtgctaatgcctaatggtgctacagtttctgcctcttccgtggaacacacacatggtgaactcctggaaaaaacactgtctcaatattatccagattgtgtttccattgcggtgcagaaaaccacatctcacataaatgccattaacagtcaggctactaatgagttgtcctgtgagatcactcacccatcgcatacctcagggcagatcaattccgcacagacctctaactctgagctgcctccaaagccagctgcagtggtgagtgaggcctgtgatgctgatgatgctgataatgccagtaaactagctgcaatgctaaatacctgttcctttcagaaaccagaacaactacaacaacaaaaatcagtttttgagatatgcccatctcctgcagaaaataacatccagggaaccacaaagctagcgtctggtgaagaattctgttcaggttccagcagcaatttgcaagctcctggtggcagctctgaacggtatttaaaacaaaatgaaatgaatggtgcttacttcaagcaaagctcagtgttcactaaggattccttttctgccactaccacaccaccaccaccatcacaattgcttctttctccccctcctcctcttccacaggttcctcagcttccttcagaaggaaaaagcactctgaatggtggagttttagaagaacaccaccactaccccaaccaaagtaacacaacacttttaagggaagtgaaaatagagggtaaacctgaggcaccaccttcccagagtcctaatccatctacacatgtatgcagcccttctccgatgctttctgaaaggcctcagaataattgtgtgaacaggaatgacatacagactgcagggacaatgactgttccattgtgttctgagaaaacaagaccaatgtcagaacacctcaagcataacccaccaatttttggtagcagtggagagctacaggacaactgccagcagttgatgagaaacaaagagcaagagattctgaagggtcgagacaaggagcaaacacgagatcttgtgcccccaacacagcactatctgaaaccaggatggattgaattgaaggcccctcgttttcaccaagcggaatcccatctaaaacgtaatgaggcatcactgccatcaattcttcagtatcaacccaatctctccaatcaaatgacctccaaacaatacactggaaattccaacatgcctggggggctcccaaggcaagcttacacccagaaaacaacacagctggagcacaagtcacaaatgtaccaagttgaaatgaatcaagggcagtcccaaggtacagtggaccaacatctccagttccaaaaaccctcacaccaggtgcacttctccaaaacagaccatttaccaaaagctcatgtgcagtcactgtgtggcactagatttcattttcaacaaagagcagattcccaaactgaaaaacttatgtccccagtgttgaaacagcacttgaatcaacaggcttcagagactgagccattttcaaactcacaccttttgcaacataagcctcataaacaggcagcacaaacacaaccatcccagagttcacatctccctcaaaaccagcaacagcagcaaaaattacaaataaagaataaagaggaaatactccagacttttcctcacccccaaagcaacaatgatcagcaaagagaaggatcattctttggccagactaaagtggaagaatgttttcatggtgaaaatcagtattcaaaatcaagcgagttcgagactcataatgtccaaatgggactggaggaagtacagaatataaatcgtagaaattccccttatagtcagaccatgaaatcaagtgcatgcaaaatacaggtttcttgttcaaacaatacacacctagtttcagagaataaagaacagactacacatcctgaactttttgcaggaaacaagacccaaaacttgcatcacatgcaatattttccaaataatgtgatcccaaagcaagatcttcttcacaggtgctttcaagaacaggagcagaagtcacaacaagcttcagttctacagggatataaaaatagaaaccaagatatgtctggtcaacaagctgcgcaacttgctcagcaaaggtacttgatacataaccatgcaaatgtttttcctgtgcctgaccagggaggaagtcacactcagacccctccccagaaggacactcaaaagcatgctgctctaaggtggcatctcttacagaagcaagaacagcagcaaacacagcaaccccaaactgagtcttgccatagtcagatgcacaggccaattaaggtggaacctggatgcaagccacatgcctgtatgcacacagcaccaccagaaaacaaaacatggaaaaaggtaactaagcaagagaatccacctgcaagctgtgataatgtgcagcaaaagagcatcattgagaccatggagcagcatctgaagcagtttcacgccaagtcgttatttgaccataaggctcttactctcaaatcacagaagcaagtaaaagttgaaatgtcagggccagtcacagttttgactagacaaaccactgctgcagaacttgatagccacaccccagctttagagcagcaaacaacttcttcagaaaagacaccaaccaaaagaacagctgcttctgttctcaataattttatagagtcaccttccaaattactagatactcctataaaaaatttattggatacacctgtcaagactcaatatgatttcccatcttgcagatgtgtaggtttggacagaagggtaaagctattaggattgaaagagtcatctatactggtaaagaaggcaaaagttctcagggatgtcctattgctaagtgggtggttcgcagaagcagcagtgaagagaagctactgtgtttggtgcgggagcgagctggccacacctgtgaggctgcagtgattgtgattctcatcctggtgtgggaaggaatcccgctgtctctggctgacaaactctactcggagcttaccgagacgctgaggaaatacggcacgctcaccaatcgccggtgtgccttgaatgaagagagaacttgcgcctgtcaggggctggatccagaaacctgtggtgcctccttctcttttggttgttcatggagcatgtactacaatggatgtaagtttgccagaagcaagatcccaaggaagtttaagctgcttggggatgacccaaaagaggaagagaaactggagtctcatttgcaaaacctgtccactcttatggcaccaacatataagaaacttgcacctgatgcatataataatcagattgaatatgaacacagagcaccagagtgccgtctgggtctgaaggaaggccgtccattctcaggggtcactgcatgtttggacttctgtgctcatgcccacagagacttgcacaacatgcagaatggcagcacattggtatgcactctcactagagaagacaatcgagaatttggaggaaaacctgaggatgagcagcttcacgttctgcctttatacaaagtctctgacgtggatgagtttgggagtgtggaagctcaggaggagaaaaaacggagtggtgccattcaggtactgagttcttttcggcgaaaagtcaggatgttagcagagccagtcaagacttgccgacaaaggaaactagaagccaagaaagctgcagctgaaaagctttcctccctggagaacagctcaaataaaaatgaaaaggaaaagtcagccccatcacgtacaaaacaaactgaaaacgcaagccaggctaaacagttggcagaacttttgcgactttcaggaccagtcatgcagcagtcccagcagccccagcctctacagaagcagccaccacagccccagcagcagcagagaccccagcagcagcagccacatcaccctcagacagagtctgtcaactcttattctgcttctggatccaccaatccatacatgagacggcccaatccagttagtccttatccaaactcttcacacacttcagatatctatggaagcaccagccctatgaacttctattccacctcatctcaagctgcaggttcatatttgaattcttctaatcccatgaacccttaccctgggcttttgaatcagaatacccaatatccatcatatcaatgcaatggaaacctatcagtggacaactgctccccatatctgggttcctattctccccagtctcagccgatggatctgtataggtatccaagccaagaccctctgtctaagctcagtctaccacccatccatacactttaccagccaaggtttggaaatagccagagttttacatctaaatacttaggttatggaaaccaaaatatgcagggagatggtttcagcagttgtaccattagaccaaatgtacatcatgtagggaaattgcctccttatcccactcatgagatggatggccacttcatgggagccacctctagattaccacccaatctgagcaatccaaacatggactataaaaatggtgaacatcattcaccttctcacataatccataactacagtgcagctccgggcatgttcaacagctctcttcatgccctgcatctccaaaacaaggagaatgacatgctttcccacacagctaatgggttatcaaagatgcttccagctcttaaccatgatagaactgcttgtgtccaaggaggcttacacaaattaagtgatgctaatggtcaggaaaagcagccattggcactagtccagggtgtggcttctggtgcagaggacaacgatgaggtctggtcagacagcgagcagagctttctggatcctgacattgggggagtggccgtggctccaactcatgggtcaattctcattgagtgtgcaaagcgtgagctgcatgccacaacccctttaaagaatcccaataggaatcaccccaccaggatctccctcgtcttttaccagcataagagcatgaatgagccaaaacatggcttggctctttgggaagccaaaatggctgaaaaagcccgtgagaaagaggaagagtgtgaaaagtatggcccagactatgtgcctcagaaatcccatggcaaaaaagtgaaacgggagcctgctgagccacatgaaacttcagagcccacttacctgcgtttcatcaagtctcttgccgaaaggaccatgtccgtgaccacagactccacagtaactacatctccatatgccttcactcgggtcacagggccttacaacagatatatatgatatcacccccttttgttggttacctcacttgaaaagaccacaaccaacctgtcagtagtatagttctcatgacgtgggcagtggggaaaggtcacagtattcatgacaaatgtggtgggaaaaacctcagctcaccagcaacaaaagaggttatcttaccatagcacttaattttcactggctcccaagtggtcacagatggcatctaggaaaagaccaaagcattctatgcaaaaagaaggtggggaagaaagtgttccgcaatttacatttttaaacactggttctattattggacgagatgatatgtaaatgtgatcccccccccccgcttacaactctacacatctgtgaccacttttaataatatcaagtttgcatagtcatggaacacaaatcaaacaagtactgtagtattacagtgacaggaatcttaaaataccatctggtgctgaatatatgatgtactgaaatactggaattatggctttttgaaatgcagtttttactgtaatcttaacttttatttatcaaaatagctacaggaaacatgaatagcaggaaaacactgaatttgtttggatgttctaagaaatggtgctaagaaaatggtgtctttaatagctaaaaatttaatgcctttatatcatcaagatgctatcagtgtactccagtgcccttgaataataggggtaccttttcattcaagtttttatcataattacctattcttacacaagcttagtttttaaaatgtggacattttaaaggcctctggattttgctcatccagtgaagtccttgtaggacaataaacgtatatatgtacatatatacacaaacatgtatatgtgcacacacatgtatatgtataaatattttaaatggtgttttagaagcactttgtctacctaagctttgacaacttgaacaatgctaaggtactgagatgtttaaaaaacaagtttactttcattttagaatgcaaagttgatttttttaaggaaacaaagaaagcttttaaaatatttttgcttttagccatgcatctgctgatgagcaattgtgtccatttttaacacagccagttaaatccaccatggggcttactggattcaagggaatacgttagtccacaaaacatgttttctggtgctcatctcacatgctatactgtaaaacagttttatacaaaattgtatgacaagttcattgctcaaaaatgtacagttttaagaattttctattaactgcaggtaataattagctgcatgctgcagactcaacaaagctagttcactgaagcctatgctattttatggatcataggctcttcagagaactgaatggcagtctgcctttgtgttgataattatgtacattgtgacgttgtcatttcttagcttaagtgtcctctttaacaagaggattgagcagactgatgcctgcataagatgaataaacagggttagttccatgtgaatctgtcagttaaaaagaaacaaaaacaggcagctggtttgctgtggtggttttaaatcattaatttgtataaagaagtgaaagagttgtatagtaaattaaattgtaaacaaaacttttttaatgcaatgctttagtattttagtactgtaaaaaaattaaatatatacatatatatatatatatatatatatatatatatgagtttgaagcagaattcacatcatgatggtgctactcagcctgctacaaatatatcataatgtgagctaagaattcattaaatgtttgagtgatgttcctacttgtcatatacctcaacactagtttggcaataggatattgaactgagagtgaaagcattgtgtaccatcatttttttccaagtccttttttttattgttaaaaaaaaaagcataccttttttcaatacttgatttcttagcaagtataacttgaacttcaacctttttgttctaaaaattcagggatatttcagctcatgctctccctatgccaacatgtcacctgtgtttatgtaaaattgttgtaggttaataaatatattctttgtcagggatttaacccttttattttgaatcccttctattttacttgtacatgtgctgatgtaactaaaactaattttgtaaatctgttggctctttttattgtaaagaaaagcattttaaaagtttgaggaatcttttgactgtttcaagcaggaaaaaaaaattacatgaaaatagaatgcactgagttgataaagggaaaaattgtaaggcaggagtttggcaagtggctgttggccagagacttacttgtaactctctaaatgaagtttttttgatcctgtaatcactgaaggtacatactccatgtggacttcccttaaacaggcaaacacctacaggtatggtgtgcaacagattgtacaattacattttggcctaaatacatttttgcttactagtatttaaaataaattcttaatcagaggaggcctttgggttttattggtcaaatctttgtaagctggcttttgtctttttaaaaaatttcttgaatttgtggttgtgtccaatttgcaaacatttccaaaaatgtttgctttgcttacaaaccacatgattttaatgttttttgtataccataatatctagccccaaacatttgattactacatgtgcattggtgattttgatcatccattcttaatatttgatttctgtgtcacctactgtcatttgttaaactgctggccaacaagaacaggaagtatagtttggggggttggggagagtttacataaggaagagaagaaattgagtggcatattgtaaatatcagatctataattgtaaatataaaacctgcctcagttagaatgaatggaaagcagatctacaatttgctaatataggaatatcaggttgactatatagccatacttgaaaatgcttctgagtggtgtcaactttacttgaatgaatttttcatcttgattgacgcacagtgatgtacagttcacttctgaagctagtggttaacttgtgtaggaaacttttgcagtttgacactaagataacttctgtgtgcatttttctatgcttttttaaaaactagtttcatttcattttcatgagatgtttggtttataagatctgaggatggttataaatactgtaagtattgtaatgttatgaatgcaggttatttgaaagctgtttattattatatcattcctgataatgctatgtgagtgtttttaataaaatttatatttatttaatgcactctaagtgttgtcttcct

SEQ ID NO: 287690 - protein, 335 aa, Artificial Sequence
  derived and/or modified sequence
  misc_feature (1)..(1): Xaa can be any naturally occurring amino acid
XNVAIKKLSRPFQNQTHAKRAYRELVLMKCVNHKNIISLLNVFTPQKTLEEFQDVYLVMELMDANLCQVIQMELDHERMSYLLYQMLCGIKHLHSAGIIHRDLKPSNIVVKSDCTLKILDFGLARTAGTSFMMTPYVVTRYYRAPEVILGMGYKENVDMWSVGCIMGEMIKGAVLFPGTDHIDQWNKVIEQLGTPCPEFMKKLQPTVRNYVENRPKYAGLTFPKLFPDSLFPADSEHNKLKASQARDLLSKMLVIDPAKRISVDDALQHPYINVWYDPAEVEAPPPQIYDKQLDEREHTIEEWKELIYKEVMNSEEKTKNGVVKGQPSPSAQVQQ

SEQ ID NO: 287691 - DNA, 1008 bp, Artificial Sequence
  derived and/or modified sequence
tagaacgtcgcgatcaagaagctgtctcgcccttttcagaatcagacacacgccaaaagggcatatcgtgagctggtactcatgaaatgcgtgaatcataagaacattatcagtctgcttaatgtatttactccacagaagacactggaagaattccaggacgtctacctggtcatggagctgatggacgcaaacctctgccaggtgatacaaatggagttggaccacgaacgaatgtcctaccttctctaccagatgctgtgcggcatcaaacacctccattccgccggaatcatacacagggacctgaaacctagcaacatcgtggtcaagtccgattgcacacttaagatcctggatttcggcttggccagaacagctggcaccagttttatgatgacgccttatgtagtgaccaggtattaccgtgcacctgaagtaattttgggaatgggttataaggaaaacgtcgatatgtggtcagtgggttgtataatgggggagatgataaagggcgcagtgctgttccccggcacagatcacatcgatcaatggaataaggtcatcgagcagctgggtacaccctgtccagagtttatgaagaagctgcaaccaaccgtgaggaactacgtggaaaatcgacccaagtatgccgggctcaccttccccaaactgttccccgactccctgttccccgctgacagcgaacataataagctaaaggcaagccaagcacgggatctcctgagcaaaatgctggtgatcgacccagctaaaaggatttctgtagacgacgcgttgcagcacccctacattaacgtgtggtatgaccccgcagaggtggaggctccgcccccccagatttacgacaaacagttggacgagcgagaacatactatcgaggagtggaaggaacttatttacaaagaggtgatgaatagcgaggaaaagaccaagaacggggtggtgaaagggcaacctagcccaagcgcccaagtccagcagtag

SEQ ID NO: 287692 - DNA, 1008 bp, Artificial Sequence
  derived and/or modified sequence
tgaaatgtggccatcaagaagctgagccggcccttccagaaccagacccacgccaagagggcctaccgggagctggtgctgatgaagtgtgtgaaccacaagaacatcatcagcctgctgaatgtgttcaccccccagaagaccctggaggagttccaggatgtgtacctggtgatggagctgatggatgccaacctgtgccaggtgatccagatggagctggaccacgagaggatgagctacctgctgtaccagatgctgtgtggcatcaagcacctgcacagcgctggcatcatccaccgggacctgaagcccagcaacatcgtggtgaagagtgactgcaccctgaagatcctggactttggcctggccaggacagctggcaccagcttcatgatgaccccctacgtggtgacccgctactaccgggcccctgaggtgatcctgggcatgggctacaaggaaaatgtggacatgtggagcgtgggctgcatcatgggagagatgatcaagggagctgtgctcttccctggaacagaccacatcgaccagtggaacaaggtgattgagcagctgggcaccccctgcccagagttcatgaagaagctgcagcccaccgtgaggaactacgtggagaaccggcccaagtatgccggcctgaccttccccaagctgttcccagacagcctcttccctgctgacagcgagcacaacaagctgaaggccagccaggcccgggacctgctgagcaagatgctggtgattgatcctgccaagaggatctctgtggatgatgccctgcagcacccctacatcaacgtgtggtatgaccctgctgaggtggaggcccccccaccccagatctatgacaagcagctggatgagcgggagcacaccatcgaggagtggaaggagctgatctacaaggaggtgatgaacagcgaggagaagaccaagaatggagtggtgaagggccagcccagccccagcgcccaggtgcagcagtag

SEQ ID NO: 287693 - DNA, 1331 bp, Artificial Sequence
  derived and/or modified sequence
aaatgtggccattaagaagctcagcagaccctttcagaaccaaacacatgccaagagagcgtaccgggagctggtcctcatgaagtgtgtgaaccataaaaacattattagtttattaaatgtcttcacaccccagaaaacgctggaggagttccaagatgtttacttagtaatggaactgatggatgccaacttatgtcaagtgattcagatggaattagaccatgagcgaatgtcttacctgctgtaccaaatgttgtgtggcattaagcacctccattctgctggaattattcacagggatttaaaaccaagtaacattgtagtcaagtctgattgcacattgaaaatcctggactttggactggccaggacagcaggcacaagcttcatgatgactccatatgtggtgacacgttattacagagcccctgaggtcatcctggggatgggctacaaggagaacgttgacatgtggtcagtagggtgcatcatgggagaaatgataaaaggtgcagtgctgtttcctggcactgatcatattgaccagtggaataaggtaattgaacaactaggaacaccatgtccagaattcatgaagaaattgcaacccacagtaagaaactatgtggagaatcggcccaagtatgcgggactcaccttccccaaactcttcccagattccctcttcccagcggactccgagcacaataaactcaaagccagccaagccagggacttgttgtcaaagatgctagtgattgacccagcaaaaagaatatcagtggacgacgccttacagcatccctacatcaacgtctggtatgacccagccgaagtggaggcgcctccacctcagatatatgacaagcagttggatgaaagagaacacacaattgaagaatggaaagaacttatctacaaggaagtaatgaattcagaagaaaagactaaaaatggtgtagtaaaaggacagccttctccttcagcacaggtgcagcagtgaacagcagtgagagtctccctccatcctcgtctgtcaatgacatctcctccatgtccaccgaccagaccctggcatctgacactgacagcagcctggaagcctcggcaggacccctgggttgttgcaggtgactagccgcctgcctgcgaaacccagcgttcttcaggagatgatgtgatggaacacacacacacgcagacacacacacacacacaaatgcagacacacaacatcaagaaaacagcaagggagagaatccaagcctaaaattaaataaatctttcagcctgcttcttccccagggttctgtattgcagctaagctc

SEQ ID NO: 287694 - DNA, 1008 bp, Artificial Sequence
  derived and/or modified sequence
tgaaacgtggccatcaagaagctgagccggcccttccagaaccagacacacgctaaacgggcttaccgagagctggtcctcatgaagtgtgtgaaccacaagaacatcatctcactcctaaacgtgttcaccccacagaagactttggaagagtttcaggacgtatacctcgtcatggaactgatggacgctaacctttgccaagtaatccagatggaactcgatcacgagcgcatgtcctacctcctctatcagatgttatgcggaataaagcacctccactccgccggcataatccatagagacctgaaaccttcaaacatcgtcgtcaagagtgactgcacactgaagatactcgacttcgggctggccaggaccgccggcaccagctttatgatgacaccctatgtggttacccgctactatagggccccagaagtaattttgggcatgggctacaaggagaatgttgacatgtggtccgtgggatgtatcatgggcgagatgatcaagggcgccgtcctgtttcctgggacagaccacattgatcaatggaacaaggtgattgagcagctaggcaccccatgccccgagttcatgaagaaactccaacctactgtcagaaattatgtcgaaaatagacctaagtacgctggccttacattccctaaattgtttccagactctctgtttcctgctgacagcgaacacaacaagctgaaagcttcccaggcccgcgatctcctgtcgaagatgttggtgattgaccccgctaagaggataagcgttgacgatgctctgcagcacccctacattaacgtgtggtacgatcccgccgaagtggaggcccccccccctcagatctatgataagcaactcgacgagcgcgagcacacaatcgaagagtggaaggaactgatctacaaagaggtgatgaatagtgaggaaaaaacaaagaacggcgtcgtcaagggtcagccgtctcccagtgcccaggtgcaacagtag

SEQ ID NO: 287695 - DNA, 1008 bp, Artificial Sequence
  derived and/or modified sequence
tgaaatgtggcgataaaaaaactaagccgcccattccagaaccagacacatgccaaaagggcatatcgggagcttgtcctaatgaagtgcgtgaatcacaagaatatcatctctctgttgaacgtgttcacaccccaaaagactctggaggagtttcaggacgtctacctcgtcatggaattaatggacgctaatctgtgccaggtgatacagatggaacttgaccacgagcggatgtcatatctcctgtaccaaatgctgtgcggaataaagcatctgcactcagcgggaattatccatagggacttgaaacccagtaacattgtcgtaaagagcgattgtactctgaagatactagactttggcctggcaagaaccgccggaacaagctttatgatgaccccctatgtggtcactcgatattatcgggcacccgaagtaattctggggatgggctataaggaaaatgtggacatgtggagcgttggatgtatcatgggagagatgattaaaggagccgtcttgttcccaggaaccgaccatatcgatcagtggaacaaagtgatcgaacaactgggtaccccctgccctgaattcatgaagaagctgcagcctactgttagaaactacgtggaaaatcgaccgaagtatgctggtctgaccttccccaagttgtttccagattcgttgttccctgccgattctgaacataataagttgaaagcatctcaggctagggatctgctgagcaagatgcttgttatcgatccagcaaagcgaattagtgtggacgacgctctgcaacatccatatataaacgtctggtatgaccccgcagaggtagaggcccctcctccccaaatttacgataagcagctcgacgagagagagcacacaatagaggagtggaaagagctgatctacaaagaggttatgaatagtgaagaaaagaccaaaaacggcgttgtgaaagggcagcctagcccttcggcccaggtacaacagtag

SEQ ID NO: 287696 - DNA, 1008 bp, Artificial Sequence
  derived and/or modified sequence
tgaaacgtggccatcaagaagctgagcagacccttccagaaccagacccacgccaagagagcctacagagagctggtgctgatgaagtgcgtgaaccacaagaacatcatcagcctgctgaacgtgttcaccccccagaagaccctggaggagttccaggacgtgtacctggtgatggagctgatggacgccaacctgtgccaggtgatccagatggagctggaccacgagagaatgagctacctgctgtaccagatgctgtgcggcatcaagcacctgcacagcgccggcatcatccacagagacctgaagcccagcaacatcgtggtgaagagcgactgcaccctgaagatcctggacttcggcctggccagaaccgccggcaccagcttcatgatgaccccctacgtggtgaccagatactacagagcccccgaggtgatcctgggcatgggctacaaggagaacgtggacatgtggagcgtgggctgcatcatgggcgagatgatcaagggcgccgtgctgttccccggcaccgaccacatcgaccagtggaacaaggtgatcgagcagctgggcaccccctgccccgagttcatgaagaagctgcagcccaccgtgagaaactacgtggagaacagacccaagtacgccggcctgaccttccccaagctgttccccgacagcctgttccccgccgacagcgagcacaacaagctgaaggccagccaggccagagacctgctgagcaagatgctggtgatcgaccccgccaagagaatcagcgtggacgacgccctgcagcacccctacatcaacgtgtggtacgaccccgccgaggtggaggccccccccccccagatctacgacaagcagctggacgagagagagcacaccatcgaggagtggaaggagctgatctacaaggaggtgatgaacagcgaggagaagaccaagaacggcgtggtgaagggccagcccagccccagcgcccaggtgcagcagtag

SEQ ID NO: 287697 - protein, 33 aa, Artificial Sequence
  derived and/or modified sequence
MSKSKVDNQFYSVEVGDSTFTVLKRYQNLKPIG

SEQ ID NO: 287698 - DNA, 102 bp, Artificial Sequence
  derived and/or modified sequence
atgagcaagagtaaagtggacaatcaattttatagcgtagaggtgggggactcgacattcaccgtactgaagcggtaccagaatcttaaaccaatcgggtag

SEQ ID NO: 287699 - DNA, 156 bp, Artificial Sequence
  derived and/or modified sequence
atgtctctgcacttcctgtactactgtagtgagcctacactggacgtgaaaatcgctttctgccagggattcgacaagcaggtggatgtgtcttatatcgcaaagcattataatatgtcgaagagcaaggttgacaatcagttttactcagtgtag

SEQ ID NO: 287700 - DNA, 276 bp, Artificial Sequence
  derived and/or modified sequence
atgtcacttcactttttatattactgcagcgagccaaccctggatgtgaagatagccttctgccagggcttcgataagcaggtagatgtcagctacatcgccaagcactataacatgtcaaaaagtaaagtagacaaccagttttattcagtggaggtgggggactcaacattcaccgtgctgaagcggtaccaaaatttgaagcccatcgggtcaggtgcacagggcattgtgtgtgcggcctacgatgctgtgctagatagaaacgtggcctag

SEQ ID NO: 287701 - DNA, 225 bp, Artificial Sequence
  derived and/or modified sequence
atgagcaaatcgaaagtggataaccagttctacagcgtggaggtgggagactccacctttacagtgctgaagaggtatcaaaatttgaagccaattggcagtggcgcacagggcattgtgtgtgcagcgtacgatgctgtgctagatagaaacgtggccatcaaaaaattgagccgccctttccagaatcaaacacacgccaagcgtgcatacagggaactttag

SEQ ID NO: 287702 - DNA, 366 bp, Artificial Sequence
  derived and/or modified sequence
atgagcctgcatttcttatactattgttccgagccaacgttggatgtgaaaattgcgttttgtcagggctttgataaacaagtggacgtgtcctacatcgctaagcattacaatatgagcaaatctaaggtggacaatcagttctattctgtggaggtgggcgactcgacatttaccgtgctgaaaagatatcaaaacctgaaacccattggcagcggagcccaaggaatcgtctgcgccgcatacgacgccgtcttggatcgaaacgtagccataaagaaactttcccggccatttcaaaatcagacccacgccaagcgtgcctacagagaactcgtgcttatgaagtgtgtgaaccacaagtag

SEQ ID NO: 287703 - DNA, 354 bp, Artificial Sequence
  derived and/or modified sequence
atgtcgctccacttcctgtactactgttccgaaccaactttggacgtgaaaatcgcattttgccagggcttcgataagcaagtcgacgttagctatatagcgaagcactataatatgagcaagtcgaaagtggacaatcaattctatagcgtggaggtgggagactccaccttcacagtcctcaaaagataccagaacctgaaacccatcgggagcggggcgcagggaatcgtatgtgccgcatacgatgccgttctggaccgcaacgttgctattaagaagctctcacgcccatttcagaatcaaacccatgctaagcgagcctaccgcgaactcgtgctgatgaagtgttag

SEQ ID NO: 287704 - DNA, 426 bp, Artificial Sequence
  derived and/or modified sequence
atgagtctccattttctgtactactgcagcgagcctactctcgatgtcaaaattgccttctgccagggattcgataagcaggtcgacgttagctatatagcaaaacactacaacatgtctaagtccaaggtcgacaatcagttctattcagtcgaagtaggggatagtacttttaccgtgctgaagcggtaccagaatttgaagcctatcggttctggcgctcagggcatcgtgtgtgcagcctatgacgcagtgttggatcgcaatgtcgcgatcaagaagttgagtaggcccttccagaaccagacccacgcaaaacgcgcctaccgtgagttagtcctgatgaaatgtgtgaaccacaagaacatcatcagtttactgaacgtgttcaccccccagaagacacttgaggaattccaggattag

SEQ ID NO: 287705 - DNA, 255 bp, Artificial Sequence
  derived and/or modified sequence
atgagtaagagcaaagttgacaatcagttctattctgtggaggttggagattcaacgttcaccgtgttgaagcgctaccagaaccttaaaccaatcgggtccggagcccaggggatcgtgtgcgcagcctacgacgccgtgctggatcggaacgtggcgatcaaaaagctttcacggccctttcagaatcagactcacgctaaacgggcttatcgtgagctcgtattaatgaaatgcgtgaaccataaaaactag

SEQ ID NO: 287706 - DNA, 159 bp, Artificial Sequence
  derived and/or modified sequence
atgagtaagtcaaaggtggacaaccagttctacagcgtggaggtgggggactccacgttcaccgttctgaaacgctatcagaatctcaaacctatcgggagtggggctcaaggcatcgtgtgcgctgcttatgacgcagtgcttgaccggaatgtatag

SEQ ID NO: 287707 - DNA, 147 bp, Artificial Sequence
  derived and/or modified sequence
atgtccttacacttcctgtattactgttcagagcccacgctggacgtaaagatcgcattctgtcagggattcgacaagcaggttgacgtaagctacattgccaagcactacaacatgagtaagtccaaggtggacaaccagttctag

SEQ ID NO: 287708 - DNA, 102 bp, Artificial Sequence
  derived and/or modified sequence
atgagcaagagcaaggtggacaaccagttctacagcgtggaggtgggggacagcaccttcaccgtgctgaagcgctaccagaacctgaagcccatcggctag

SEQ ID NO: 287709 - DNA, 156 bp, Artificial Sequence
  derived and/or modified sequence
atgagcctgcacttcctgtactactgcagcgagcccaccctggatgtgaagatcgccttctgccagggctttgacaagcaggtggatgtgtcctacatcgccaagcactacaacatgagcaagagcaaggtggacaaccagttctacagcgtgtag

SEQ ID NO: 287710 - DNA, 276 bp, Artificial Sequence
  derived and/or modified sequence
atgagcctgcacttcctgtactactgcagcgagcccaccctggatgtgaagatcgccttctgccagggctttgacaagcaggtggatgtgtcctacatcgccaagcactacaacatgagcaagagcaaggtggacaaccagttctacagcgtggaggtgggggacagcaccttcaccgtgctgaagcgctaccagaacctgaagcccatcggcagcggggcccagggcatcgtgtgtgccgcctatgatgctgtgctggacagaaatgtggcctag

SEQ ID NO: 287711 - DNA, 225 bp, Artificial Sequence
  derived and/or modified sequence
atgagcaagagcaaggtggacaaccagttctacagcgtggaggtgggggacagcaccttcaccgtgctgaagcgctaccagaacctgaagcccatcggcagcggggcccagggcatcgtgtgtgccgcctatgatgctgtgctggacagaaatgtggccatcaagaagctgagccggcccttccagaaccagacccacgccaagagggcctaccgggagctgtag

SEQ ID NO: 287712 - DNA, 366 bp, Artificial Sequence
  derived and/or modified sequence
atgagcctgcacttcctgtactactgcagcgagcccaccctggatgtgaagatcgccttctgccagggctttgacaagcaggtggatgtgtcctacatcgccaagcactacaacatgagcaagagcaaggtggacaaccagttctacagcgtggaggtgggggacagcaccttcaccgtgctgaagcgctaccagaacctgaagcccatcggcagcggggcccagggcatcgtgtgtgccgcctatgatgctgtgctggacagaaatgtggccatcaagaagctgagccggcccttccagaaccagacccacgccaagagggcctaccgggagctggtgctgatgaagtgtgtgaaccacaagtag

SEQ ID NO: 287713 - DNA, 354 bp, Artificial Sequence
  derived and/or modified sequence
atgagcctgcacttcctgtactactgcagcgagcccaccctggatgtgaagatcgccttctgccagggctttgacaagcaggtggatgtgtcctacatcgccaagcactacaacatgagcaagagcaaggtggacaaccagttctacagcgtggaggtgggggacagcaccttcaccgtgctgaagcgctaccagaacctgaagcccatcggcagcggggcccagggcatcgtgtgtgccgcctatgatgctgtgctggacagaaatgtggccatcaagaagctgagccggcccttccagaaccagacccacgccaagagggcctaccgggagctggtgctgatgaagtgctag

SEQ ID NO: 287714 - DNA, 426 bp, Artificial Sequence
  derived and/or modified sequence
atgagcctgcacttcctgtactactgcagcgagcccaccctggatgtgaagatcgccttctgccagggctttgacaagcaggtggatgtgtcctacatcgccaagcactacaacatgagcaagagcaaggtggacaaccagttctacagcgtggaggtgggggacagcaccttcaccgtgctgaagcgctaccagaacctgaagcccatcggcagcggggcccagggcatcgtgtgtgccgcctatgatgctgtgctggacagaaatgtggccatcaagaagctgagccggcccttccagaaccagacccacgccaagagggcctaccgggagctggtgctgatgaagtgtgtgaaccacaagaacatcatcagcctgctgaatgtgttcaccccccagaagaccctggaggagttccaggactag

SEQ ID NO: 287715 - DNA, 255 bp, Artificial Sequence
  derived and/or modified sequence
atgagcaagagcaaggtggacaaccagttctacagcgtggaggtgggggacagcaccttcaccgtgctgaagcgctaccagaacctgaagcccatcggcagcggggcccagggcatcgtgtgtgccgcctatgatgctgtgctggacagaaatgtggccatcaagaagctgagccggcccttccagaaccagacccacgccaagagggcctaccgggagctggtgctgatgaagtgtgtgaaccacaagaactag

SEQ ID NO: 287716 - DNA, 159 bp, Artificial Sequence
  derived and/or modified sequence
atgagcaagagcaaggtggacaaccagttctacagcgtggaggtgggggacagcaccttcaccgtgctgaagcgctaccagaacctgaagcccatcggcagcggggcccagggcatcgtgtgtgccgcctatgatgctgtgctggacagaaatgtgtag

SEQ ID NO: 287717 - DNA, 147 bp, Artificial Sequence
  derived and/or modified sequence
atgagcctgcacttcctgtactactgcagcgagcccaccctggatgtgaagatcgccttctgccagggctttgacaagcaggtggatgtgtcctacatcgccaagcactacaacatgagcaagagcaaggtggacaaccagttctag

SEQ ID NO: 287718 - DNA, 563 bp, Artificial Sequence
  derived and/or modified sequence
agtgccttgggcctggcttttcgcgttcttcggactagccagaggctcaggttggtgaccgagcggcagagttcctagcgcctgcagtgtggtgaactccaacttttaggccaagttgaaaatgcagccgacgacccccacacttctaacttcagaatcaaaactatgaccctagggagtgaggaggagagtgaaaaatgcgctagtgtgagaaacaccaacagcaggcccatctcagatcttcactatggcaacttatgcaagaaactgttgaattagacccgtttcctatagatgagaaaccatacaagctgtggtatttatgagcctccatttcttatactactgcagtgaaccaacattggatgtgaaaattgccttttgtcaggtgtgtgttccttacaggtaaaacaagggattcgataaacaagtggatgtgtcatatattgccaaacattacaacatgagcaaaagcaaagttgacaaccagttctacagtgtggaagtgggagactcaaccttcacagttctcaagcgctaccagaatctaaagcctattggct

SEQ ID NO: 287719 - DNA, 581 bp, Artificial Sequence
  derived and/or modified sequence
agctttcccagtgcctccagcagccctcctcaaggacccctgtgaggccaggcagaaatggcgtggcaggggacccagcgagcccagagggattttgccgctgcttcctctacccctgtatttcacgcagctctctaaattgactcagctccagagacaggatctagttctgtcacccaggctggatggagtgcagtggcattatcatagctcattgcagccagaaactcctgtgcttgagtgatcctcctgcctcagccttcccaatggctgggactacaggttcaaaccactaggacagcatttgccacattattgttccactaatgaaccacctcagtggctatggagatgaaattagaggcgcagggttggtgtgtggagatgggtattgacagtcaattctcccagataatataacaggtatttatgagcctccatttcttatactactgcagtgaaccaacattggatgtgaaaattgccttttgtcagggattcgataaacaagtggatgtgtcatatattgccaaacattacaacatgagcaaaagcaaagttgacaaccagttctacagtgt

SEQ ID NO: 287720 - DNA, 562 bp, Artificial Sequence
  derived and/or modified sequence
gtaagtgcaccaggcattgccagcacaacatccaatatctccttctatccctcatcggctagttgtcggaccctggaagataacacagaatgcttatcaacatatttaaaatagttgcagtaaggaccatttctctcagagaagcttctgtgaattttctactttaggctagtgtgagaaacaccaacagcaggcccatctcagatcttcactatggcaacttatgcaagaaactgttgaattagacccgtttcctatagatgagaaaccatacaagctgtggtatttatgagcctccatttcttatactactgcagtgaaccaacattggatgtgaaaattgccttttgtcagggattcgataaacaagtggatgtgtcatatattgccaaacattacaacatgagcaaaagcaaagttgacaaccagttctacagtgtggaagtgggagactcaaccttcacagttctcaagcgctaccagaatctaaagcctattggctctggggctcagggcatagtttgtgccgcgtatgatgctgtccttgacagaaatgtggcca

SEQ ID NO: 287721 - DNA, 550 bp, Artificial Sequence
  derived and/or modified sequence
atgctggaaggggatgtttatgaacagatcccagaggggctgagtgtgtttttgctgtcattgtctggctagtgtgagaaacaccaacagcaggcccatctcagatcttcactatggcaacttatgcaagaaactgttgaattagacccgtttcctatagatgagaaaccatacaagctgtggtatttatgagcctccatttcttatactactgcagtgaaccaacattggatgtgaaaattgccttttgtcaggtgtgtgttccttacaggtaaaacaagggattcgataaacaagtggatgtgtcatatattgccaaacattacaacatgagcaaaagcaaagttgacaaccagttctacagtgtggaagtgggagactcaaccttcacagttctcaagcgctaccagaatctaaagcctattggctctggggctcagggcatagtttgtgccgcgtatgatgctgtccttgacagaaatgtggccattaagaagctcagcagaccctttcagaaccaaacacatgccaagagagcgtaccgggagct

SEQ ID NO: 287722 - DNA, 743 bp, Artificial Sequence
  derived and/or modified sequence
ttcctctgctgttgcaaagtgtctttaatttgaggggctcctgttcttaaaaaatcctcacagtttcagtaaaacgattctggatagtgaggcagtaagaaattatatgtagagtgggaaaatcagctgcctccagcttcctgcctgctagccccagaacagcatctgctgttgagaggagtgtgtttgccatgctggaaggggatgtttatgaacagatcccagaggggctgagtgtgtttttgctgtcattgtctggctagtgtgagaaacaccaacagcaggcccatctcagatcttcactatggcaacttatgcaagaaactgttgaattagacccgtttcctatagatgagaaaccatacaagctgtggtatttatgagcctccatttcttatactactgcagtgaaccaacattggatgtgaaaattgccttttgtcagggattcgataaacaagtggatgtgtcatatattgccaaacattacaacatgagcaaaagcaaagttgacaaccagttctacagtgtggaagtgggagactcaaccttcacagttctcaagcgctaccagaatctaaagcctattggctctggggctcagggcatagtttgtgccgcgtatgatgctgtccttgacagaaatgtggccattaagaagctcagcagaccctttcagaaccaaacacatgccaagagagcgtaccgggagctggtcctcatgaagtgtgtgaaccataaaa

SEQ ID NO: 287723 - DNA, 569 bp, Artificial Sequence
  derived and/or modified sequence
tttcccagtgcctccagcagccctcctcaaggacccctgtgaggccaggcagaaatggcgtggcaggggacccagcgagcccagagggattttgccgctgcttcctctacccctgtatttcacgcagctctctaaattgactcagctccaggttcaaaccactaggacagcatttgccacattattgttccactaatgaaccacctcagtggtatttatgagcctccatttcttatactactgcagtgaaccaacattggatgtgaaaattgccttttgtcagggattcgataaacaagtggatgtgtcatatattgccaaacattacaacatgagcaaaagcaaagttgacaaccagttctacagtgtggaagtgggagactcaaccttcacagttctcaagcgctaccagaatctaaagcctattggctctggggctcagggcatagtttgtgccgcgtatgatgctgtccttgacagaaatgtggccattaagaagctcagcagaccctttcagaaccaaacacatgccaagagagcgtaccgggagctggtcctcatgaagtgtg

SEQ ID NO: 287724 - DNA, 595 bp, Artificial Sequence
  derived and/or modified sequence
attagattttaggggctggatgctttggatgtagcggtttggctgcctctggctagtgtgagaaacaccaacagcaggcccatctcagatcttcactatggcaacttatgcaagaaactgttgaattagacccgtttcctatagatgagaaaccatacaagctgtggtatttatgagcctccatttcttatactactgcagtgaaccaacattggatgtgaaaattgccttttgtcagggattcgataaacaagtggatgtgtcatatattgccaaacattacaacatgagcaaaagcaaagttgacaaccagttctacagtgtggaagtgggagactcaaccttcacagttctcaagcgctaccagaatctaaagcctattggctctggggctcagggcatagtttgtgccgcgtatgatgctgtccttgacagaaatgtggccattaagaagctcagcagaccctttcagaaccaaacacatgccaagagagcgtaccgggagctggtcctcatgaagtgtgtgaaccataaaaacattattagtttattaaatgtcttcacaccccagaaaacgctggaggagttccaagat

SEQ ID NO: 287725 - DNA, 564 bp, Artificial Sequence
  derived and/or modified sequence
ttagattttaggggctggatgctttggatgtagcggtttggctgcctctggctagtgtgagaaacaccaacagcaggcccatctcagatcttcactatggcaacttatgcaagaaactgttgaattagacccgtttcctatagatgagaaaccatacaagctgtggtatttatgagcctccatttcttatactactgcagtgaaccaacattggatgtgaaaattgccttttgtcaggtgtgtgttccttacaggtaaaacaagggattcgataaacaagtggatgtgtcatatattgccaaacattacaacatgagcaaaagcaaagttgacaaccagttctacagtgtggaagtgggagactcaaccttcacagttctcaagcgctaccagaatctaaagcctattggctctggggctcagggcatagtttgtgccgcgtatgatgctgtccttgacagaaatgtggccattaagaagctcagcagaccctttcagaaccaaacacatgccaagagagcgtaccgggagctggtcctcatgaagtgtgtgaaccataaaaac

SEQ ID NO: 287726 - DNA, 722 bp, Artificial Sequence
  derived and/or modified sequence
ggtgcagagcctgacagtgtctgtacagcagccctgcctgcttctggccatgttgatgataacttttatgaacaaactgcaaggaagcaggctaagtcatatgggatagactacagttcaggtggaaggaaaacgagtgtaagtgcaccaggcattgccagcacaacatccaatatctccttctatccctcatcggctagttgtcggaccctggaagataacacagaatgcttatcaacatatttaaaatagttgcagtaaggaccatttctctcagagaagcttctgtgaattttctactttaggctagtgtgagaaacaccaacagcaggcccatctcagatcttcactatggcaacttatgcaagaaactgttgaattagacccgtttcctatagatgagaaaccatacaagctgtggtatttatgagcctccatttcttatactactgcagtgaaccaacattggatgtgaaaattgccttttgtcaggtgtgtgttccttacaggtaaaacaagggattcgataaacaagtggatgtgtcatatattgccaaacattacaacatgagcaaaagcaaagttgacaaccagttctacagtgtggaagtgggagactcaaccttcacagttctcaagcgctaccagaatctaaagcctattggctctggggctcagggcatagtttgtgccgcgtatgatgctgtccttgacagaaatgt

SEQ ID NO: 287727 - DNA, 489 bp, Artificial Sequence
  derived and/or modified sequence
gccccggttgccatgacaaccagtgccttgggcctggcttttcgcgttcttcggactagccagaggctcaggttggtgaccgagcggcagagttcctagcgcctgcagtgtggtgaactccaacttttaggccaagttgaaaatgcagccgacgacccccacacttctaacttcagaatcaaaactatgaccctagggagtgaggaggagagtgaaaaatgcgctagtgtgagaaacaccaacagcaggcccatctcagatcttcactatggcaacttatgcaagaaactgttgaattagacccgtttcctatagatgagaaaccatacaagctgtggtatttatgagcctccatttcttatactactgcagtgaaccaacattggatgtgaaaattgccttttgtcagggattcgataaacaagtggatgtgtcatatattgccaaacattacaacatgagcaaaagcaaagttgacaaccagttcta

SEQ ID NO: 287728 - DNA, 102 bp, Artificial Sequence
  derived and/or modified sequence
atgagcaagagcaaggtggacaaccagttctacagcgtggaggtgggcgattccacttttacggtcctgaaacggtaccagaatctcaagcctataggatag

SEQ ID NO: 287729 - DNA, 156 bp, Artificial Sequence
  derived and/or modified sequence
atgagcctgcacttcctgtactactgcagcgagcccaccctggacgtcaaaattgctttctgccaaggctttgacaaacaggttgatgtgtcttatatcgcaaagcactacaacatgagcaagtcaaaggtggataatcagttctattctgtatag

SEQ ID NO: 287730 - DNA, 276 bp, Artificial Sequence
  derived and/or modified sequence
atgagcctgcacttcctgtactactgcagcgagcccaccctggacgtaaagatcgccttctgccaagggttcgataaacaggtggatgtcagctatattgcaaaacattataatatgagcaaaagtaaggtggacaaccaattctactcagtggaagtgggggactcaactttcactgtcctgaaaagataccaaaatctgaagcccataggatcaggcgctcagggcatagtctgcgctgcatacgacgcagtgctggataggaatgtggcctag

SEQ ID NO: 287731 - DNA, 225 bp, Artificial Sequence
  derived and/or modified sequence
atgagcaagagcaaggtggacaaccagttctacagcgtggaggtgggcgactctactttcaccgtcctaaagaggtatcagaatctgaaaccgattggcagtggcgctcagggcattgtttgtgccgcgtacgatgccgtcctggacaggaatgtagccattaagaagttgtcccggcccttccagaatcagactcacgccaagcgtgcgtaccgagagctttag

SEQ ID NO: 287732 - DNA, 366 bp, Artificial Sequence
  derived and/or modified sequence
atgagcctgcacttcctgtactactgcagcgagcccaccctggacgtgaagattgccttttgtcagggcttcgacaaacaggttgacgtgtcgtatatcgcaaagcattacaatatgagtaaatccaaagtcgacaaccaattctattccgtcgaagtgggagatagcaccttcacggtactaaaaaggtaccagaatctgaaaccaattggcagcggcgcacagggcattgtgtgcgcagcatatgacgccgtactggaccgcaatgtggccattaagaaactgtccagacccttccaaaaccagactcatgccaaacgcgcttaccgtgaactagtgctaatgaaatgcgtgaatcataagtag

SEQ ID NO: 287733 - DNA, 354 bp, Artificial Sequence
  derived and/or modified sequence
atgagcctgcacttcctgtactactgcagcgagcccaccctggacgtcaaaatcgccttctgtcagggatttgacaaacaggttgacgtgtcttatatcgcaaaacactacaatatgagcaaatctaaggtggataaccagttttattctgtagaagtgggcgactccacatttactgtactcaagcggtatcagaacctgaagcccatcggctcaggagcgcagggcattgtttgtgctgcttatgatgccgtcctcgatcggaacgtcgctatcaagaaattgagcaggccattccaaaaccagactcacgcaaaacgagcatatagggagctggtcttgatgaagtgttag

SEQ ID NO: 287734 - DNA, 426 bp, Artificial Sequence
  derived and/or modified sequence
atgagcctgcacttcctgtactactgcagcgagcccaccctggacgtgaagatcgcattttgccagggatttgacaagcaggtggacgtttcctatattgccaaacactacaacatgagtaaatctaaggtggataatcagttttacagcgtcgaggttggggactctacgtttactgtactgaagaggtatcagaacctgaagcctattgggtctggcgctcaagggatcgtgtgtgctgcatatgatgcagtactcgaccgtaatgtggccattaagaagctgtcccgaccctttcaaaaccagacacatgctaagagggcttacagggaacttgtgctcatgaagtgcgtgaaccacaagaacatcattagcctccttaatgtatttacgcctcagaaaaccctagaagaattccaggactag

SEQ ID NO: 287735 - DNA, 255 bp, Artificial Sequence
  derived and/or modified sequence
atgagcaagagcaaggtggacaaccagttctacagcgtggaggtgggtgattcaaccttcaccgtgttaaagcggtaccaaaatctgaagcccataggatccggcgctcagggaattgtctgcgccgcctatgacgctgttctggaccggaacgtggctatcaaaaagctgagcaggccatttcagaaccaaacccatgccaagagagcctacagagagctagtgctcatgaaatgtgtgaaccacaagaactag

SEQ ID NO: 287736 - DNA, 159 bp, Artificial Sequence
  derived and/or modified sequence
atgagcaagagcaaggtggacaaccagttctacagcgtggaggtgggagacagcaccttcaccgtcctcaagagatatcagaatttaaagcccatcggttccggcgcacagggtattgtctgtgcagcatatgatgcggtcttggatcggaacgtgtag

SEQ ID NO: 287737 - DNA, 147 bp, Artificial Sequence
  derived and/or modified sequence
atgagcctgcacttcctgtactactgcagcgagcccaccctggacgtgaaaatcgccttctgccagggctttgataaacaggtcgacgtaagttacatagctaaacactataatatgtctaaaagtaaagtcgataatcagttttag

SEQ ID NO: 287738 - DNA, 102 bp, Artificial Sequence
  derived and/or modified sequence
atgtctaagtctaaggtggataatcagttttatagtgtggaggtcggcgatagcaccttcaccgtgctgaagcggtaccaaaatctaaagccaattggctag

SEQ ID NO: 287739 - DNA, 156 bp, Artificial Sequence
  derived and/or modified sequence
atgagtctccattttctgtattattgctcagaaccgacactggatgtgaaaatcgctttctgccagggcttcgataagcaggtggacgtcagttatatcgcaaagcattacaatatgtcaaaaagcaaggtggacaaccagttctacagtgtgtag

SEQ ID NO: 287740 - DNA, 276 bp, Artificial Sequence
  derived and/or modified sequence
atgtcactgcacttcctgtattattgtagtgagccgactcttgacgtcaagattgccttctgtcaggggtttgacaagcaggtggacgtgtcctatatcgcaaagcactacaacatgtccaagagcaaagtggataatcaattctatagtgtggaggtcggagactctaccttcaccgttttaaaaagataccagaaccttaagcccatcgggtcaggtgctcaggggattgtgtgcgccgcatatgatgccgtgctggacagaaatgtggcttag

SEQ ID NO: 287741 - DNA, 225 bp, Artificial Sequence
  derived and/or modified sequence
atgagtaaatctaaggtggacaatcaattctactccgtggaagtgggcgattctactttcaccgttctcaaacgataccagaatctgaaacccatcgggtccggcgcacaggggattgtttgcgctgcctatgacgccgtgctggaccggaatgtggccatcaaaaagctgagccgtccttttcaaaaccagacgcacgccaagcgagcttatagggagctgtag

SEQ ID NO: 287742 - DNA, 366 bp, Artificial Sequence
  derived and/or modified sequence
atgagtctacacttcctgtattactgtagcgagcccacattagatgttaaaatcgcgttctgtcagggattcgataaacaggtggacgtatcatacattgcaaagcactataacatgtctaagagtaaagtggataaccagttttactccgtcgaagtgggagattccaccttcacagtgctgaaacgttatcaaaatctgaagcccatcggaagcggggcacagggaatcgtttgcgccgcttatgacgccgtgttggatcgaaatgtggcaataaaaaaacttagccggcctttccagaaccagacccacgctaagagggcctacagggagttagtgctgatgaagtgcgtgaatcataaatag

SEQ ID NO: 287743 - DNA, 354 bp, Artificial Sequence
  derived and/or modified sequence
atgtcccttcattttctttactactgcagcgaacccacactcgacgttaagatagcgttctgccagggatttgacaaacaggtcgacgtctcttatatagccaagcattataacatgtctaaaagcaaagtggataatcaattttactcggttgaagtaggcgattcaacttttaccgtcttgaagcggtatcagaacctgaaaccaatcgggtcaggtgcccagggcatcgtctgcgctgcttatgacgcagttctcgatcgaaacgtcgcgatcaaaaagctctcaagaccttttcagaatcagactcacgccaaacgcgcttatagagagcttgtactgatgaaatgctag

SEQ ID NO: 287744 - DNA, 426 bp, Artificial Sequence
  derived and/or modified sequence
atgtcattacactttctgtattactgttccgagcccacactagacgtgaaaattgccttctgccaaggattcgataaacaggtggatgtttcctacattgccaagcactataatatgagtaagagtaaggtcgataatcagttctatagcgtcgaggtgggagatagcacatttactgtcctaaaacgatatcagaaccttaagcccattgggagcggagcccagggcattgtgtgtgccgcttacgacgccgttcttgacagaaacgtggccatcaagaaactttcgcggccatttcaaaaccaaacacatgcaaagcgggcttacagagaactggtgctgatgaagtgcgtgaatcataagaatatcatttctctactcaatgtgttcaccccacaaaaaacactggaggaatttcaagactag

SEQ ID NO: 287745 - DNA, 255 bp, Artificial Sequence
  derived and/or modified sequence
atgagcaaatccaaggtagacaatcagttttatagcgttgaggtgggtgattctacattcacggtactgaaacgttatcaaaatctgaagcccatcggatcaggcgctcaaggcatcgtttgtgctgcatacgacgcagtcctagacaggaacgtggcgattaaaaagctgagtcggccatttcagaaccagacccatgcgaaacgtgcctacagggaactcgtgctgatgaaatgcgttaatcataaaaactag

SEQ ID NO: 287746 - DNA, 159 bp, Artificial Sequence
  derived and/or modified sequence
atgagcaagagtaaggtggacaaccagttttatagcgttgaagtgggcgactcaacgttcacggtgctcaaacggtaccagaatctaaagcccatcggcagtggcgctcagggcatagtctgtgctgcctatgatgccgtcctcgatcggaatgtgtag

SEQ ID NO: 287747 - DNA, 147 bp, Artificial Sequence
  derived and/or modified sequence
atgagcttacacttcctctactattgctctgagccgacactggatgttaaaatagcgttttgtcaggggttcgataaacaagtggacgtttcctacatcgctaaacattataacatgtccaagtcaaaagtcgacaaccagttctag

SEQ ID NO: 287748 - DNA, 102 bp, Artificial Sequence
  derived and/or modified sequence
atgagcaagagcaaggtggacaaccagttctacagcgtggaggtgggcgacagcaccttcaccgtgctgaagagataccagaacctgaagcccatcggctag

SEQ ID NO: 287749 - DNA, 156 bp, Artificial Sequence
  derived and/or modified sequence
atgagcctgcacttcctgtactactgcagcgagcccaccctggacgtgaagatcgccttctgccagggcttcgacaagcaggtggacgtgagctacatcgccaagcactacaacatgagcaagagcaaggtggacaaccagttctacagcgtgtag

SEQ ID NO: 287750 - DNA, 276 bp, Artificial Sequence
  derived and/or modified sequence
atgagcctgcacttcctgtactactgcagcgagcccaccctggacgtgaagatcgccttctgccagggcttcgacaagcaggtggacgtgagctacatcgccaagcactacaacatgagcaagagcaaggtggacaaccagttctacagcgtggaggtgggcgacagcaccttcaccgtgctgaagagataccagaacctgaagcccatcggcagcggcgcccagggcatcgtgtgcgccgcctacgacgccgtgctggacagaaacgtggcctag

SEQ ID NO: 287751 - DNA, 225 bp, Artificial Sequence
  derived and/or modified sequence
atgagcaagagcaaggtggacaaccagttctacagcgtggaggtgggcgacagcaccttcaccgtgctgaagagataccagaacctgaagcccatcggcagcggcgcccagggcatcgtgtgcgccgcctacgacgccgtgctggacagaaacgtggccatcaagaagctgagcagacccttccagaaccagacccacgccaagagagcctacagagagctgtag

SEQ ID NO: 287752 - DNA, 366 bp, Artificial Sequence
  derived and/or modified sequence
atgagcctgcacttcctgtactactgcagcgagcccaccctggacgtgaagatcgccttctgccagggcttcgacaagcaggtggacgtgagctacatcgccaagcactacaacatgagcaagagcaaggtggacaaccagttctacagcgtggaggtgggcgacagcaccttcaccgtgctgaagagataccagaacctgaagcccatcggcagcggcgcccagggcatcgtgtgcgccgcctacgacgccgtgctggacagaaacgtggccatcaagaagctgagcagacccttccagaaccagacccacgccaagagagcctacagagagctggtgctgatgaagtgcgtgaaccacaagtag

SEQ ID NO: 287753 - DNA, 354 bp, Artificial Sequence
  derived and/or modified sequence
atgagcctgcacttcctgtactactgcagcgagcccaccctggacgtgaagatcgccttctgccagggcttcgacaagcaggtggacgtgagctacatcgccaagcactacaacatgagcaagagcaaggtggacaaccagttctacagcgtggaggtgggcgacagcaccttcaccgtgctgaagagataccagaacctgaagcccatcggcagcggcgcccagggcatcgtgtgcgccgcctacgacgccgtgctggacagaaacgtggccatcaagaagctgagcagacccttccagaaccagacccacgccaagagagcctacagagagctggtgctgatgaagtgctag

SEQ ID NO: 287754 - DNA, 426 bp, Artificial Sequence
  derived and/or modified sequence
atgagcctgcacttcctgtactactgcagcgagcccaccctggacgtgaagatcgccttctgccagggcttcgacaagcaggtggacgtgagctacatcgccaagcactacaacatgagcaagagcaaggtggacaaccagttctacagcgtggaggtgggcgacagcaccttcaccgtgctgaagagataccagaacctgaagcccatcggcagcggcgcccagggcatcgtgtgcgccgcctacgacgccgtgctggacagaaacgtggccatcaagaagctgagcagacccttccagaaccagacccacgccaagagagcctacagagagctggtgctgatgaagtgcgtgaaccacaagaacatcatcagcctgctgaacgtgttcaccccccagaagaccctggaggagttccaggactag

SEQ ID NO: 287755 - DNA, 255 bp, Artificial Sequence
  derived and/or modified sequence
atgagcaagagcaaggtggacaaccagttctacagcgtggaggtgggcgacagcaccttcaccgtgctgaagagataccagaacctgaagcccatcggcagcggcgcccagggcatcgtgtgcgccgcctacgacgccgtgctggacagaaacgtggccatcaagaagctgagcagacccttccagaaccagacccacgccaagagagcctacagagagctggtgctgatgaagtgcgtgaaccacaagaactag

SEQ ID NO: 287756 - DNA, 159 bp, Artificial Sequence
  derived and/or modified sequence
atgagcaagagcaaggtggacaaccagttctacagcgtggaggtgggcgacagcaccttcaccgtgctgaagagataccagaacctgaagcccatcggcagcggcgcccagggcatcgtgtgcgccgcctacgacgccgtgctggacagaaacgtgtag

SEQ ID NO: 287757 - DNA, 147 bp, Artificial Sequence
  derived and/or modified sequence
atgagcctgcacttcctgtactactgcagcgagcccaccctggacgtgaagatcgccttctgccagggcttcgacaagcaggtggacgtgagctacatcgccaagcactacaacatgagcaagagcaaggtggacaaccagttctag

SEQ ID NO: 287758 - protein, 117 aa, Artificial Sequence [sequence omitted]

SEQ ID NO: 287759 - DNA, 354 bp, Artificial Sequence
  derived and/or modified sequence
atggtgcagagactgacctacagaagaagactgagctacaacaccgccagcaacaagaccagactgagcagaacccccggcaacagaatcgtgtacctgtacaccaagaaggtgggcaaggcccccaagagcgcctgcggcgtgtgccccggcagactgagaggcgtgagagccgtgagacccaaggtgctgatgagactgagcaagaccaagaagcacgtgagcagagcctacggcggcagcatgtgcgccaagtgcgtgagagacagaatcaagagagccttcctgatcgaggagcagaagatcgtggtgaaggtgctgaaggcccaggcccagagccagaaggccaagtag

SEQ ID NO: 287760 - DNA, 354 bp, Artificial Sequence
  derived and/or modified sequence
atggtgcagcgcctcacataccgtcggcgcctgagctacaatacagcttctaataaaacgcgattgtctcgcacaccgggcaatcggatcgtttacttatacacgaaaaaagtgggcaaggcacccaaaagcgcctgcggtgtatgccccggacgacttaggggggtgagagccgtccgccccaaggtattgatgcgcctctccaagaccaagaagcacgtgtctagagcctatggaggaagtatgtgcgcaaaatgcgttcgcgaccgcattaagcgagccttcttaattgaggaacagaagatagtcgtaaaggtcctgaaggcacaggcgcagtcccaaaaggccaaatag

SEQ ID NO: 287761 - DNA, 354 bp, Artificial Sequence
  derived and/or modified sequence
atggtacagcggctaacatatagaagaaggctgtcttacaatacagcctcaaataaaactcgcctgtccagaaccccaggcaatcgcattgtgtatttatacaccaagaaagtggggaaggcccctaagtcagcttgtggcgtgtgccctggtaggctgcggggcgtccgcgcagttaggccgaaggtacttatgcgactaagtaagactaagaagcacgttagtagggcttatggtggcagcatgtgcgctaaatgtgtgagagatcgcattaaaagagcctttctgatcgaggagcaaaagatcgtcgtgaaggtgctgaaggctcaggcacaaagccagaaggccaagtag

SEQ ID NO: 287762 - DNA, 354 bp, Artificial Sequence
  derived and/or modified sequence
atggtgcaaagactcacctatagaagacggcttagctataataccgctagcaacaaaaccagactctctcgaacgccaggcaatcggatcgtttacctatatacgaagaaggtcgggaaagcgcctaaatccgcttgtggcgtatgccctggcagactgaggggggtgcgtgcagtcagacccaaggtgttgatgcgattgagcaagaccaagaaacacgtttcaagggcatatggtggaagtatgtgtgccaagtgtgtgcgtgataggattaagcgcgctttcctgatcgaagagcagaagatcgtggttaaggtcctaaaggctcaagctcagtcccagaaagctaagtag

SEQ ID NO: 287763 - DNA, 354 bp, Artificial Sequence
  derived and/or modified sequence
atggtgcaacgcctcacctacagaagacggctctcttacaacactgcgtctaataaaacccgactttccagaacgccaggaaacaggatcgtatatttgtacactaagaaagtgggcaaagctccaaagtctgcctgtggcgtgtgccccggtagacttaggggcgtgcgagccgttcgtcctaaggtgctgatgcgcctctcaaagaccaagaagcacgtatcccgcgcctacgggggctcaatgtgcgccaagtgcgtgcgggatcgcatcaagagggcgtttctgattgaggaacagaaaatcgtcgtgaaggtacttaaggcccaggcccagagtcaaaaagccaaatag

SEQ ID NO: 287764 - DNA, 354 bp, Artificial Sequence
  derived and/or modified sequence
atggtgcaaagacttacatataggaggagattgagctacaacactgcaagcaacaagacccggttatctaggactcctggcaatcggatcgtctacctctatacgaagaaagtgggcaaggcacctaagtcagcctgtggagtttgtccaggccgcctgaggggggtgcgcgcagtccgtcctaaagtgctgatgaggttatcaaaaaccaaaaaacatgtatctagggcgtatggcggctcgatgtgcgccaagtgtgtcagggacagaatcaagcgggcttttctgattgaggaacagaaaatagtggttaaggtattaaaagcccaggcccagtcacagaaagctaagtag

SEQ ID NO: 287765 - DNA, 354 bp, Artificial Sequence
  derived and/or modified sequence
atggtgcagaggctgacctacagaagaaggctgagctacaacacagccagcaacaagacccggctgagcaggaccccaggcaaccgcatcgtgtacctgtacaccaagaaggtgggcaaggcccccaagagcgcctgtggggtgtgccccggccgcctgcggggcgtgcgggctgtgcggcccaaggtgctgatgaggctgagcaagaccaagaagcacgtgtcccgggcctacggcggctccatgtgtgccaagtgtgtgcgggaccgcatcaagagggccttcctgattgaggagcagaagatcgtggtgaaggtgctgaaggcccaggcccagagccagaaggccaagtag

SEQ ID NO: 287766 - DNA, 529 bp, Artificial Sequence
  derived and/or modified sequence
gttgtctgcaggtatggatgttgttctcttttccctgtctttatttccttaccaatcggctgccatccgaggagctgaggaagcctagagctctcagaagcagtcctttgagctggtgtaggggcactcagaatggtccagcgtttgacataccgacgtaggctttcctacaatacagcctctaacaaaactaggctgtcccgaacccctggtaatagaattgtttacctttataccaagaaggttgggaaagcaccaaaatctgcatgtggtgtgtgcccaggcagacttcgaggggttcgtgctgtaagacctaaagttcttatgagattgtccaaaacaaagaaacatgtcagcagggcctatggtggttccatgtgtgctaaatgtgttcgtgacaggatcaagcgtgctttccttatcgaggagcagaaaatcgttgtgaaagtgttgaaggcacaagcacagagtcagaaagctaaataaaaaaatgaaacttttttgagtaataaaaatgaaaagacgctgt

SEQ ID NO: 287767 - DNA, 441 bp, Artificial Sequence
  derived and/or modified sequence
cttttttcttcctcttccggggacgttgtctgcaggcactcagaatggtccagcgtttgacataccgacgtaggctttcctacaatacagcctctaacaaaactaggctgtcccgaacccctggtaatagaattgtttacctttataccaagaaggttgggaaagcaccaaaatctgcatgtggtgtgtgcccaggcagacttcgaggggttcgtgctgtaagacctaaagttcttatgagattgtccaaaacaaagaaacatgtcagcagggcctatggtggttccatgtgtgctaaatgtgttcgtgacaggatcaagcgtgctttccttatcgaggagcagaaaatcgttgtgaaagtgttgaaggcacaagcacagagtcagaaagctaaataaaaaaatgaaacttttttgagtaataaaaatgaaaagacgctgt

SEQ ID NO: 287768 - DNA, 853 bp, Artificial Sequence
  derived and/or modified sequence
ccgaggagctgaggaagcctagagctctcagaagcagtcctttgagctggtgtaggggcactcagaatggtccagcgtttgacataccgacgtaggctttcctacaatacagcctctaacaaaactaggctgtcccgaacccctggtaatagaattgtttacctttataccaagaaggttgggaaagcaccaaaatctgcatgtggtgtgtgcccaggcagacttcgaggggttcgtgctgtaagacctaaagttcttatgagattgtccaaaacaaagaaacatgtcagcagggcctatggtggttccatgtgtgctaaatgtgttcgtgacaggatcaagcgtgctttccttatcgaggagcagaaaatcgttgtgaaagtgttgaaggcacaagcacagagtcagaaagctaaataaaaaaatgaaacttttttgagtaataaaaatgaaaagacgctgtccaatagaaaaagttggtgtgctggagctacctcacctcagcttgagagagccagttgtgtgcatctctttccagttttgcatccagtgacgtctgcttggcatcttgagattgttatggtgagagtatttacacctcagcaaatgctgcaaaatcctgttttcccccagagagctggaggttaaatactaccagcacatccctagatactactcaagttacagtatatgatcactaatatagtatgctcttggtaccaggagctctgatatatatctggtacatgtttgataatgacttgattgttattataagtacttattaatacttcgattctgtaaagagtttagggtttgattttataaaatccaaaatgagccttttattgaa

SEQ ID NO: 287769 - DNA, 354 bp, Artificial Sequence
  derived and/or modified sequence
atggtgcagcggctgacctaccggcggcggctgagctacaacaccgcaagcaataagacacgtctgtcccggacccccggcaaccgcattgtctacttgtacactaagaaagtgggaaaagcgccaaaaagcgcgtgtggggtgtgccctgggcgtctgcggggggtgagagccgtcaggccaaaggtattgatgcggctgagcaaaaccaaaaagcatgtttcacgcgcatacggcggttccatgtgcgcgaaatgtgttcgggacaggatcaagcgcgcatttcttattgaagaacaaaaaatagtggttaaggtgctaaaagcgcaggcccagtcacagaaggccaagtag

SEQ ID NO: 287770 - DNA, 354 bp, Artificial Sequence
  derived and/or modified sequence
atggtgcagcggctgacctaccggcggcggctgagctacaacaccgcatccaacaaaaccaggctgtctcgcaccccaggaaatagaatagtgtacttgtatacaaaaaaggtggggaaggcgcccaagagcgcttgtggcgtctgcccaggccggttacgtggggttcgcgctgtgcggcctaaagtgttgatgaggttatccaagacgaagaaacatgtctctcgcgcctatgggggttcaatgtgtgccaagtgtgtgagagatcggataaaacgagcgttcctgatcgaagagcagaagatcgtggtcaaggtgctgaaggcacaagcccagagtcagaaagctaagtag

SEQ ID NO: 287771 - DNA, 354 bp, Artificial Sequence
  derived and/or modified sequence
atggtgcagcggctgacctaccggcggcggctgagctacaacaccgcaagcaataaaacaaggctgtctcggaccccaggcaacaggatcgtgtatctatacaccaagaaagtggggaaggcccccaaatccgcttgcggagtgtgcccaggacgtctgcgcggagtgcgcgcagtcagacccaaggtcctaatgcgactgtcaaagacaaagaagcatgtaagccgagcttatggcggtagcatgtgtgcaaaatgtgtccgggatcgcatcaagagggcattcttgattgaagaacagaagatcgtggtgaaggtgcttaaagctcaggcccagtcacagaaggctaagtag

SEQ ID NO: 287772 - DNA, 354 bp, Artificial Sequence
  derived and/or modified sequence
atggtgcagcggctgacctaccggcggcggctgagctacaacaccgcttcaaacaagacgagactgtcccggacccccggcaacaggatcgtgtacctgtacacaaaaaaggtcggaaaagcccctaagtcggcctgtggagtgtgccctgggagattgaggggggtgagagccgttcggcctaaagtgctgatgaggttgtctaaaaccaagaagcatgtgtcaagagcctacggcggctccatgtgcgcaaaatgcgtcagagacaggattaagcgggccttcctcatcgaggagcaaaaaatcgttgtgaaggttcttaaggcccaagcccagtcccagaaagcgaagtag

SEQ ID NO: 287773 - DNA, 354 bp, Artificial Sequence
  derived and/or modified sequence
atggtgcagcggctgacctaccggcggcggctgagctacaacaccgccagcaacaaaactcggctatctcgcactcccggaaacagaatcgtttacttgtacacgaagaaagtggggaaggctccaaagtctgcgtgtggggtgtgtcctggccggcttaggggggtgcgggccgttcgcccaaaggtactgatgcggctctctaagactaaaaagcatgttagcagggcgtacggcggaagtatgtgcgctaagtgtgttcgggatcgcatcaagagggcatttctgattgaagaacagaaaatcgtggtgaaggtgctgaaggctcaagcccagtctcagaaagccaagtag

SEQ ID NO: 287774 - DNA, 354 bp, Artificial Sequence
  derived and/or modified sequence
atggtgcaacgcttgacgtaccgacgcaggctgagttacaatactgcctccaacaagacgcgactgagcaggacgcccggaaaccgtatcgtctacctgtacaccaaaaaagtggggaaggcccctaagtccgcatgcggagtatgcccaggacggctgcgaggtgtgagggcagtgagacccaaagtccttatgcgattatcaaaaaccaagaagcatgtgtcacgcgcatatgggggatccatgtgcgccaagtgtgtccgtgaccgcataaaacgggcattccttatcgaagagcagaagatcgttgtgaaggtgctgaaggctcaggcacagtcccagaaggctaagtag

SEQ ID NO: 287775 - DNA, 354 bp, Artificial Sequence
  derived and/or modified sequence
atggtacagcgcctgacctatcggcgtagactgtcttataataccgcttccaataagacaaggttgagccgcacccccggaaaccggatagtttacctgtataccaagaaggttgggaaggcgcctaaatcagcatgcggtgtgtgccccggacgcttaaggggggtgagagccgtcaggccaaaggtgcttatgcggctgagcaagactaagaagcatgtgtctagagcctatggaggatctatgtgcgcaaaatgtgtgcgtgaccgcattaagagggcctttctgatcgaggaacagaagatagtcgtgaaagtgctaaaagcacaagctcagagccagaaggctaaatag

SEQ ID NO: 287776 - DNA, 354 bp, Artificial Sequence
  derived and/or modified sequence
atggtgcaacgtcttacttatcgccgacggcttagttacaataccgcgtcaaataaaacccgtctctcccgcacccccggtaacaggatagtgtatctgtacacaaagaaggttggtaaagcccctaagagcgcctgtggtgtttgtccgggtaggctacggggagtccgcgctgtgaggcccaaggtgctgatgcgcctttccaagaccaaaaagcacgtttccagagcttatggaggatcaatgtgcgccaagtgcgtgcgcgacagaatcaaacgagctttcctgatcgaggaacagaagatcgtggtgaaagtgctaaaggctcaggcgcagtcccagaaagccaaatag

SEQ ID NO: 287777 - DNA, 354 bp, Artificial Sequence
  derived and/or modified sequence
atggtccaacgtctcacttaccgccgtcggctgtcttataacactgcgtccaacaaaactcggcttagcagaacacccggaaatcggattgtgtatctgtacacgaagaaagtgggcaaggcgcctaagtcagcgtgtggagtatgtcctggaagactgagaggagtgcgggcagtgaggcctaaggtgctgatgaggctcagcaaaacgaaaaagcatgtttctcgagcctatggcggaagcatgtgtgccaagtgtgtccgggacaggattaaaagggctttcctcatcgaggaacagaaaattgtagtgaaggtgctgaaggcccaggcccagtctcagaaggccaagtag

SEQ ID NO: 287778 - DNA, 354 bp, Artificial Sequence
  derived and/or modified sequence
atggtgcaacgcctcacttacagaaggcgcttatcatataataccgcatccaataaaacaaggctctcacgcactccagggaacaggattgtctacctttacaccaaaaaagttggcaaggcccctaaaagcgcatgcggagtatgcccaggcaggctcagaggcgttcgtgccgtcagacctaaggtgctgatgaggctttctaaaaccaaaaaacatgtctcgcgagcttacggaggctcaatgtgcgctaagtgtgtacgagaccgtatcaagcgagccttcctgatcgaggagcaaaaaatcgtggtgaaggtcctgaaagcgcaagctcagagccaaaaggctaagtag

SEQ ID NO: 287779 - DNA, 560 bp, Artificial Sequence
  derived and/or modified sequence
ttttcttcctcttccggggacgttgtctgcaggcactcagaatggtccagcgtttgacataccgacgtaggctttcctacaatacagcctctaacaaaactaggctgtcccgaacccctggtaatagaattgtttacctttataccaagaaggttgggaaagcaccaaaatctgcatgtggtgtgtgcccaggcagacttcgaggggttcgtgctgtaagacctaaagttcttatgagattgtccaaaacaaagaaacatgtcagcagggcctatggtggttccatgtgtgctaaatgtgttcgtgacaggatcaagcgtgctttccttatcgaggagcagaaaatcgttgtgaaagtgttgaaggcacaagcacagagtcagaaagctaaataaaaaaatgaaacttttttgagtaataaaaatgaaaagacgctgctggagtacaatggcaggatctcggctcaccgcaccctctgccttccaggttcaagtgattctcctgcctcagcctcccaagtagctgggattataggcatgtgccaccatgcctggctaatt

SEQ ID NO: 287780 - DNA, 549 bp, Artificial Sequence
  derived and/or modified sequence
tttccttaccaatcggctgccatccgaggagctgaggaagcctagagctctcagaagcagtcctttgagctggtgtagggcggtgtttctccaactgggctcgtggcacttttctggacaccactccaaacaaaattagactctgagcactcagaatggtccagcgtttgacataccgacgtaggctttcctacaatacagcctctaacaaaactaggctgtcccgaacccctggtaatagaattgtttacctttataccaagaaggttgggaaagcaccaaaatctgcatgtggtgtgtgcccaggcagacttcgaggggttcgtgctgtaagacctaaagttcttatgagattgtccaaaacaaagaaacatgtcagcagggcctatggtggttccatgtgtgctaaatgtgttcgtgacaggatcaagcgtgctttccttatcgaggagcagaaaatcgttgtgaaagtgttgaaggcacaagcacagagtcagaaagctaaataaaaaaatgaaacttttttgagtaataaaaatgaaaagacgc

SEQ ID NO: 287781 - DNA, 963 bp, Artificial Sequence
  derived and/or modified sequence
atgttgaaaatgctatcattcaagttactgttactggcggttgcactgggtttcttcgagggagatgcgaagtttggtgaacggaatgagggttctggcgctcggcgaaggaggtgcctaaatggcaacccacctaaacggttgaaacggagagaccgccgcatgatgtcccagttggagctgctcagcgggggagagatgctttgcgggggcttttacccccggctgtcttgttgtttgcgaagtgactcaccagggctcggccggttagagaacaagatcttctccgtgaccaacaatactgaatgcgggaaactgttagaagagataaagtgcgctctttgttcaccacacagccagtctctcttccattctccggagcgggaggtgctggaaagagacctagttctgcccctgctatgcaaggattattgcaaggagtttttctatacttgccgggggcatatccccggctttctgcagacaaccgccgatgagttttgcttctattatgcccgcaaggatggtgggctttgtttcccagacttccctcgaaaacaggtgagaggacccgcctccaactacctggatcaaatggaggaatacgataaggttgaggaaattagccggaagcacaagcataattgtttctgtatccaggaagtcgtttcagggctgaggcagccagtaggggcactgcatagtggggatggctcacagcgccttttcatcctggaaaaggagggctatgtcaagatactgacaccagagggagagatcttcaaggaaccgtacttggatatacataaattagttcagtctgggattaaagtaggcttcttaaactttatttacttttgcgccgggtacgtgaacttcatactggtgctaccatctagccttaaagtgttcttgtgtaacaaacgcaaaaacctcgccggggaaaataagggggccacctag

SEQ ID NO: 287782 - DNA, 1770 bp, Artificial Sequence
  derived and/or modified sequence
gaagctgcagccgccggcagaggagacctcagcatcatctagagcccagcgctggccctgcctccgcctgccccgccgccgccgtcgccgtttctgttcctgctactgtcccacctaaacaactcccgttacacggacaagtgaacatctgtggctgtcctctccttttcttcctcctcttccaactccttctcctcctcccacttcccagccgcagcagaaagcccccaacccaactgacactggcacaactgcaaacggtgtcatccgcacaactttatctcgctcctcgggctcccctaaggcattggacccatcgccgcgtcttttattttttgcaaagttgcatcgctgtacatatttttgtccccgccacctccctctgtctctggagtgccctacagccccgcaaactcctcctggagctgcgccctagtgcccctgctgggcagtggcgttcccccccatcctcccgcgcccagcccctgctgctctgggcagacgatgctgaagatgctctcctttaagctgctgctgctggccgtggctctgggcttctttgaaggagatgctaagtttggggaaagaaacgaagggagcggagcaaggaggagaaggtgcctgaatgggaaccccccgaagcgcctgaaaaggagagacaggaggatgatgtcccagctggagctgctgagtgggggagagatgctgtgcggtggcttctaccctcggctgtcctgctgcctgcggagtgacagcccggggctagggcgcctggagaataagatattttctgttaccaacaacacagaatgtgggaagttactggaggaaatcaaatgtgcactttgctctccacattctcaaagcctgttccactcacctgagagagaagtcttggaaagagacctagtacttcctctgctctgcaaagactattgcaaagaattcttttacacttgccgaggccatattccaggtttccttcaaacaactgcggatgagttttgcttttactatgcaagaaaagatggtgggttgtgctttccagattttccaagaaaacaagtcagaggaccagcatctaactacttggaccagatggaagaatatgacaaagtggaagagatcagcagaaagcacaaacacaactgcttctgtattcaggaggttgtgagtgggctgcggcagcccgttggtgccctgcatagtggggatggctcgcaacgtctcttcattctggaaaaagaaggttatgtgaagatacttacccctgaaggagaaattttcaaggagccttatttggacattcacaaacttgttcaaagtggaataaaggttggctttttaaattttatttatttttgtgctggctacgttaattttattttagtgttaccttcctcactgaaggtatttctttgtaataaaagaaagaatcttgcaggagaaaataagggggcaacataagaaacaataattatggcacctgaattaggacagtgacattaaatttctgttatttgttgactattgtgcgctgcaatcgaattgatatttgacatgctttccccatgtaattgacacatttaaaggaatctttggctttataaagtattgtttaaatattgtttaatgggcataacacaggactgtacatcagcatttgctagtagaaacaaagaggtcttttggttattttggcaattgcaaatcattctttcaccatctctgtttttgagtctgtctcataaaaaatactacttatactac

SEQ ID NO: 287783 - DNA, 963 bp, Artificial Sequence
  derived and/or modified sequence
atgctgaagatgctgtccttcaagctgctgctgctggccgtggccctgggcttctttgaaggagatgccaagtttggagagagaaatgaaggcagcggggccaggagaagacgctgcctgaatggaaacccccccaagaggctgaagaggcgggacaggaggatgatgagccagctggagctgctgtctggaggagagatgctgtgtggcggcttctacccccggctgagctgctgcctgcggagtgacagccctggcctgggccgcctggagaacaagatcttctctgtgaccaacaacacagaatgtgggaagctgctggaggagatcaagtgtgccctgtgcagcccccacagccagagcctcttccacagccctgagcgggaggtgctggagcgggacctggtgctgcccctgctgtgcaaggactactgcaaggagttcttctacacctgccggggccacatccctggcttcctgcagaccacagcagatgagttctgcttctactatgccaggaaggatggcggcctgtgcttcccagacttccccaggaagcaggtgcggggccctgccagcaactacctggaccagatggaggagtatgacaaggtggaggagatcagcaggaagcacaagcacaactgcttctgcatccaggaggtggtgtctggcctgcggcagcctgtgggcgccctgcacagcggagatggcagccagaggctcttcatcctggagaaggagggctacgtgaagatcctgaccccagagggggagatcttcaaggagccctacctggacatccacaagctggtgcagagcggcatcaaggtgggcttcctgaacttcatctacttctgtgccggctacgtgaacttcatcctggtgctgcccagcagcctgaaggtgttcctgtgcaacaagaggaagaacctggccggagaaaataaaggagccacctag

SEQ ID NO: 287784 - DNA, 963 bp, Artificial Sequence
  derived and/or modified sequence
atgctgaagatgctgagcttcaagctgctgctgctggccgtggccctcggattttttgaaggcgatgctaagttcggagaacggaatgagggctctggggctcggcgccggaggtgcttaaatggcaatccaccaaagcggttaaagcggcgcgacaggcggatgatgagccagctggagcttctgtctgggggagagatgctgtgcggcggcttttacccgcgcctgagttgctgtctgcgatcagatagcccagggctgggcagactggaaaacaagatattctccgtcacaaacaacaccgagtgcggaaagctgcttgaagaaatcaagtgtgctctgtgctcccctcactctcagagtctgtttcacagccccgaacgcgaggtattggagagggacttggtgctgccgctactgtgcaaagattattgcaaagagtttttttacacctgtcgaggtcacatccccggcttccttcaaactaccgccgatgagttttgtttttactatgctaggaaagacggaggcctgtgcttccctgatttcccccgtaagcaagtgcgaggacccgccagcaactatctggatcaaatggaggaatacgataaggtggaggagataagcagaaagcacaagcacaactgcttttgtatccaggaggtcgtatcgggtctcagacagccggtcggcgcactgcattccggggatggctctcaaagactattcattttagaaaaggagggttatgtgaagattctcacacccgaaggggagatattcaaggagccttacttggacatccacaagctggtccaaagcggaatcaaggttggctttctgaactttatttatttctgcgctggctatgttaattttatacttgtattgccctcaagcttgaaagtgttcctgtgtaacaaaaggaaaaatctagccggcgaaaataagggagccacctag

SEQ ID NO: 287785 - DNA, 963 bp, Artificial Sequence
  derived and/or modified sequence
atgctgaagatgctcagcttcaaactgttgctcttggctgtggcactgggattcttcgaaggggatgcaaaattcggcgaaaggaatgagggttcgggagcaagaagaagaagatgcttaaacggaaatccacccaaaaggctcaagcgccgtgacagaaggatgatgagtcagctggagctgctgtccggtggtgaaatgctgtgcggcggattctaccctaggttatcttgctgtcttaggtccgacagtcccggacttggcaggctggagaataaaattttctcggtgaccaataatacagagtgtggcaagttacttgaagaaatcaaatgtgccctgtgcagcccccactcgcagtcccttttccacagcccagaacgtgaagttctggaaagagatctagtcttgccattgttatgtaaagactattgtaaggagtttttctacacatgtcgcggacacatccccggtttcctgcaaaccacggcagatgagttctgcttctattacgcacgtaaggatggaggactgtgttttccagactttccaagaaagcaggtgcgcggacctgcaagtaactaccttgaccaaatggaggaatatgacaaggttgaggagatcagcagaaaacataagcataattgtttttgtattcaagaagtggtctcgggcctccgtcagcctgtcggtgcactgcactccggggatgggtctcagaggctgttcatcctcgagaaagaaggttatgttaaaattctgacaccagaaggtgaaatttttaaggagccgtacctggatatacacaaactggtgcagtctgggatcaaagtaggctttctgaactttatctatttctgcgcgggatacgtgaacttcattttagtcctccctagttccctgaaagtgttcctatgcaacaaaaggaaaaatctggcaggcgaaaataagggcgcaacttag

SEQ ID NO: 287786 - DNA, 963 bp, Artificial Sequence
  derived and/or modified sequence
atgctgaagatgctgagcttcaagctgctgctgctggccgtggccctgggcttcttcgagggcgacgccaagttcggcgagagaaacgagggcagcggcgccagaagaagaagatgcctgaacggcaacccccccaagagactgaagagaagagacagaagaatgatgagccagctggagctgctgagcggcggcgagatgctgtgcggcggcttctaccccagactgagctgctgcctgagaagcgacagccccggcctgggcagactggagaacaagatcttcagcgtgaccaacaacaccgagtgcggcaagctgctggaggagatcaagtgcgccctgtgcagcccccacagccagagcctgttccacagccccgagagagaggtgctggagagagacctggtgctgcccctgctgtgcaaggactactgcaaggagttcttctacacctgcagaggccacatccccggcttcctgcagaccaccgccgacgagttctgcttctactacgccagaaaggacggcggcctgtgcttccccgacttccccagaaagcaggtgagaggccccgccagcaactacctggaccagatggaggagtacgacaaggtggaggagatcagcagaaagcacaagcacaactgcttctgcatccaggaggtggtgagcggcctgagacagcccgtgggcgccctgcacagcggcgacggcagccagagactgttcatcctggagaaggagggctacgtgaagatcctgacccccgagggcgagatcttcaaggagccctacctggacatccacaagctggtgcagagcggcatcaaggtgggcttcctgaacttcatctacttctgcgccggctacgtgaacttcatcctggtgctgcccagcagcctgaaggtgttcctgtgcaacaagagaaagaacctggccggcgagaacaagggcgccacctag

SEQ ID NO: 287787 - protein, 70 aa, Artificial Sequence
  derived and/or modified sequence
CFFYYLKSLKPSNHATIQSIVRAVGVVPGIPEPCCVPEKMSSLSILFFDENKNVVLKVYPNMTVESCACR

SEQ ID NO: 287788 - DNA, 213 bp, Artificial Sequence
  derived and/or modified sequence
tgcttcttttactatctgaaaagcctaaagccatcgaatcatgccaccattcagtctatagtccgagcggtcggggtggtcccaggcataccagaaccttgttgtgtcccagagaaaatgagctccctgagcatactattctttgatgagaataagaacgtggttctgaaagtctaccctaatatgacagtggagtcttgcgcttgtcggtag

SEQ ID NO: 287789 - DNA, 213 bp, Artificial Sequence
  derived and/or modified sequence
tgcttcttctactacctgaagagcctgaagcccagcaaccacgccaccatccagagcatcgtgcgggctgtgggcgtggtgcccggcatccctgagccctgctgcgtgcctgagaagatgagcagcctgagcatcctcttctttgatgagaacaagaatgtggtgctgaaggtgtaccccaacatgacagtggagagctgtgcctgcaggtag

SEQ ID NO: 287790 - DNA, 213 bp, Artificial Sequence
  derived and/or modified sequence
tgcttcttctactacctgaagagcctgaagcccagcaaccacgccacaatacaaagtattgtacgcgctgttggagtcgtgcctggaatacctgaaccctgttgtgtaccagaaaaaatgagcagcctctccatcctatttttcgatgagaataaaaacgtagtgcttaaggtgtaccccaacatgactgttgagagctgcgcgtgtagatag

SEQ ID NO: 287791 - DNA, 213 bp, Artificial Sequence
  derived and/or modified sequence
tgcttcttctattatctgaaatctttgaaaccctctaaccatgccacaattcagtcaattgttcgcgctgtgggagtggttcctggcatccctgaaccatgttgcgtacccgaaaaaatgtcttctctctctatactcttttttgacgagaataaaaatgtcgtcctcaaggtatacccgaatatgacagtagaatcttgtgcatgtcgatag

SEQ ID NO: 287792 - DNA, 238 bp, Artificial Sequence
  derived and/or modified sequence
tgttttttctattacctaaagtctttgaagccatcaaatcatgctaccatccagagtatagtgagagctgtgggggtcgttcctgggattcctgagccttgctgtgtaccagaaaagatgtcctcactcagtattttattctttgatgaaaataagaatgtagtgcttaaagtataccctaacatgacagtagagtcttgcgcttgcagataacctggcaaagaactcatttgaatgc

SEQ ID NO: 287793 - DNA, 213 bp, Artificial Sequence
  derived and/or modified sequence
tgcttcttctactacctgaagagcctgaagcccagcaaccacgccaccatccagagcatcgtgagagccgtgggcgtggtgcccggcatccccgagccctgctgcgtgcccgagaagatgagcagcctgagcatcctgttcttcgacgagaacaagaacgtggtgctgaaggtgtaccccaacatgaccgtggagagctgcgcctgcagatag

SEQ ID NO: 287794 - protein, 541 aa, Artificial Sequence
  derived and/or modified sequence
MKSYTPYFILLWSAVGIAKAAKIIIVPPIMFESHMYIFKTLASALHERGHHTVFLLSEGRDIAPSNHYSLQRYPGIFNSTTSDAFLQSKMRNIFSGRLTAIELFDILDHYTKNCDLMVGNHALIQGLKKEKFDLLLVDPNDMCGFVIAHLLGVKYAVFSTGLWYPAEVGAPAPLAYVPEFNSLLTDRMNLLQRMKNTGVYLISRLGVSFLVLPKYERIMQKYNLLPEKSMYDLVHGSSLWMLCTDVALEFPRPTLPNVVYVGGILTKPASPLPEDLQRWVNGANEHGFVLVSFGAGVKYLSEDIANKLAGALGRLPQKVIWRFSGPKPKNLGNNTKLIEWLPQNDLLGHSKIKAFLSHGGLNSIFETIYHGVPVVGIPLFGDHYDTMTRVQAKGMGILLEWKTVTEKELYEALVKVINNPSYRQRAQKLSEIHKDQPGHPVNRTIYWIDYIIRHNGAHHLRAAVHQISFCQYFLLDIAFVLLLGAALLYFLLSWVTKFIYRKIKSLWSRNKHSTVNGHYHNGILNGKYKRNGHIKHEKKVK

SEQ ID NO: 287795 - DNA, 1626 bp, Artificial Sequence
  derived and/or modified sequence
atgaagagctacaccccctacttcatcctgctgtggagcgccgtgggcatcgccaaggccgccaagatcatcatcgtgccccccatcatgttcgagagccacatgtacatcttcaagaccctggccagcgccctgcacgagagaggccaccacaccgtgttcctgctgagcgagggcagagacatcgcccccagcaaccactacagcctgcagagataccccggcatcttcaacagcaccaccagcgacgccttcctgcagagcaagatgagaaacatcttcagcggcagactgaccgccatcgagctgttcgacatcctggaccactacaccaagaactgcgacctgatggtgggcaaccacgccctgatccagggcctgaagaaggagaagttcgacctgctgctggtggaccccaacgacatgtgcggcttcgtgatcgcccacctgctgggcgtgaagtacgccgtgttcagcaccggcctgtggtaccccgccgaggtgggcgcccccgcccccctggcctacgtgcccgagttcaacagcctgctgaccgacagaatgaacctgctgcagagaatgaagaacaccggcgtgtacctgatcagcagactgggcgtgagcttcctggtgctgcccaagtacgagagaatcatgcagaagtacaacctgctgcccgagaagagcatgtacgacctggtgcacggcagcagcctgtggatgctgtgcaccgacgtggccctggagttccccagacccaccctgcccaacgtggtgtacgtgggcggcatcctgaccaagcccgccagccccctgcccgaggacctgcagagatgggtgaacggcgccaacgagcacggcttcgtgctggtgagcttcggcgccggcgtgaagtacctgagcgaggacatcgccaacaagctggccggcgccctgggcagactgccccagaaggtgatctggagattcagcggccccaagcccaagaacctgggcaacaacaccaagctgatcgagtggctgccccagaacgacctgctgggccacagcaagatcaaggccttcctgagccacggcggcctgaacagcatcttcgagaccatctaccacggcgtgcccgtggtgggcatccccctgttcggcgaccactacgacaccatgaccagagtgcaggccaagggcatgggcatcctgctggagtggaagaccgtgaccgagaaggagctgtacgaggccctggtgaaggtgatcaacaaccccagctacagacagagagcccagaagctgagcgagatccacaaggaccagcccggccaccccgtgaacagaaccatctactggatcgactacatcatcagacacaacggcgcccaccacctgagagccgccgtgcaccagatcagcttctgccagtacttcctgctggacatcgccttcgtgctgctgctgggcgccgccctgctgtacttcctgctgagctgggtgaccaagttcatctacagaaagatcaagagcctgtggagcagaaacaagcacagcaccgtgaacggccactaccacaacggcatcctgaacggcaagtacaagagaaacggccacatcaagcacgagaagaaggtgaagtag

SEQ ID NO: 287796 - DNA, 426 bp, Artificial Sequence
  derived and/or modified sequence
atgaagagctacaccccctacttcatcctgctgtggagcgccgtgggcatcgccaaggccgccaagatcatcatcgtgccccccatcatgttcgagagccacatgtacatcttcaagaccctggccagcgccctgcacgagagaggccaccacaccgtgttcctgctgagcgagggcagagacatcgcccccagcaaccactacagcctgcagagataccccggcatcttcaacagcaccaccagcgacgccttcctgcagagcaagatgagaaacatcttcagcggcagactgaccgccatcgagctgttcgacatcctggaccactacaccaagaactgcgacctgatggtgggcaaccacgccctgatccagggcctgaagaaggagaagttcgacctgctgctggtggaccccaacgactag

SEQ ID NO: 287797 - DNA, 1626 bp, Artificial Sequence
  derived and/or modified sequence
atgaaaagctatacaccttattttattttgctatggtccgcagtcggcatcgcgaaagccgctaagattatcattgtaccccctatcatgtttgaaagtcacatgtatatatttaaaaccctagcaagcgccctgcatgaacgggggcaccacacagtattcctgctctctgaaggccgggatatcgccccttccaaccattacagtttgcagcggtatcctggcatcttcaatagtacaacttctgacgcttttctgcagagcaaaatgcgcaatatcttcagcggccggcttactgccatcgaactctttgacattctcgaccactacactaaaaactgcgatttaatggtgggcaaccatgcactgatccaaggtctgaagaaggagaaatttgacctgctccttgtagatcccaacgacatgtgcgggttcgtgattgcccaccttcttggcgtgaagtacgctgtgttttccacaggcctctggtatcccgccgaggtgggggcccctgcgcctttagcctacgtaccagaatttaacagtctgttgactgacaggatgaacctgttgcagcggatgaagaataccggcgtgtatcttatctcccggcttggagtctcgtttctagttcttcctaaatacgaacggatcatgcagaagtataatctgcttcctgagaaatcaatgtacgacctcgttcacggatcctcactctggatgctgtgtacggacgtcgctcttgagttcccccggcctacacttcctaacgtcgtctatgtcggcggaatcctgacgaagccagcatctcctctgcccgaagacctgcaacgatgggtgaacggcgctaacgagcatgggttcgtcctagtttcattcggcgctggtgtgaaatacctttcggaagatattgctaacaaattggccggcgcgctcggacgcttgccccagaaagtgatatggcgcttttcaggcccaaagcctaaaaacctggggaacaacactaagctgatcgagtggctccctcagaacgatctgcttgggcactcaaagatcaaagctttcctcagccacggaggtctgaactctatttttgagactatctatcacggagtgccagtggttgggatcccccttttcggtgaccattacgacacaatgacacgggtgcaggctaagggtatgggtatattgctggaatggaagaccgttactgaaaaagagttgtatgaagctctggtcaaggtgatcaacaacccaagctatcgacaacgcgcgcaaaagttgtcagagatccataaggatcagcccgggcaccccgtgaacaggaccatatactggattgactatatcatcaggcacaacggcgcacaccacttaagagcagcagtccaccaaattagcttctgtcaatatttcctccttgacattgcctttgtcttgttgctaggcgctgcattgttatatttcttactctcgtgggtaaccaagttcatttaccggaaaattaaatccttgtggagtcgtaacaaacattccacagtaaatggccactaccacaatggtatcctgaacggcaaatacaagcgtaatgggcacataaagcatgaaaaaaaggtgaaatag

SEQ ID NO: 287798 - DNA, 1626 bp, Artificial Sequence
  derived and/or modified sequence
atgaaatcgtacacgccttatttcatcttgttatggtccgctgtaggtattgcaaaagccgcgaaaataatcattgtgccaccgatcatgtttgaaagccatatgtatattttcaaaacccttgcgtctgccctgcatgaaaggggtcaccatactgtatttctgctaagcgaaggacgggacatcgctccatcgaatcattactcactccagagatacccaggaatcttcaactcgacaaccagtgacgcgttcctgcagtcgaagatgagaaacatcttctcagggcggcttacggccatcgaacttttcgatattctcgaccactacactaaaaactgtgatttaatggtggggaatcacgccctgattcaagggctgaagaaggagaaattcgacctgctactggtagatcctaacgacatgtgcggattcgtcatagcacacctcctaggcgttaaatatgctgtgttcagtactggactgtggtaccccgccgaagtaggtgcccccgctcctctggcatacgttcctgagttcaatagcctgctaaccgatcggatgaacctgctccaacgcatgaaaaacacgggggtctacctcatttctagactcggcgtgagctttctcgttttgcccaaatatgaaagaattatgcagaagtacaacttgctgccagaaaagagcatgtacgacttggtgcatggaagcagcttgtggatgctctgtactgatgtggctcttgagtttcctagacccaccctgccgaatgttgtctacgttggagggattcttaccaagcccgcgagtcctcttcctgaagatctgcagaggtgggtcaacggcgctaatgagcacgggttcgtattggtgtctttcggcgctggagtcaagtatctcagcgaagacatcgccaacaaacttgcaggcgcactcggaaggctaccccagaaggtgatctggcggttctctgggcccaagcccaagaatctaggcaacaacacaaaactgattgagtggcttccccagaacgacctgctgggtcacagcaagatcaaagcttttctctctcacggggggctgaatagcatttttgaaactatttatcatggcgttcccgtggttggcattcccctctttggtgaccactacgacaccatgacaagggttcaggctaagggcatgggcatcctcctggaatggaagacggtcacggaaaaggagctgtatgaggcactggtgaaagtgataaataacccctcataccgtcaaagggcccagaagctaagtgaaatccataaagatcaacccggccatcccgtgaacagaacgatctattggattgactatatcatcagacacaacggagcgcaccatctgagagccgcggttcaccagataagtttttgccagtactttctcttagacatcgcatttgtccttctgctgggtgccgctttactctactttcttttgagctgggtgacaaagtttatttacaggaaaatcaaatcactgtggagccgtaacaagcactcgacagtaaatggccattatcacaacggaattctcaatgggaaatataaacgcaacggccacatcaaacatgagaaaaaagtgaagtag

SEQ ID NO: 287799 - DNA, 426 bp, Artificial Sequence
  derived and/or modified sequence
atgaagtcatacaccccctactttatattgctttggtcagctgtaggcatcgccaaagcagcaaagataatcatcgtcccacccatcatgtttgaatcacatatgtacatttttaaaacgctcgcctctgctctgcacgagcgaggacaccataccgtgttcctgctgagtgaaggccgagatatcgcacccagcaaccactacagcctacaacgctaccctggcatctttaactccaccacctccgacgcctttttacagagcaagatgagaaacatcttcagcggtcgattgactgcgattgaactgttcgatatactggaccattacacgaagaactgcgaccttatggtgggcaatcacgcactgatccagggtctgaaaaaggagaaattcgatctgttgctcgtggatcctaacgactag

SEQ ID NO: 287800 - DNA, 1626 bp, Artificial Sequence
  derived and/or modified sequence
atgaagagctacaccccctacttcatcctgctgtggagcgctgtgggcatcgccaaggccgccaagatcatcatcgtgccccccatcatgtttgagagccacatgtacatcttcaagaccctggccagcgccctgcacgagcggggccaccacacagtgttcctgctgtctgagggccgggacatcgcccccagcaaccactacagcctgcagcgctacccaggcatcttcaacagcaccaccagtgatgccttcctgcagagcaagatgaggaacatcttcagcggccgcctgacagccatcgagctgtttgacatcctggaccactacaccaagaactgtgacctgatggtgggcaaccacgccctgatccagggcctgaagaaggagaagtttgacctgctgctggtggaccccaatgacatgtgtggctttgtgattgcccacctgctgggcgtgaagtatgctgtgttcagcacaggcctgtggtacccagctgaggtgggcgccccagcccccctggcctacgtgcctgagttcaacagcctgctgacagacaggatgaacctgctgcagaggatgaagaacacaggagtgtacctgatcagccggctgggcgtgtccttcctggtgctgcccaagtatgagcgcatcatgcagaagtacaacctgctgcctgagaagtccatgtatgacctggtgcacggcagcagcctgtggatgctgtgcacagatgtggccctggagttcccccggcccaccctgcccaacgtggtgtatgtgggcggcatcctgaccaagccagccagccccctgcctgaggacctgcagcgctgggtgaatggagccaatgagcacggctttgtgctggtgtcctttggagctggggtgaagtacctgtctgaggacatcgccaacaagctggccggggccctgggccgcctgccccagaaggtgatctggaggttcagcggccccaagcccaagaacctgggcaacaacaccaagctgattgagtggctgccccagaatgacctgctgggccacagcaagatcaaggccttcctgagccacggcggcctgaacagcatctttgagaccatctaccacggcgtgcctgtggtgggcatccccctgtttggagaccactatgacaccatgaccagggtgcaggccaagggcatgggcatcctgctggagtggaagacagtgacagagaaggagctgtatgaggccctggtgaaggtgatcaacaaccccagctaccggcagagggcccagaagctgtctgagatccacaaggaccagcccggccaccctgtgaacagaaccatctactggattgactacatcatccgccacaatggagcccaccacctgcgggctgctgtgcaccagatctccttctgccagtacttcctgctggacatcgcctttgtgctgctgctgggcgccgccctgctgtacttcctgctgtcctgggtgaccaagttcatctacaggaagatcaagagcctgtggagcaggaacaagcacagcacagtgaatggccactaccacaacggcatcctgaatggcaagtacaagagaaatggccacatcaagcatgagaagaaggtgaagtag

SEQ ID NO: 287801 - DNA, 426 bp, Artificial Sequence
  derived and/or modified sequence
atgaagagctacaccccctacttcatcctgctgtggagcgctgtgggcatcgccaaggccgccaagatcatcatcgtgccccccatcatgtttgagagccacatgtacatcttcaagaccctggccagcgccctgcacgagcggggccaccacacagtgttcctgctgtctgagggccgggacatcgcccccagcaaccactacagcctgcagcgctacccaggcatcttcaacagcaccaccagtgatgccttcctgcagagcaagatgaggaacatcttcagcggccgcctgacagccatcgagctgtttgacatcctggaccactacaccaagaactgtgacctgatggtgggcaaccacgccctgatccagggcctgaagaaggagaagtttgacctgctgctggtggaccccaatgactag

SEQ ID NO: 287802 - DNA, 1626 bp, Artificial Sequence
  derived and/or modified sequence
atgaagagctacaccccctacttcatcctgctgtggagcgccgtgggaatagcgaaagcagctaagatcattatagttcctcccataatgtttgaatcacacatgtacatcttcaaaactctggcttcagctttgcacgaacgcggacatcacactgtattcctgctgtccgagggacgggacattgcaccatcgaatcactactcgttgcagcgttatcccggcatctttaattctacgacctccgatgcttttctccaatccaagatgcggaatatcttctcaggtcgactcactgccatcgagctgttcgatattctggatcactatacaaagaattgcgatcttatggttggcaaccacgccctgatccaaggtctcaagaaagagaagttcgacttgctcttagtcgaccctaacgacatgtgcggttttgtaatcgcacatcttcttggcgtaaagtatgctgtattttctacgggcctgtggtaccctgccgaggtgggcgcaccagcacctttagcatacgtgcccgaatttaacagtctactaacagacagaatgaacctgctgcagcgtatgaagaacacgggggtatacctgatctcaaggttgggggtgtcttttctagtgctgccaaaatatgaaaggattatgcagaagtataatctgctgcccgaaaaatcgatgtacgacttagtacacggttcctccttatggatgctgtgcacagatgtagctctcgagttcccacgacctaccctccctaatgtggtttacgttggagggattcttacaaagccagctagccccctcccagaggacctccagagatgggtgaacggggctaatgaacacggcttcgtgctggtgtcatttggtgctggagtgaagtacctatcggaagacattgccaacaagctcgctggcgcacttggtcggctgccgcagaaagtcatatggaggttctcaggccctaagcccaaaaatctcgggaataacacaaagctgattgaatggctgcctcaaaacgacctgctgggccactccaagatcaaagctttcctatctcatggaggtctgaattctatctttgaaaccatctaccacggcgtccccgtggttggtatccctttgttcggggatcattacgacacaatgacgagagttcaagctaaaggtatgggcatacttctggagtggaaaacagttactgagaaggagctctatgaggctctcgtaaaagtgattaacaatccaagttaccgccagagagctcaaaagctaagcgagatccacaaggatcagcctggtcatcctgttaatcgcacaatctactggattgattatatcatacgtcataacggagcccaccatttacgggccgcagtgcaccagatttcgttctgccaatatttcctcctcgacatcgccttcgttctactcctgggagccgctctgctctacttcttgctgtcgtgggtcacaaaattcatttatagaaagattaaaagtttgtggagcaggaacaagcactcaacggtgaatggccactaccacaatgggattttaaacggcaaatataaacggaacgggcatataaaacacgaaaagaaggtcaaatag

SEQ ID NO: 287803 - DNA, 1626 bp, Artificial Sequence
  derived and/or modified sequence
atgaagagctacaccccctacttcatcctgctgtggagcgccgtgggcatcgccaaagcggcgaagatcatcatagtaccacccattatgttcgaaagtcacatgtacatttttaagaccctcgccagtgccctgcatgaacggggtcaccacaccgtcttcctcttatccgaaggacgtgatattgccccttcgaatcactatagtcttcagaggtaccccggcattttcaattcgaccacgagtgacgcatttctgcagagtaaaatgagaaacatattctccggacgtttgaccgccattgagcttttcgatattctcgatcactataccaagaattgcgatttaatggtgggcaaccatgcactgatccagggtcttaagaaggagaagtttgacctgcttctggtggacccaaatgatatgtgtggattcgtcattgcccacctgttgggggttaaatatgccgttttcagcactgggctgtggtaccccgcggaagtgggtgcccctgctcccctggcgtatgtaccagaattcaatagcctgctgaccgatcgcatgaacctcctacagcggatgaaaaacacgggagtctatctgatctctcgcctcggggtctccttcttggtactgcccaagtatgagcgaattatgcaaaagtataatcttctgcccgaaaagagtatgtacgacctggtacacggctccagtctgtggatgctctgtactgatgtggccttggagttccctaggcccacattgccaaatgtcgtgtacgtgggcggcattctaaccaagcccgctagtccactgcccgaggacctccagaggtgggtgaatggcgccaatgaacatgggttcgttctggtttcctttggcgcaggcgtcaagtacctctctgaagatatcgcaaataagctagccggcgcccttgggaggctcccccagaaagttatttggcgcttctcaggacctaagcctaagaatctcggtaataatacaaaacttatcgaatggctgccacagaacgatcttcttggccactcgaaaattaaggcgtttctgagccacggcggattgaactcaatattcgaaacaatttatcatggtgttcctgtcgtgggtatcccgctttttggcgaccattacgacacaatgactagagtccaggctaagggcatgggcatactgctagagtggaagactgtgaccgagaaggagctgtacgaggctctggttaaggttatcaataacccgtcatacaggcaaagggctcagaaattaagcgaaatccacaaggaccagcccggccatcccgtgaatagaacaatatattggattgattatattatcaggcataatggcgctcaccacctgagagcggcagtacaccagatttcgttctgccagtactttctgttagatatcgctttcgtcctgcttctgggggccgccctcctgtatttcttattgtcctgggtgacgaagttcatctacagaaaaataaagagcctctggtcgcgaaacaaacattccacagtgaatgggcactaccacaatgggattttgaatgggaagtataaacgcaacggccatatcaaacatgagaagaaggtaaagtag

SEQ ID NO: 287804 - DNA, 426 bp, Artificial Sequence
  derived and/or modified sequence
atgaagagctacaccccctacttcatcctgctgtggagcgccgtgggaattgctaaggcagccaagattattattgtgccccctataatgtttgagtctcatatgtatatatttaaaaccctggcatcagcactacacgagcgcgggcaccatacagtattcctgctcagcgaaggcagagatatcgccccaagcaatcactactcgctgcagcgataccctgggatcttcaatagtactacctccgatgcatttctgcagtccaagatgcgcaacatattcagcggccgactgaccgccatcgaactgttcgacattctggaccactatacgaaaaactgcgacttaatggtgggcaaccatgcacttattcaaggcctgaagaaagagaaatttgatcttctgctggttgatccaaacgattag

SEQ ID NO: 287805 - DNA, 1626 bp, Artificial Sequence
  derived and/or modified sequence
atgaagtcttacactccttacttcattctcctttggtcagctgtgggaattgcaaaggcggcaaagattatcattgtgccgccaattatgtttgagtcacatatgtacatttttaaaaccctcgcatctgcacttcacgagcgcggtcatcacactgtgttcttgctctcggaaggcagagacatcgctccgtcgaatcactacagcctgcagcgctatcctggaatattcaattcaacaacctccgacgcctttcttcagagtaagatgagaaatatcttttccggcaggctgaccgctattgaactatttgacatactggaccattacacaaagaattgcgacttgatggtgggcaatcatgcactgattcaagggctgaaaaaggagaagttcgatctgcttttggtagatcctaacgatatgtgcggattcgtgatagctcatctgcttggcgtgaagtatgcagttttcagcaccggattgtggtatcccgcagaggttggcgctcctgccccactcgcatacgtacccgagtttaacagccttctcacagaccggatgaacctccttcagagaatgaagaataccggtgtgtacctcatttctaggctaggcgttagcttcctcgtcctcccgaaatatgagaggatcatgcagaaatataatctgctgccggaaaaatcgatgtacgatctggtccatgggagttcactgtggatgctgtgtaccgacgttgcgctggaatttcccagacccaccctcccaaatgtagtgtacgtcgggggaatccttacaaagcctgcttcccctctgccagaagatctgcagagatgggtaaacggtgcaaatgagcacgggtttgtccttgtcagctttggagcgggagtcaaatacctgtcagaagatatcgcaaataagctcgctggcgctctagggaggctgcctcagaaggtgatttggcgattcagcgggccaaagcctaaaaacctcggcaataatacgaagcttatcgagtggctcccgcagaatgatctccttggccattcaaaaattaaggctttcctgtcacatgggggtctgaactccatttttgagaccatctaccatggcgtgcctgtggtgggtatcccgctcttcggcgaccactatgacactatgacccgagtccaggcaaaggggatggggattctgttagaatggaaaacggtgacagagaaggaactctatgaggccctggtcaaggtcattaacaatcctagctatcgccaaagagctcagaagctgtcagagatccacaaggatcagccgggtcaccctgtcaacaggaccatatattggattgactacattataaggcataacggagcacaccaccttcgagcggctgtgcaccagattagcttctgtcagtatttcctgctagacatcgctttcgtgctgcttctgggcgctgcgttgctctactttttgctctcctgggttactaagttcatctaccgaaaaattaagtccttatggagcaggaataaacattctacagtgaacggccactaccacaacggcattctgaacggcaagtacaagcgcaatggacatatcaagcatgagaagaaggttaaatag

SEQ ID NO: 287806 - DNA, 1626 bp, Artificial Sequence
  derived and/or modified sequence
atgaaaagctacaccccgtatttcatcctgctgtggtccgcagtgggcattgccaaagccgctaagattataattgtacctccaatcatgttcgagtcacacatgtatatcttcaagacattagccagcgccttacacgagcgaggccaccataccgtttttttactgtctgagggtcgtgacatagcaccctctaaccactattccctgcagcgctatcctggcatatttaactcgactacaagtgacgctttcctccagagcaagatgcgtaacattttttctggccgtctgactgccatcgagctgttcgacatcttggaccattacacaaagaattgcgacctcatggtcgggaatcatgcactgattcagggactcaagaaagaaaaatttgatcttctgcttgtggaccctaacgacatgtgtggattcgtgatcgctcacttgctaggcgtgaagtacgcagtcttctctacagggctgtggtacccagcagaggtgggagccccagcccctttagcctacgtgccagagtttaattctctcctcaccgaccggatgaacctgcttcagagaatgaagaacacaggagtctatctaatttcccgcttaggggtgtctttcctggtcctcccaaagtacgagcgaataatgcagaagtacaacctcttacctgagaaatcgatgtacgatctcgtccacggaagttccctgtggatgctttgtactgacgttgctctggaatttcccagacccacattacctaacgtcgtctacgtggggggtatactgacaaagcccgcatcaccccttcctgaggacctccaaaggtgggtgaatggcgcaaatgaacacgggtttgtgctcgtaagctttggggcaggtgttaagtacctgtcagaggacattgccaacaaactggctggcgcacttggccgactcccacaaaaagtgatctggcgcttctctgggcctaaaccaaagaatcttggtaacaacacaaagcttatagaatggttgccccaaaacgacctgctgggccattcaaagattaaggcttttctatctcacgggggtctgaatagcatttttgagaccatttatcacggcgtccctgtggtgggcattcctctgttcggcgatcactacgacactatgactagggtgcaagcaaaaggaatggggattctgctggaatggaagaccgttacagagaaagaactctatgaggctttagtcaaggtgattaataacccttcctacagacaaagagcacaaaagttgtcagaaatccacaaggaccagccaggacatcctgtgaatagaacgatctactggattgactacatcatccgacataacggggctcaccatcttagagctgccgtgcaccagatcagcttttgtcagtattttttgctggatattgcttttgtgttgctattgggcgctgcactgctgtatttcttactttcctgggtgactaagttcatttatcggaagatcaagagtctgtggagtcgtaataagcatagcactgtcaacggccattaccataatggaatcttgaatggaaaatataagagaaatgggcacatcaagcacgaaaagaaggtcaagtag

SEQ ID NO: 287807 - DNA, 426 bp, Artificial Sequence
  derived and/or modified sequence
atgaagtcttacacaccctattttatccttctttggtcggccgtgggtattgcaaaggctgctaagattatcatcgtaccacctatcatgttcgagagtcacatgtacatttttaagacattggccagcgcactgcacgaacgaggtcatcatacagtcttcctcctctcggaaggtcgggacatagccccatctaatcattactctttgcagcggtatccaggcattttcaacagcactactagcgatgcttttttacagagtaaaatgaggaacatcttctccggcagactaaccgctatcgaactttttgatatattggatcactacactaaaaattgcgatcttatggtcggaaatcacgctctcatccaaggcctgaagaaagagaaattcgatctgcttctggtcgaccccaacgattag

SEQ ID NO: 287808 - DNA, 4084 bp, Artificial Sequence
  derived and/or modified sequence
aagccaacctcgctcagcggacgactggccggatcccaacgcgctgccccttgcccagcctgcgagcgcgtggtacgaaggcgcgtctgcatccatgccccagcccggggagctggaggcgctcgcagtcagaggcgagtgatgctaggctgagcgcgtggcggcccgtgtcgtgccccgctgagccaagtgcggaagggcagcggcgcgctccgactctgctcgccgcacgcagggcggggcgcggctggggggcggggggcctggccgcccgctgggagctgcggacgagcaggcgcgctgaggacccgagggaggacacggttaaagcattgctatcaactgtgaacccagagagccctccttagccaacacgctaactccgaagcctcccttacgcccccgaaccaccgaaggcggcgacacctgattcagcgcacaaacacaggtcccttctgtcccggatacaattacgcggcagacacacactcaaactcgcgcggggcagccaagagacgagctatgaagtcttacactccatatttcattctcctgtggagtgctgttgggatagcgaaggctgccaaaatcatcatcgtgccgccaattatgtttgaaagccatatgtacattttcaagacgctagcctcagccttgcacgagagaggccaccatacagtgttcctcctctctgaaggcagagacatcgccccatctaatcattacagcctccagcgctacccagggatctttaacagtaccacctcagatgctttcctacagtccaagatgcggaatattttctctgggagattgacagcaatcgaactgtttgacatactggatcactatactaagaactgtgacctgatggttggcaaccatgccctgatccagggtctgaagaaagaaaaatttgacctgctgctggtggaccctaatgatatgtgtggatttgtgatagctcatcttttaggggttaaatatgctgtattttcaactggcctttggtatcctgctgaagtgggtgctcctgctccattagcatacgtcccagagtttaactcactcctcacagaccgcatgaacttgctgcaaaggatgaaaaataccggtgtttacctcatttccagattaggggtcagctttctggttcttcccaaatatgaaaggataatgcagaagtacaacctgctgccagagaagtccatgtatgatttggttcatgggtccagcctgtggatgctgtgtactgacgtagcactggaattcccaagacccactctgcctaatgttgtttatgtaggaggaatcctaaccaaaccagccagcccactaccagaagatctccaaagatgggtaaatggtgctaatgaacatggctttgtcttggtgtcttttggagctggtgtcaagtatctgtcagaagacattgctaacaaactggcaggagctctggggagattgcctcaaaaagtgatttggaggttttctggacccaaaccaaagaatctaggaaacaacactaaactcatagaatggttaccacaaaatgacctgcttgggcattcaaagattaaagccttcctgagccatggtggtttgaacagtatttttgaaactatatatcatggtgtgcctgtagtgggaattccactctttggagaccattatgatactatgaccagagtacaggcaaaaggcatggggatattgctagaatggaagacagttactgaaaaagagctctatgaagcactagtgaaggttatcaataatcccagctaccgtcagagggctcagaagctttcggaaattcacaaggatcaacctggtcaccctgtcaatcgaactatctattggatagattatattattcgtcacaatggagcccatcacctacgtgccgctgtccatcagatctccttttgtcagtattttttactggatattgcctttgtgcttttgcttggtgctgccttgttatactttctcttgtcttgggtgacaaaatttatctacagaaaaatcaaaagtctgtggtctagaaataagcatagcacagttaatggacattaccacaatggaatcctcaatggcaagtacaaaagaaatggccatattaaacatgaaaagaaagtgaaatgagccaacagcccaggtgatagaaataaattggttcactcattgaatttttattgctattatttagtctaacagctactaaaagtaaaacatcagtaaacaattctaacatgcccttatgagatctactaatgaaattctgtggaattaagatggctgtaaaaagcacaaacctaaaatgcagaaatgtattttattcaaatactgatgtagagagttttggcactgaaccttttagaagccttaattatttaaatcaattcagtgactgtgtcagaccttagttttaaatcttgatatgtgcgtgtcccggatcaggaatggtttcatttttcttaataatgtgtgtgtgtgtatgtgtgtgtgtgtgtgtgtgtgtttgtgtgtgtgtgtgtgtgtcctaattaagagaatttttactggctgcttgttacatttgttgagggtacaacacactcaagaataaagtaaaaggatagtcaggatccagatgtttcttttctagcatttaatgtgtgtgaactcagaacactaccatgaaagaacacttccccccaaaactggatgcagaggaagaaaaaaaaaaaagaaatggcacagttttttgtatttttttttttagttattttttgttgttgttgtttgtattgtttttcttttctgatagagtatggccacttctgggggaaaaacatgtaattaagtaaatgtatacattggttttcacgttttacttttgttttcccactaccaataattttcctctggaagaattttatagttttttctatttcattttaatgagtaacaatatgttaaatgcataattaagacaaagcaatgaaattctgactttattcaaagtactgaagattattgcttctagggcatttttaaacagcaccattgtattgttgaatgtttatgtaactgatggcttttctataatgtaatttttgaatgttcaggtgttacatttccaaagtttaacttttaaaaaaccatcttctgatcccttttattgtctgggccatacaatctatattacataggtgccaacatttaattcttttaaatggaacatttgcagttttccatattggtacctgctttttctggagaggtttgagatcttgttaacaaatcagactttacactatatacagatgtgacagataaattgaaccacttgtttgtgaaaatgagttcctgtcatcttcctcattcactcagccctcaccccagcagccttttccggtcattgtagctgacatggagcagtgacagtattcatttgagaacagggatgcaagtcacagacatcataaaatcagggtctccctgctgaagcattcactagttggcaactatgaatttattccatgtcattctgtttacttagcacttgcactacccttgttggttgagtgtatgctttatttgtttctagtttgaaatcccacatctgatagctgagagtaggcaaatacaacatttacctaatgtcattcactaacatggaagagttgtgaaaattctagagtgctgtaaatccttggcatacactatgacaaacaacttcattactctcccaccaggagctgctctcctgcacttagaaataatgtcacaagtagttttctaatgtacaatgcagacaaatgtactgctctctgaatacttgaagaaatggtattatacatacatagaaacttattagttataccttttcacaatcttattacgatgttgccgttaaaagggaaaaaagacacaggcaatgaatggtgggatagtaagaggacttagagtgtatgaatgagttgattttacttttttggaatttgattaagttgacagtaggcactgattggatgattaaacataagttaatctccactgtgataaaaacttaaataataaacatgatttaaaatag

SEQ ID NO: 287809 - DNA, 2448 bp, Artificial Sequence
  derived and/or modified sequence
gggttggttccaagtctttgctattgtgaatagtgccgcaataaacatacgtgtgcatgtgtctttatagcagcatgatttatagtcctttgggtatatacccagtaatgggatggctgggttctagatccctgaggaatcgccacattgacttgcacaatggttgaactagtttacagtcccaccaacagtgtaaaagtgttcctatttctccacatcctctccggcacctgttgtttcctgactttttaatgattgccattctaactggtgtgagatgatatctcattgtggttttgatttgcatttctctgatggccagtgatggtgagcattttttcatgtgttttttggctgcataaatgtcttcttttgagaagtgtctgttcatgattttttttttagacaaagtattagatcagatatttttggggaaaaatgctttgtgattgcttgttttgaatggtgagcattgtattttgttttaagttgttttctggttgttattacagctatgaagtcttacactccatatttcattctcctgtggagtgctgttgggatagcgaaggctgccaaaatcatcatcgtgccgccaattatgtttgaaagccatatgtacattttcaagacgctagcctcagccttgcacgagagaggccaccatacagtgttcctcctctctgaaggcagagacatcgccccatctaatcattacagcctccagcgctacccagggatctttaacagtaccacctcagatgctttcctacagtccaagatgcggaatattttctctgggagattgacagcaatcgaactgtttgacatactggatcactatactaagaactgtgacctgatggttggcaaccatgccctgatccagggtctgaagaaagaaaaatttgacctgctgctggtggaccctaatgatatgtgtggatttgtgatagctcatcttttaggggttaaatatgctgtattttcaactggcctttggtatcctgctgaagtgggtgctcctgctccattagcatacgtcccagagtttaactcactcctcacagaccgcatgaacttgctgcaaaggatgaaaaataccggtgtttacctcatttccagattaggggtcagctttctggttcttcccaaatatgaaaggataatgcagaagtacaacctgctgccagagaagtccatgtatgatttggttcatgggtccagcctgtggatgctgtgtactgacgtagcactggaattcccaagacccactctgcctaatgttgtttatgtaggaggaatcctaaccaaaccagccagcccactaccagaagatctccaaagatgggtaaatggtgctaatgaacatggctttgtcttggtgtcttttggagctggtgtcaagtatctgtcagaagacattgctaacaaactggcaggagctctggggagattgcctcaaaaagtgatttggaggttttctggacccaaaccaaagaatctaggaaacaacactaaactcatagaatggttaccacaaaatgacctgcttgggcattcaaagattaaagccttcctgagccatggtggtttgaacagtatttttgaaactatatatcatggtgtgcctgtagtgggaattccactctttggagaccattatgatactatgaccagagtacaggcaaaaggcatggggatattgctagaatggaagacagttactgaaaaagagctctatgaagcactagtgaaggttatcaataatcccagctaccgtcagagggctcagaagctttcggaaattcacaaggatcaacctggtcaccctgtcaatcgaactatctattggatagattatattattcgtcacaatggagcccatcacctacgtgccgctgtccatcagatctccttttgtcagtattttttactggatattgcctttgtgcttttgcttggtgctgccttgttatactttctcttgtcttgggtgacaaaatttatctacagaaaaatcaaaagtctgtggtctagaaataagcatagcacagttaatggacattaccacaatggaatcctcaatggcaagtacaaaagaaatggccatattaaacatgaaaagaaagtgaaatgagccaacagcccaggtgatagaaataaattggttcactcattgaatttttattgctattatttagtctaacagctactaaaagtaaaacatcagtaaacaattctaacatgcccttatgagatctactaatgaaattctgtggaattaagatggctgtaaaaagcacaaacctaaaatgcagaaatgtattttattcaaatactgatgtagagagttttggcactgaaccttttagaagccttaattatttaaatcaattcagtgactgtgtcagaccttagttttaaatcttgatatgtgcgtgtccc

SEQ ID NO: 287810 - DNA, 735 bp, Artificial Sequence
  derived and/or modified sequence
aggacacggttaaagcattgctatcaactgtgaacccagagagccctccttagccaacacgctaactccgaagcctcccttacgcccccgaaccaccgaaggcggcgacacctgattcagcgcacaaacacaggtcccttctgtcccggatacaattacgcggcagacacacactcaaactcgcgcggggcagccaagagacgagtgagagtaacacatgcgcactgtggattcctttgtgaatacataaaaggaaaagttaaaactcttataattcacactatccagagaaaaacaatactattttgctatgaagtcttacactccatatttcattctcctgtggagtgctgttgggatagcgaaggctgccaaaatcatcatcgtgccgccaattatgtttgaaagccatatgtacattttcaagacgctagcctcagccttgcacgagagaggccaccatacagtgttcctcctctctgaaggcagagacatcgccccatctaatcattacagcctccagcgctacccagggatctttaacagtaccacctcagatgctttcctacagtccaagatgcggaatattttctctgggagattgacagcaatcgaactgtttgacatactggatcactatactaagaactgtgacctgatggttggcaaccatgccctgatccagggtctgaagaaagaaaaatttgacctgctgctggtggaccctaatgatat

SEQ ID NO: 287811 - protein, 488 aa, Artificial Sequence
  derived and/or modified sequence
MSDEVFSTTLAYTKSPKVTKRTTFQDELIRAITARSARQRSSEYSDDFDSDEIVSLGDFSDTSADENSVNKKMNDFHISDDEEKNPSKLLFLKTNKSNGNITKDEPVCAIKNEEEMAPDGCEDIVVKSFSESQNKDEEFEKDKIKMKPKPRILSIKSTSSENNSLDTDDHFKPSPRPRSMLKKKSHMEEKDGLEDKETALSEELELHSAPSSLPTPNGIQLEAEKKAFSENLDPEDSCLTSLASSSLKQILGDSFSPGSEGNASGKDPNEEITENHNSLKSDENKENSFSADHVTTAVEKSKESQVTADDLEEEKAKAELIMDDDRTVDPLLSKSQSILISTSATASSKKTIEDRNIKNKKSTNNRASSASARLMTSEFLKKSSSKRRTPSTTTSSHYLGTLKVLDQKPSQKQSIEPDRADNIRAAVYQEWLEKKNVYLHEMHRIKRIESENLRIQNEQKKAAKREEALASFEAWKAMKEKEAKKIAA

SEQ ID NO: 287812 - DNA, 1467 bp, Artificial Sequence
  derived and/or modified sequence
atgagcgacgaggtgttcagcaccaccctggcctacaccaagagccccaaggtgaccaagagaaccaccttccaggacgagctgatcagagccatcaccgccagaagcgccagacagagaagcagcgagtacagcgacgacttcgacagcgacgagatcgtgagcctgggcgacttcagcgacaccagcgccgacgagaacagcgtgaacaagaagatgaacgacttccacatcagcgacgacgaggagaagaaccccagcaagctgctgttcctgaagaccaacaagagcaacggcaacatcaccaaggacgagcccgtgtgcgccatcaagaacgaggaggagatggcccccgacggctgcgaggacatcgtggtgaagagcttcagcgagagccagaacaaggacgaggagttcgagaaggacaagatcaagatgaagcccaagcccagaatcctgagcatcaagagcaccagcagcgagaacaacagcctggacaccgacgaccacttcaagcccagccccagacccagaagcatgctgaagaagaagagccacatggaggagaaggacggcctggaggacaaggagaccgccctgagcgaggagctggagctgcacagcgcccccagcagcctgcccacccccaacggcatccagctggaggccgagaagaaggccttcagcgagaacctggaccccgaggacagctgcctgaccagcctggccagcagcagcctgaagcagatcctgggcgacagcttcagccccggcagcgagggcaacgccagcggcaaggaccccaacgaggagatcaccgagaaccacaacagcctgaagagcgacgagaacaaggagaacagcttcagcgccgaccacgtgaccaccgccgtggagaagagcaaggagagccaggtgaccgccgacgacctggaggaggagaaggccaaggccgagctgatcatggacgacgacagaaccgtggaccccctgctgagcaagagccagagcatcctgatcagcaccagcgccaccgccagcagcaagaagaccatcgaggacagaaacatcaagaacaagaagagcaccaacaacagagccagcagcgccagcgccagactgatgaccagcgagttcctgaagaagagcagcagcaagagaagaacccccagcaccaccaccagcagccactacctgggcaccctgaaggtgctggaccagaagcccagccagaagcagagcatcgagcccgacagagccgacaacatcagagccgccgtgtaccaggagtggctggagaagaagaacgtgtacctgcacgagatgcacagaatcaagagaatcgagagcgagaacctgagaatccagaacgagcagaagaaggccgccaagagagaggaggccctggccagcttcgaggcctggaaggccatgaaggagaaggaggccaagaagatcgccgcctag

SEQ ID NO: 287813 - DNA, 1467 bp, Artificial Sequence
  derived and/or modified sequence
atgagcgacgaggtcttctctacaaccctggcctacactaagagcccgaaggtgacgaagagaacgacgtttcaggatgaactcattcgggccattacagcccgctcagcccgtcagcggtccagtgagtacagcgacgactttgactctgatgaaattgtgtcacttggagatttttcagatacatccgccgatgaaaactcagtcaataaaaagatgaacgatttccacatctcggacgacgaagaaaagaatcctagcaagttgctttttctcaaaaccaacaagtccaacggcaatattactaaagatgagcccgtctgtgctatcaagaacgaagaggagatggcccctgatggatgcgaggatattgtagtgaaaagcttttcagaatctcagaacaaggatgaggagttcgaaaaggacaagatcaaaatgaaacctaaaccacgaattctctctattaagtctactagcagcgagaacaatagtttggatactgatgaccattttaagcccagccctagaccccgctcaatgctgaaaaaaaaatcgcacatggaagagaaagatggtcttgaggacaaagagaccgccctttcagaggagctagagttgcacagtgccccctccagcctgccgacccccaacggcattcagctggaggccgaaaaaaaagccttttccgaaaaccttgaccccgaggacagttgcctaaccagcttggcaagctcaagtctgaagcagattctgggcgacagtttttcccccggctctgaggggaatgcctccggcaaggatccgaacgaagagatcacagaaaatcataatagcttgaagagcgatgaaaataaggagaactcattttctgccgaccatgtgaccacagctgtcgagaaatccaaagagtcccaagtaacagcggatgacctagaggaggaaaaagccaaggccgagctcatcatggacgacgaccggactgttgacccgcttctttctaaatcacagtcaatcctgatctcaacatctgcgaccgcctcctccaagaaaaccattgaggacaggaacattaaaaacaaaaaaagcacaaacaacagagcctccagcgcctccgctcggctgatgaccagcgagttccttaagaagagcagcagtaagaggcggactccatcgaccacaacatcatcccattaccttggcactcttaaagtgctggaccaaaaaccctctcagaaacaatcgatcgagcccgacagggctgataacatccgggctgctgtgtatcaggaatggctggagaaaaagaatgtttatttacatgagatgcatcgaattaaaagaatagagtccgagaatctccgcattcagaacgagcagaaaaaggcggccaagcgggaagaggcccttgcctctttcgaggcttggaaagccatgaaagaaaaggaggccaagaaaattgcggcctag

SEQ ID NO: 287814 - DNA, 1467 bp, Artificial Sequence
  derived and/or modified sequence
atgtctgatgaggtgttcagcaccaccctggcctacaccaagagccccaaggtgaccaagaggaccaccttccaggatgagctgatccgggccatcacagcccggagcgcccggcagaggagcagcgagtacagtgatgactttgacagtgatgaaattgtgtccctgggggacttcagtgacaccagcgcagatgagaacagcgtgaacaagaagatgaatgacttccacatcagtgatgatgaggagaagaaccccagcaagctgctcttcctgaagaccaacaagagcaatggaaacatcaccaaggatgagcctgtgtgtgccatcaagaatgaggaggagatggccccagatggctgtgaggacatcgtggtgaagagcttcagcgagagccagaacaaggatgaggagtttgagaaggacaagatcaagatgaagcccaagccccgcatcctgagcatcaagagcaccagcagcgagaacaacagcctggacacagatgaccacttcaagcccagcccccggcccaggtccatgctgaagaagaagagccacatggaggagaaggatggcctggaggacaaggagacagccctgtctgaggagctggagctgcacagcgcccccagcagcctgcccaccccaaatggcatccagctggaggccgagaagaaggccttcagcgagaacctggaccctgaggacagctgcctgaccagcctggccagcagcagcctgaagcagatcctgggggacagcttcagccctggcagcgagggcaatgccagcggcaaggaccccaatgaggagatcacagagaaccacaacagcctgaagagtgatgagaacaaggagaacagcttctctgctgaccacgtgaccacagctgtggagaagagcaaggagagccaggtgacagcagatgacctggaggaggagaaggccaaggccgagctgatcatggatgatgacagaacagtggaccccctgctgagcaagagccagagcatcctgatcagcaccagcgccacagccagcagcaagaagaccattgaagatagaaacatcaagaacaagaagagcaccaacaacagagccagcagcgccagcgcccggctgatgaccagcgagttcctgaagaagagcagcagcaagaggaggacccccagcaccaccaccagcagccactacctgggcaccctgaaggtgctggaccagaagcccagccagaagcagagcattgaaccagacagagctgacaacatccgggctgctgtgtaccaggagtggctggagaagaagaatgtgtacctgcacgagatgcaccgcatcaagagaattgaaagtgagaacctgcgcatccagaatgagcagaagaaggccgccaagcgggaggaggccctggccagctttgaggcctggaaggccatgaaggagaaggaggccaagaagattgctgcctag

SEQ ID NO: 287815 - DNA, 1467 bp, Artificial Sequence
  derived and/or modified sequence
atgagcgacgaggtgttcagcaccaccctggcctacaccaagagcccaaaggtcacaaaacgcaccacttttcaagatgaacttatcagagcaatcactgcccggtctgcccggcagaggtctagcgaatactccgacgactttgactccgacgaaattgtcagccttggcgattttagcgatacaagcgctgatgaaaacagtgtaaacaaaaagatgaacgatttccatatctcagacgatgaggaaaagaatcccagtaagctactgtttttgaaaactaacaaatccaacggcaacattacaaaggacgaacctgtttgcgcaattaaaaatgaagaggagatggcgcccgatgggtgcgaggatattgtcgttaaatctttttcagagtcccagaataaggacgaagagttcgagaaagacaaaatcaaaatgaagcccaagccgcgaatcctcagtatcaagtcaacaagtagtgagaataattccctagacacagacgatcacttcaaaccatccccccggcctcggtcgatgctgaaaaaaaaatcacacatggaagaaaaggacggactggaggacaaagagaccgctttgtctgaagagttggaattgcattctgcccccagctctctccccacccctaatgggatccaactggaagcagagaaaaaagcctttagtgagaaccttgatccggaagacagctgcttgacaagccttgcatccagcagcctcaaacagatcctgggagactcattctcgcccggctcagagggcaacgcttctggcaaggaccccaacgaagaaatcaccgagaaccataattccttgaaaagcgacgagaataaagagaatagcttcagtgcagaccatgtaaccacagcagtggagaagtcaaaggagtctcaggtaacagccgacgatctagaagaggagaaggcgaaagccgagttgatcatggatgacgacagaaccgtggaccctctgcttagtaagagccagagcattctcatctcgacctccgcaaccgctagctctaagaaaaccatcgaggaccgcaacattaaaaacaagaagtccacaaacaaccgggcaagcagcgcgagcgcccgccttatgacgtcggaatttttgaaaaagtctagttccaaaaggagaaccccctccacaactacttccagccattatttaggaaccttgaaggtgctcgaccagaagccttcacaaaagcagagcatagagcccgaccgcgcagacaatatccgggccgcagtataccaggaatggctcgagaagaaaaatgtctacctgcacgagatgcaccgaatcaaacggatagaatccgagaatctccgcatacagaatgagcaaaaaaaagcggcaaagagggaggaggctctagcctcctttgaggcatggaaggctatgaaagagaaggaggcgaaaaaaatagctgcatag

SEQ ID NO: 287816 - DNA, 1467 bp, Artificial Sequence
  derived and/or modified sequence
atgtccgatgaggtgttcagtactaccctggcgtacacaaagtcaccaaaggtgacaaaacgtaccaccttccaggacgagctgatacgggcaataaccgcacgcagcgctcgccagaggtcgtcagaatacagcgatgactttgattcggacgaaatcgtctctttgggtgacttttcagacacatccgctgacgagaattccgtcaataagaagatgaacgactttcatattagtgacgacgaagagaagaaccctagtaagctgctgttcctgaagacaaacaagtctaacggtaacatcactaaagacgagccggtgtgtgccatcaaaaacgaggaggaaatggcccctgatgggtgtgaggatatcgtcgtaaaaagtttctccgagtctcagaacaaagacgaggagtttgagaaagacaagatcaaaatgaaaccgaagcctagaatcttaagtatcaagtctacctcaagcgagaacaattctttggataccgacgatcatttcaaaccttcaccacgtccaagatccatgctgaagaagaagagccatatggaagaaaaggatggcctggaggataaggagactgcactgtccgaggaactagaattacattctgcaccatctagcttaccgacccctaatggcatccagctcgaagcagaaaagaaggcattctcagaaaatctggacccggaggatagttgtctaacatccctggcttcctccagtttgaagcagatccttggggattctttctctcccggaagcgaggggaatgcctcaggtaaagatccaaacgaagagatcacggaaaatcacaatagtctgaagtcagacgaaaataaggaaaactctttctccgccgaccacgtcacaacagcggttgagaagagtaaggaaagtcaggtcacggctgatgacctggaggaggagaaggctaaagccgaactcatcatggacgacgacagaaccgtcgacccgctgctaagcaagtcacaatctatacttatctcaacatctgccacagcctcgtccaagaaaactattgaggaccgaaatataaaaaacaagaagagtacgaacaacagggcatcgagcgcttccgctaggctcatgacttcggagttcctcaagaaaagttcttctaagaggcgcaccccatcaacaactacaagcagtcactacctcggaaccctcaaggttttggaccagaagccttctcaaaagcagtccatcgagcctgatcgcgcagacaatattcgggctgctgtttaccaggaatggttggagaagaagaacgtttatttacacgagatgcacaggataaagcggatcgaatctgagaacttgaggatccagaatgagcagaagaaggctgctaagcgggaagaggccttagcgtccttcgaggcctggaaggccatgaaagagaaggaagccaagaagattgcagcctag

SEQ ID NO: 287817 - DNA, 1644 bp, Artificial Sequence
  derived and/or modified sequence
tcacttcctcccgaagacgctgtttcctagcaaccgccctccgcctctgttattagcccctcctcctcgctcggtccaggaccggctctgcgggcgccgccaggcccagaccaagctactatcagaagttgaattctaataattagctattttataaaggtaacgagaaaaaatacactatgtctgatgaagtttttagcaccactttggcatatacaaagagtccaaaagttaccaaaagaactactttccaggatgagctaataagagcaattacagctcgctcagccagacaaaggagttctgaatactcagatgactttgacagtgatgagattgtttctttaggtgatttttctgacacttcagcagatgaaaattcagttaataaaaaaatgaatgactttcatatatcagatgatgaagaaaagaatccttcaaaactattgtttttgaaaaccaataaatcaaacggtaacataaccaaagatgagccagtgtgtgccatcaaaaatgaagaggaaatggcacctgatgggtgtgaagacattgttgtaaaatctttctctgaatctcaaaataaggatgaggaatttgaaaaagacaaaataaaaatgaaacctaaacccagaattctttcaattaaaagcacatcttcagaaaacaacagccttgacacagatgatcactttaaaccatcacctcggccaaggagtatgttgaaaaagaaaagtcacatggaggagaaggatggactagaagataaagaaactgccctcagtgaagaattggagttacattctgcaccttcttcccttccaacgccgaatggcatacaattagaagctgagaaaaaagcattctctgaaaaccttgatcctgaggattcatgcttaacaagtctagcatcatcatcacttaaacaaattcttggagattctttttcaccaggatctgagggaaacgcatctggaaaagatccaaatgaagaaatcactgaaaaccataattccttgaaatcagatgaaaataaagagaattcattttcagcagaccatgtgactactgcagttgagaaatccaaggaaagtcaagtgactgctgatgaccttgaagaagaaaaggcaaaagcggaactgattatggatgatgacagaacagttgatccactactatctaaatctcagagtatcttaatatctaccagtgcaacagcatcttcaaagaaaacaattgaagatagaaatataaagaataaaaagtcaacaaataatagagcatccagtgcatctgccagattaatgacctctgagtttttgaagaaatctagttctaaaaggagaactccatcgacaactacctcttctcactatttagggactttaaaagtcttggaccaaaaaccttcacagaaacagagcatagaacctgatagagcagataacataagggcagctgtttatcaggagtggttagaaaagaaaaatgtgtatttacatgaaatgcacagaataaaaagaattgaaagtgaaaacttaaggatccaaaatgaacagaaaaaagctgctaaaagagaagaagcattagcatcatttgaggcctggaaggctatgaaagaaaaggaagcaaagaaaatagctgcca

SEQ ID NO: 287818 - DNA, 560 bp, Artificial Sequence
  derived and/or modified sequence
agaccaaggtgagcagctcctacccgatgcttggctcttgattctcagggtcgcggagaactggccgcgggcgtccggggccgggaacagaaagcgggacctgggggccatgggggatccggacagagaccgcgcttggacgtgcacgggcctggcgttcgctggtgctcagcatacggcgcggtgaggagcggcgagcacccggacgtcacctggcctggtagggaacggaacccggggcgcacaacgctatgggcggccctgccaggcctctgctccgagtacgggaaaccgcgattttaatgcggctcatcgcgaaagcttcgtcgttttgtctggctctctttaacacttttgtgagaggaaaaattggcttgcaatacatctcgctggctgtttgcggctactatcagaagttgaattctaataattagctattttataaaggtaacgagaaaaaatacactatgtctgatgaagtttttagcaccactttggcatatacaaagagtccaaaagttaccaaaagaactactttccaggatgagctaataagagca

SEQ ID NO: 287819 - protein, 142 aa, Artificial Sequence
  derived and/or modified sequence
MNNQKVVAVLLQECKALLPSELRTLIQEAKEMKWPFVPEKWQYKQAVGPEDKTNLKDVIGAGLQQLLASLRASILARDCAAAAAIVFLVDRFLYGLDVSGKLLQVAKGLHKLQPATPIAPQVVIRQARISVNSGSHPAKHSM

SEQ ID NO: 287820 - DNA, 429 bp, Artificial Sequence
  derived and/or modified sequence
atgaacaatcagaaggtcgtcgcggttttgctccaagagtgcaaggcgctgcttccttccgagctgcgcacgctgatccaagaagccaaggagatgaagtggccattcgtcccagagaagtggcagtacaagcaggctgtagggccggaggataaaaccaatttgaaagacgtgatcggagccgggttgcaacagctgctagctagccttcgggcctcaattctggcaagagattgtgcagctgcagcagccatcgtgtttctggttgacaggtttctctatgggctggatgtgtcaggcaagctgcttcaggttgccaaggggctccataaattacaacctgccacccccattgctccacaggtggtgattcgacaggcacgtatatcagtaaacagcggttctcaccctgcaaagcatagcatgtag

SEQ ID NO: 287821 - DNA, 429 bp, Artificial Sequence
  derived and/or modified sequence
atgaacaaccagaaggtggtggccgtgctgctgcaggagtgcaaggccctgctgcccagcgagctgcggaccctcatccaggaggccaaggagatgaagtggccctttgtgcctgagaagtggcagtacaagcaggccgtgggccctgaggacaagaccaacctgaaggatgtgattggagctggcctgcagcagctgctggccagcctgcgggccagcatcctggcccgggactgtgccgctgctgctgccatcgtgttcctggtggaccgcttcctgtatggcctggatgtgtctgggaagctgctgcaggtggccaagggcctgcacaagctgcagcctgccacccccatcgccccccaggtggtgatccggcaggcccgcatctctgtgaacagcggcagccacccagccaagcacagcatgtag

SEQ ID NO: 287822 - DNA, 1336 bp, Artificial Sequence
  derived and/or modified sequence
tttatgagaaacagtgtgtttcagagaggctgtaccagaattaactctgctcagagttagatttgctggtcttaaagtacttttcctctttaagataaaagaagttcttctaaatcaggaatggattgaaatctaatgaaccgaaactttgggtacttcggccttcaaggggctcctttattgagaatcaatgtcttctcctaggtaattgatcaccctagacccagggacacccaattcatcgtaatcatcatgaataatcaaaaagtggtagctgtgctactgcaagagtgcaaagctttactccccagcgagttaaggaccctgatccaggaggcaaaggaaatgaagtggcccttcgtgcctgaaaagtggcagtacaaacaagccgtgggcccagaggacaaaacaaacctgaaggatgtgattggcgccgggttgcagcagttactggcgtccctgagggcctccatcctcgctcgggactgtgcggctgcggcggctattgtgttcttggtggaccggttcctgtatgggctcgacgtctctggaaaacttctgcaggtcgccaaaggtctccacaagttgcagccagccacgccaattgccccgcaggtggttattcgccaagcccgaatctccgtgaactcaggatcccatccagccaaacactcaatgtagtgggatgtcagaagcaagagaagacccacaaggccaggcactatggctcatgcctgtaatcccagcactttgggaggccgaagcgggtggatcacctgaagtcaggagttcgagaccagcctggacaacatgatgaaaccccatctctactgaaaactacaaaaattagccaggcgtggtggcagccgcctgtaatcccagctacttaggaggctgaggcaggagaatcacttgaactccggaggtggaagttgcagtgaggtgagatcaaatgcaaaactatactctagagaagtatccacacccagggccatgggaatctcacaggaaaatattcttggctaaagatgaccttacattaaaattataagcaacaggctgggcagcggctcacgcctgtaaacccagcattttgggaggccaaggcgggtggattacctgaagtcaggagttcgagaccagcctggctaacatggtgaaaccccatctctattaaaaatacaaaaaattagcctggtgtggtggcaggcgcacgaaatcccagctacttgggaggctgaggcgggagaattgcttgaacccagaaggcagaggttgcagtgagctgagatcatgccattgcactccagcctgggttacagtgagactctgtctc

SEQ ID NO: 287823 - DNA, 429 bp, Artificial Sequence
  derived and/or modified sequence
atgaacaaccagaaggtggtggccgtgctgctgcaggagtgcaaggcactgctccctagtgagctgcgtacgttgattcaggaggcgaaggagatgaaatggccatttgtacccgagaaatggcagtacaagcaagccgtcggtcccgaggacaagactaacctgaaagatgttataggagctgggcttcagcagctgctcgccagtttaagagcctctatcctcgctcgagactgcgcagctgcagcggcaattgtgtttttggttgatagattcctgtacgggttagacgtttccggaaagcttttacaggttgctaaaggattacataagttgcagccagcgacacctattgccccccaggtggtgattagacaggccagaattagcgtgaattcaggcagccaccctgcaaaacacagcatgtag

SEQ ID NO: 287824 - DNA, 429 bp, Artificial Sequence
  derived and/or modified sequence
atgaataaccagaaagtcgtggccgtgctgctacaggagtgcaaggcccttttgccctcggagctccggaccctgattcaggaagctaaggagatgaaatggccttttgtgccagaaaagtggcagtacaagcaggcagttggcccagaggataagacaaacctgaaggatgttatcggggctgggctccagcagctgctggcctccctgcgcgcatccatcctcgctcgagattgcgcggctgccgcagcaatcgtcttcctagttgaccggttcctctatggcctggatgtgtcgggaaagctgttgcaagtcgctaagggactgcacaaactccagccagccacaccaattgccccacaggtggtcatacgacaagccaggatctctgtgaatagtggctcacatccggctaagcattccatgtag

SEQ ID NO: 287825 - DNA, 429 bp, Artificial Sequence
  derived and/or modified sequence
atgaacaaccagaaggtggtggccgtgctgctgcaggagtgcaaggccctgctgcccagcgagctgagaaccctgatccaggaggccaaggagatgaagtggcccttcgtgcccgagaagtggcagtacaagcaggccgtgggccccgaggacaagaccaacctgaaggacgtgatcggcgccggcctgcagcagctgctggccagcctgagagccagcatcctggccagagactgcgccgccgccgccgccatcgtgttcctggtggacagattcctgtacggcctggacgtgagcggcaagctgctgcaggtggccaagggcctgcacaagctgcagcccgccacccccatcgccccccaggtggtgatcagacaggccagaatcagcgtgaacagcggcagccaccccgccaagcacagcatgtag

SEQ ID NO: 287826 - protein, 182 aa, Artificial Sequence
  derived and/or modified sequence
  misc_feature (1)..(1): Xaa can be any naturally occurring amino acid
XRKLKGAILTTMLATRNFSAAKSLLKKPDGVKESTESSNTTIEDEDVKARKQEIIKVTEQLIEAINNGDFEAYTKICDPGLTAFEPEALGNLVEGMDFHRFYFENALSKSNKPIHTIILNPHVHLVGDDAACIAYIRLTQYMDGSGMPKTMQSEETRVWHRRDGKWQNVHFHRSGSPTVPIK

SEQ ID NO: 287827 - protein, 474 aa, Artificial Sequence
  derived and/or modified sequence
MTTLPPLPMTRPKLTALARQKLPCSSRKIPRSQLIKEKDDIDHYLEVNFKGLSKEEVAAYRNSYKKNICVDMLRDGYHKSFTELFALMERWDALREAARVRSLFWLQKPLEEQPDKLDYLYHYLTRAEDAERKESFEDVHNNLYALACYFNNSEDKWVRNHFYERCFKIAQLIKIDCGKKEAEAHMHMGLLYEEDGQLLEAAEHYEAFHQLTQGRIWKDETGRSLNLLACESLLRTYRLLSDKMLENKEYKQAIKILIKASEIAKEGSDKKMEAEASYYLGLAHLAAEEYETALTVLDTYCKISTDLDDDLSLGRGYEAIAKVLQSQGEMTEAIKYLKKFVKIARNNFQSLDLVRASTMLGDIYNEKGYYNKASECFQQAFDTTVELMSMPLMDETKVHYGIAKAHQMMLTVNNYIESADLTSLNYLLSWKESRGNIEPDPVTEFRGSTVEAVSQNSERLEELSRFPGDQKNET

SEQ ID NO: 287828 - DNA, 1777 bp, Artificial Sequence
  derived and/or modified sequence
ctctgtttccgtggagacgctctcggcgtcccctgtctccgctccggcggagccaggcttcggaatcactgagagaggagggggcagcgccaacgcccagcacctgccgccggtgggggactgacttcggcggaacggaaaactggagttgtttccctgggccagtgcaccgaggctgaagtctataagcctggagagaccatcagcagtaatctgcaaattccgaaatgaccaccctgcccccactgcccatgacacgcccgaagcttacagccttagccagacagaagctgccttgctcctccagaaaaattccaaggtctcaattgatcaaagaaaaagatgacatagatcattatctagaggtaaatttcaaaggattatcaaaagaggaagttgctgcttataggaactcctacaagaagaatatctgtgtggacatgctgcgagatggttatcataagtccttcaccgagctcttcgctctgatggagcggtgggatgccctgagggaggctgcgagagtcaggtccctcttctggctgcagaagcccctggaggagcagcctgataaactggattacctgtaccattacctgaccagggctgaggacgctgagaggaaagaatccttcgaagatgtacataataacttgtatgctctggcctgttacttcaataattctgaagacaagtgggtaaggaaccacttctatgaacgatgttttaagattgctcagctgatcaaaattgactgtgggaagaaagaagccgaggcacacatgcatatgggtcttctctacgaggaagatggtcagcttctggaagctgctgagcattatgaagcattccatcaattgacacaggggcggatatggaaggatgagacaggccgctctctcaacttgttggcctgtgagagtctcctgaggacttacagattactctcagacaaaatgctagaaaataaagaatacaaacaggccatcaaaattctaataaaagcttctgaaatagccaaagaaggaagtgacaaaaagatggaagcggaagcctcttactacttgggcttagcacacttagctgctgaggaatatgaaacagcattaacagtccttgacacttactgtaaaatctccacagacctggatgatgatctcagtctggggagaggctatgaagccatagccaaggtcctgcagagccaaggagagatgacagaagcaattaaatacttgaaaaaatttgtgaaaattgcaagaaacaattttcaaagcctagatttggtgagagcaagtacaatgcttggggacatctacaatgaaaaaggatactacaacaaagcttctgaatgctttcagcaagcttttgacacaacagtagagctaatgagcatgcctctgatggatgagacaaaagttcactatggaatagcaaaagctcatcagatgatgcttacagtgaacaactatatagagtctgcagatctcaccagcctcaactacctgctgtcatggaaggagagcagaggtaacattgaacctgatccagttactgagtttagaggatccacagtggaagctgtatctcaaaactcagaacgtttggaagaactcagtaggtttccaggtgatcaaaaaaatgaaacttaaagcagcttttcacttaacatcaaagcaagaagaaatccatcatgtcaccttagacttcaatacttgtaataggagcatgttacagataatatagagttataataaaacggactatgactcttttc

SEQ ID NO: 287829 - protein, 93 aa, Artificial Sequence
  derived and/or modified sequence
MIPMFTVTLEDSGTLWKSLHSSSESEMTTLPPLPMTRPKLTALARQKLPCSSRKIPRSQLIKEKDDIDHYLEVNFKGLSKEEVAAYRNSYKKN

SEQ ID NO: 287830 - protein, 3680 aa, Artificial Sequence
  derived and/or modified sequence
MDQRKNESIVPSITQLEDFLTEHNSNVVWLLVATILSCGWIIYLTYYNSRNVGLILTLVLNRLYKHGYIHIGSFSFSVLSGKVMVREIYYITEDMSIRIQDGFIIFRWWKMYNPKQKQHDPKAETRLYITVNDFEFHVYNRSDLYGRLQELFGLEPTIIPPKKDDDKTREIGRTRTQSKIERVKVKTESQDPTSSWRSLIPVIKVNVSTGRLAFGNHYQPQTLCINFDDAFLTYTTKPPSSHLDQFMHIVKGKLENVRVMLVPSPRYVGLQNDEPPRLMGEGFVVMQSNDVDIYYYMDEPGLVPEETEENIEGEMSSEDCKLQDLPPCWGLDIVCGKGTDFNYGPWADRQRDCLWKFFFPPDYQVLKVSEIAQPGRPRQILAFELRMNIIADATIDLLFTKNRETNAVHVNVGAGSYLEINIPMTVEENGYTPAIKGQLLHVDATTSMQYRTLLEAEMLAFHINASYPRIWNMPQTWQCELEVYKATYHFIFAQKNFFTDLIQDWSSDSPPDIFSFVPYTWNFKIMFHQFEMIWAANQHNWIDCSTKQQENVYLAACGETLNIDFSLPFTDFVPATCNTKFSLRGEDVDLHLFLPDCHPSKYSLFMLVKNCHPNKMIHDTGIPAECQSGQKTVKPKWRNVTQEKSGWVECWTVPSVMLTIDYTWHPIYPQKADEQLKQSLSEMEETMLSVLRPSQKTSDRVVSSPSTSSRPPIDPSELPPDKLHVEMELSPDSQITLYGPLLNAFLCIKENYFGEDDMYMDFEEVISSPVLSLSTSSSSGWTAVGMENDKKENEGSAKSIHPLALRPWDITVLVNLYKVHGRLPVHGTTDGPECPTAFLERLCFEMKKGFRETMLQLILSPLNVFVSDNYQQRPPVDEVLREGHINLSGLQLRAHAMFSAEGLPLGSDSLEYAWLIDVQAGSLTAKVTAPQLACLLEWGQTFVFHVVCREYELERPKSVIICQHGIDRRFCESKLSCIPGPCPTSDDLKYTMIRLAVDGADIYIVEHGCATNIKMGAIRVANCNLHNQSVGEGISAAIQDFQVRQYIEQLNNCRIGLQPAVLRRAYWLEAGSANLGLITVDIALAADHHSKHEAQRHFLETHDARTKRLWFLWPDDILKNKRCRNKCGCLGGCRFFGGTVTGLDFFKLEELTPSSSSAFSSTSAESDMYYGQSLLQPGEWIITKEIPKIIDGNVNGMKRKEWENKSVGIEVERKTQHLSLQVPLRSHSSSSSSEENSSSSAAQPLLAGEKESPSSVADDHLVQKEFLHGTKRDDGQASIPTEISGNSPVSPNTQDKSVGQSPLRSPLKRQASVCSTRLGSTKSLTAAFYGDKQPVTVGVQFSSDVSRSDENVLDSPKQRRSFGSFPYTPSADSNSFHQYRSMDSSMSMADSEAYFSAAEEFEPISSDEGPGTYPGRKKKKKQTQQIDYSRGSIYHSVEGPLTGHGESIQDSRTLPFKTHPSQASFVSALGGEDDVIEHLYIVEGEKTVESEQITPQQPVMNCYQTYLTQFQVINWSVKHPTNKRTSKSSLHRPLDLDTPTSEESSSSFEQLSVPTFKVIKQGLTANSLLDRGMQLSGSTSNTPYTPLEKKLADNTDDETLTEEWTLDQPVSQTRTTAIVEVKGTVDIVLTPLVAEALDRYIEAMVHCASTRHPAAIVDDLHAKVLREAVQNSKTTFSENLSSKQDIRGTKTEQSTIGTTNQGQAQTNLTMKQDNVTIKGLQTNVSIPKVNLCLLQASVEESPTTAPSRSVTHVSLVALCFDRIATQVRMNRGVVEETSNNAEPGRTSNFDRYVHATKMQPQSSGSLRSNAGAEKGKEIAAKLNIHRVHGQLRGLDTTDIGTCAITAIPFEKSKVLFTLEELDEFTFVDETDQQAVPDVTRIGPSQEKWGWIMFECGLENLTIKGGRQSGAVLYNSFGIMGKASDTERGGVLTSNNSSDSPTGSGYNTDVSDDNLPCDRTSPSSDLNGNSVSDEQDEGVESDDLKKDLPLMPPPPDSCSMKLTIKEIWFSFAAPTNVRSHTHAFSRQLNLLSTATPAVGAWLVPIDQLKSSLNKLETEGTLRICAVMGCIMTEALENKSVHFPLRSKYNRLTKVARFLQENPSCLLCNILHHYLHQANYSIIDDATMSDGLPALVTLKKGLVALARQWMKFIVVTPAFKGVSLHRPAQPLKPQIAMDHEHEDGLGLDNGGGLQSDTSADGAEFEFDAATVSEHTMLLEGTANRPPPGSSGPVTGAEIMRKLSKTHTHSDSALKIKGIHPYHSLSYTSGDTATDSPVHVGRAGMPVKDSPRKESLLSYLTGSFPSLHNLLEGTPQRSSAAVKSSSLTRTGNTVATDMLSEHPLLSEPSSVSFYNWMSNAVGNRGSVLQESPVTKSGHNSLPTGVAPNLPTIPSASDFNTVLSSDQNTLDGTHSQHSTSQDDVAGVEEANQGFPAVQLADAQVVFKPLLSHTGIQSQDTMPFCYRMYFGEHLSFSGTLDCLRADIVDSDTAKERKGKRARRQGHVNLPPLEFKPALMLGTFSISAVVMEKSVCTPQNSTSALSFHDLSKRYYNTFHCNFTISCQSISQHVDMALVRLIHQFSTMIDDIKATQTDIKLSRYTAGSASPTPTFKTRKHRDFRSSDFSRSSRGSLNGGNRVNNAKNKRTNNENNKKESRNKNSLGRSERRTSKVSRKGSKDVVDHMTIHMDDSDSITVSEQSEPSAECWQNMYKLLNFYSLISDPTGILEKSSETFGPAGVRSPTEPTCKVVFENEQDNSSLTKTQRKRSLVTSEPQHVTLIVFGIGMVNRTHLEADIGGLTMESELKRIHGSFTLKEKMKDVLHQKMTETCATAHIGGVNIVLLEGITPNIQLEDFPTSPTSTAKQEFLTVVKCSIAKSQALYSAQRGLKTNNAAVFKVGAISINIPQHPATLHSMMVRSSHQLSKQISDLIRQPSTAPQPVKEDIATPLPSEKTPTSVNQTPVETNEFPQLPEGLEKKPIVLKFSAMLDGIAIGAALLPSLKAEYKMGRMRSHGMTGAQTRFTFELPNHRLRFTSKVSATDMSTIPPSASLNLPPVTMSGKYIMEEHDSYSDQVWSIDELPSKQGYYLQGNYLRCVAEVGSFEHNLTTDLLNHLVFVQKVFMKEVNEVIQKVSGGEQPIPLWNEHDGTADGDKPKILLYSLNLQFKGIQVTATTPSMRAVRFETGLIELELSNRLQTKASPGSSSYLKLFGKCQVDLNLALGQIVKHQVYEEAGSDFHQVAYFKTRIGLRNALREEISGSSDREAVLITLNRPIVYAQPVAFDRAVLFWLNYKAAYDNWNEQRMALHKDIHMATKEVVDMLPGIQQTSAQAFGTLFLQLTVNDLGICLPITNTAQSNHTGDLDTGSALVLTIESTLITACSSESLVSKGHFKNFCIRFADGFETSWDDWKPEIHGDLVMNACVVPDGTYEVCSRTTGQAAAESSSAGTWTLNVLWKMCGIDVHMDPNIGKRLNALGNTLTTLTGEEDIDDIADLNSVNIADLSDEDEVDTMSPTIHTEATDYRRQAASASQPGELRGRKIMKRIVDIRELNEQAKVIDDLKKLGASEGTINQEIQRYQQLESVAVNDIRRDVRKKLRRSSMRAASLKDKWGLSYKPSYSRSKSISASGRPPLKRMERASSRVGETEELPEIRVDAASPGPRVTFNIQDTIAEIRRKKISFKVVF

SEQ ID NO: 287831 - DNA, 11043 bp, Artificial Sequence
  derived and/or modified sequence
atggaccagcgaaagaatgagtccattgtaccgtctattactcaactcgaagacttccttaccgagcacaattctaacgtggtgtggctcctagtggcgacgatcctatcctgcggttggattatttacttgacatactacaattcacggaatgtcggcctgattttgacactcgttctcaacagactctataagcatggctacatccatataggatcattttcattctccgtcctgagcggaaaagtcatggtaagggaaatttactacattactgaggacatgtctataaggatccaggacgggtttattatcttcagatggtggaaaatgtataaccccaagcagaagcagcacgatccgaaagccgaaacccgcctgtacattactgtcaatgactttgaattccacgtttacaacagatcagatctgtacgggcggttgcaggagttattcgggcttgagcctaccatcattccacctaagaaagatgatgacaagacccgtgaaatcgggcgcacacgcactcagagtaaaatagaacgggtcaaggtcaaaactgaatcacaggatcccacctctagctggaggtccttaatcccggtcattaaggtgaacgtgtcaacaggaagactggcctttggcaatcattaccagccacagaccctgtgtatcaacttcgacgatgcatttctgacttacaccacgaagccaccatctagtcaccttgatcagttcatgcatatcgtgaaaggcaagctggaaaatgtcagagtgatgctcgtgccttcgcccagatacgtgggccttcagaacgatgaacctccaagattaatgggggaggggtttgtcgtgatgcagagtaacgacgtagacatctactactacatggacgagcccgggctggttcccgaagaaacagaagagaacattgaaggggaaatgtcctccgaggattgcaagcttcaggacctgccaccttgctggggactggatattgtgtgtgggaagggaacagatttcaattacggaccctgggctgataggcaacgcgactgcctgtggaagttctttttcccaccagattaccaggtcctcaaggtgtcagaaatcgcccagcctggacggccacggcaaatcctggccttcgagttacgtatgaatatcatagccgacgcaactatcgatctgctgttcactaagaatcgagagactaacgccgtgcacgttaacgtgggagccgggtcctatctggagataaatatccctatgaccgtagaagaaaatgggtatactccggcgataaaaggccagctgctgcacgtggatgctacgacctccatgcagtatcggacactactggaggccgagatgctcgcattccacatcaatgcctcctaccctcggatttggaacatgccccagacatggcagtgcgaacttgaagtctataaagccacttatcatttcatttttgcacagaagaattttttcacggatctgattcaagattggtccagcgatagtccaccagacattttctcgttcgtaccctacacctggaactttaagattatgttccaccagttcgagatgatttgggcagccaaccagcacaactggatagactgctcaaccaaacagcaggaaaacgtgtacctagctgcatgcggggaaacactcaacatcgatttcagtctgccttttaccgatttcgtacccgccacctgtaataccaagtttagtcttaggggcgaggacgttgacttacacctgttcctacctgactgtcatccaagtaaatattcattgttcatgctcgtcaagaattgtcatcccaataagatgatccatgatacaggcatccctgccgaatgccagtcagggcagaaaaccgtgaagcctaagtggagaaatgtcacccaggagaaaagcggctgggtggaatgttggacggtgccctccgttatgttaactatagattacacttggcatcctatttacccacagaaggcggacgaacagcttaagcagtccctgagcgaaatggaagaaaccatgctgtccgtgctccgacccagtcagaagacatccgacagggtggtgagctccccttccaccagttcccgacctcccatcgacccctctgaactgccccccgataagctgcatgtagaaatggagctgagccccgactctcaaattacactgtacggaccattgctcaatgccttcctgtgcattaaagaaaattactttggagaggacgacatgtacatggactttgaagaggtcataagcagcccggtcctgtctctgagcacctcttctagctccggatggactgccgtcgggatggagaatgataagaaagaaaatgagggctcggcaaagtctatccacccactagccttgcgaccctgggatattacagtgcttgttaatctctacaaagtgcatggcaggctgcctgtgcatgggacgaccgacggcccggaatgccctactgccttcttggaacggttgtgtttcgagatgaagaaaggcttcagagagacaatgctgcaactgattctgtccccacttaacgttttcgtgagtgacaactaccaacagcgcccacccgtggatgaagtgcttcgcgagggtcatataaacttgtctggtttgcagctgcgtgcccacgctatgttctctgcggagggcctcccactcgggtccgattctttggaatacgcttggttaatagacgttcaggccggttccctgacagcgaaggtcaccgctccacagctggcatgcctactcgagtggggtcagactttcgtgttccacgtggtctgtagagagtatgaactggaaagacccaaaagcgtgattatatgccagcacgggatagatcgccgcttctgcgaatcaaagctttcatgtataccagggccctgtccgacatcggacgacttaaagtacacaatgatccgtctggctgtggacggagccgatatatatattgtagagcacggctgcgcaaccaatatcaaaatgggggctataagggtggccaattgtaatttacataaccagtctgtgggtgaaggcatctctgcagctattcaggattttcaagtgcgtcagtacatcgaacagctgaataattgccgcattgggttgcagcctgctgtgctccggagggcttattggctcgaggcggggagcgctaatctgggcttaatcacagtggatatagcccttgcggctgaccaccacagtaaacatgaggcccagagacactttctggaaacccatgacgcgcgaaccaagcggttatggttcctgtggcccgacgacatacttaaaaacaaacgctgtagaaacaagtgcggatgtttaggcggctgcagattctttggaggaaccgttaccggtttggacttctttaagcttgaagagctcacaccatcttcatctagtgctttttcatctaccagtgccgaatctgatatgtactacgggcagtctttgctccagcccggtgaatggatcatcacgaaagagatacccaaaatcatcgacggtaacgtgaacggaatgaagaggaaagagtgggagaataagtccgtcggcatcgaggtggaaaggaagacacagcacttatccctccaagttcccctcaggtcacatagttcctcgagcagcagcgaagagaattcatcgtcatcagcagctcagccattgttggctggggagaaggaatcaccctcctccgtggcggatgaccacctcgttcaaaaggagtttctccacggcacgaaacgtgacgacggtcaggccagcatccctaccgaaataagcggcaattcccctgtatcgccaaatacacaagataagtctgtggggcagtccccactgcgcagccctcttaaacgccaggcttccgtatgttctactcggctcggctcaaccaagagccttactgcagcattctacggggacaaacaacccgtaactgttggagtgcagttcagttctgacgtgtccagatccgatgaaaacgtattggactcccctaagcagcggagatccttcggaagtttcccatatacgccttctgctgactctaatagctttcaccagtaccgaagtatggattcctccatgtccatggctgattcggaggcatatttcagtgctgctgaggaattcgaacctataagctcagacgagggccctggcacctatcccggacgaaagaaaaagaaaaaacagacccagcaaattgattattcccgaggcagcatataccactctgtcgagggcccactcacaggtcacggtgagtctattcaggatagccgcaccctcccattcaagacccacccctctcaagcctccttcgtgtccgccttggggggtgaggacgatgtgatagaacacctgtacatcgtggagggtgaaaaaaccgtcgagagtgagcagataacccctcagcaaccggtgatgaactgttaccagacttacctgacgcaatttcaggttattaattggagtgttaagcaccccacgaataagaggacttctaagagctccctgcatagaccccttgacctggatacccctacctctgaagaaagctcttcgagctttgagcagctgtcagtgcctaccttcaaagtgatcaagcaagggctgactgccaacagtctgctggataggggaatgcagctgtcaggatcaactagcaataccccatatacccccctggaaaagaagctggccgacaacacagacgatgagacattaaccgaggaatggaccctggaccagcctgtaagtcagacacgcacaaccgccatcgttgaggtgaagggtaccgtggacatcgtactcactcccctggtggctgaagccctggacagatatatcgaagcaatggtgcactgtgcttccacccgacatccggccgctattgtagatgatctgcatgccaaagttctgcgcgaggccgttcagaattccaagactacctttagcgaaaatctaagtagcaagcaagatattcggggtacaaaaactgaacagagcacaattggaactaccaaccagggtcaggcccaaacgaatctgacaatgaagcaggataatgttactattaagggccttcagacaaatgtgtctatccctaaagtcaacctgtgtctgctgcaggcttccgtggaggagtctcccactactgccccgagtcgcagtgtcacccacgtaagcctagtggccctgtgctttgataggatcgccacccaagtgcgcatgaatcggggggttgttgaagagacatctaataacgccgagccaggcaggacgagcaacttcgataggtatgtgcatgccactaagatgcagccccagtcaagtggatctctgagatctaacgctggcgcagagaagggtaaagagattgcagccaagctgaatattcaccgtgtgcacggccaactgcgcggtttagatacaaccgacatcggaacttgtgctatcaccgcaataccttttgaaaaatccaaggtcctgttcacgcttgaggagctggacgaatttacttttgtcgatgaaactgaccagcaggccgtacccgacgtcacgagaatcggcccctcgcaggaaaaatgggggtggatcatgtttgaatgtggcctggaaaaccttacaataaagggcgggcggcagagcggggcggtgctgtacaacagcttcggcattatgggtaaggcgtccgatactgaaagaggtggagtcctcaccagcaataatagtagtgacagcccaacggggtctggatacaataccgatgtctccgatgataacttaccctgtgaccggacctctccttctagcgacctgaatggaaactctgtctctgatgaacaggatgaaggggtcgagagcgacgacctcaagaaagacctaccacttatgcccccccctccagacagttgctctatgaaattaacgattaaggaaatttggttttcgttcgctgcccccacgaatgtacgtagccatacccacgcctttagtaggcagttaaaccttctctcgacggcgaccccagccgtgggcgcctggcttgtgcccatagaccaacttaagtcgagtctcaacaaactggagaccgagggcactctgcgtatctgcgcagtgatgggctgcattatgactgaagctctggaaaataagagcgttcatttccctctgcggtcaaaatacaacaggctgacaaaagtggcccggttcttgcaagagaatccatcctgtctcttgtgtaatatcctccaccattacttgcatcaggcaaattacagcatcattgacgacgctactatgtcagacggcctgcccgctctcgtgaccctgaagaagggactggtggcccttgctcggcaatggatgaaatttattgtggtgacgcctgcctttaaaggcgtctcccttcatcgacccgcccagcctctcaagccccaaattgccatggatcatgaacacgaggacggactcgggctcgacaacgggggcgggcttcagtctgacacttcagcggatggggccgagttcgagtttgacgcggcaactgtttctgaacacaccatgctcctggaaggaacagccaacagaccccccccgggctccagcggacccgtgactggcgcagaaatcatgcggaagctgtccaagacacatacacactcagatagtgcccttaaaatcaaaggaatccacccataccatagcttgtcctacacaagtggtgatactgcaaccgattctcccgtgcacgtgggccgtgccgggatgccagtcaaggacagcccccgaaaagagtcccttctctcgtatctgaccggatccttcccaagccttcataatctgttggaagggactccccaaagaagttcagccgccgtcaagtcctcgtcactgaccaggacaggcaacacagttgctaccgatatgctctctgagcatccacttttgagtgagcccagcagtgtcagtttttacaattggatgtccaatgctgtgggaaaccgcggtagcgtcctgcaggagtccccggtgacaaagtccggacataactctttgcccaccggcgtggcgcccaacctgcccaccatcccgtccgcctcggatttcaacaccgtcctgtcttctgaccagaatacactcgatggtactcacagccaacatagtacctcacaggacgatgtcgccggggtggaggaggcgaaccaagggttccccgccgtgcaactggccgacgctcaggtagtctttaaaccacttctgtcacatactgggatccagagtcaagacaccatgccattctgctatcggatgtatttcggcgagcacttaagtttttccggcacgcttgactgccttcgagcagatatcgtcgactccgatacagcaaaggagagaaaaggcaagcgggcaagacgccaggggcatgtaaatctgcctccgttagagtttaagcccgcactcatgctcgggaccttctcgatctccgcggtggtgatggagaaaagcgtgtgcactccccagaactctactagcgccctctcctttcatgacctcagtaaacgttattacaatactttccattgtaatttcactatatcgtgtcagtctatatcccagcacgtcgacatggcactggttagactgatccaccagttcagtaccatgatcgacgatatcaaagctacacaaacagacatcaagctctctagatataccgcgggcagcgctagccctactccgacattcaaaacaagaaagcatcgcgacttcaggtcttccgacttctcgcgctcctctcgggggtccctgaacggaggcaacagagtcaacaatgccaaaaacaaacgcaccaacaacgagaacaataagaaggaatccaggaacaaaaattctctcgggcgttcagaacgcagaacatccaaagtctcgagaaaagggagcaaagacgtggtcgaccatatgaccatacacatggacgattctgattcaataacggtaagcgaacagtccgagccaagtgccgagtgctggcaaaatatgtacaagctactgaacttttactcactgatctctgaccccactggcattctggaaaagagctccgaaacctttggtcctgcaggcgttaggagccctacggagcctacctgtaaagtggtcttcgaaaacgagcaggacaactccagtctgacaaagacacagaggaagcggtccctggtcacctcagaacctcagcacgtgacactgattgtcttcggaatcggaatggtgaaccgaacacacctggaggcggacatcggcggcttgacgatggagagtgagttgaagagaattcacggctcctttaccctgaaggaaaagatgaaagacgtgctgcatcagaagatgacagagacgtgcgcaactgcgcatattggcggcgtaaatattgttctccttgaaggcatcacacccaacatccagctcgaggacttcccaacgtcgcctacctctacagccaaacaagagtttttgactgttgtgaagtgttccatcgcaaaaagtcaggcactgtacagcgcgcagagaggtcttaagacaaataacgccgccgtgttcaaggtcggcgccatatccatcaacattccgcagcacccggccacgctgcattctatgatggtcagaagttcccaccagttaagtaaacagatctctgacctgattagacagccctccaccgctccccagccagtcaaagaagacatcgcaacccctctgccttccgagaagacacccacgagcgtaaaccagacaccagtggagacaaacgagtttccccagttaccagaaggactagagaagaagccaattgttctgaagttttcagcaatgcttgacggcattgccatcggtgccgcattgctgccaagcctaaaggcagaatacaagatgggccggatgcgctcacatgggatgaccggcgcccagacaaggttcactttcgagctgcctaatcacagactacggtttacttcaaaagtttcagctaccgatatgtcgactataccaccaagtgcaagtctcaatctgcccccagttacgatgtctggtaagtacattatggaagagcacgatagttactcagaccaggtgtggtccatcgatgagctgccgagcaaacagggttactacctgcagggcaattacttacggtgcgtggcagaggtgggcagctttgaacacaacctcacaactgacctgctaaatcatctggtattcgtgcaaaaggtgttcatgaaagaggtgaatgaggtgattcagaaggtttctggcggagaacaacctatcccgctctggaatgagcacgatggcaccgcagacggcgataagccgaaaattctgctgtattcacttaacctccagttcaaagggatccaggtgaccgccaccactccttcaatgcgagctgttaggttcgaaaccggactcattgaactcgagctgagtaaccgtctgcagaccaaggcgtcgccaggtagtagtagctatctaaagctgttcggtaaatgccaggtcgatttaaatttggctttgggccagatagttaagcaccaggtgtacgaggaggctggatctgacttccaccaggtcgcttactttaagactcgaatagggctgaggaacgccctgagagaagaaatttctgggtcttcagatcgggaagcggtgctgatcaccctaaaccgtccaatagtgtacgcacagccagttgccttcgaccgggcagtgctcttctggctgaattataaggctgcctacgacaactggaacgagcagaggatggcactgcataaggacatacatatggcaactaaggaggtggtcgatatgctcccgggcattcagcagaccagcgcacaggcctttggaactctattcctgcagctcactgtgaatgacctgggaatttgcctgccaatcactaataccgcccaatcaaaccataccggagatctagatacagggagcgctttggtccttactatagaatccacactcattacagcctgctctagtgagtccctggtaagcaagggtcacttcaaaaatttttgtatcaggttcgcagacggcttcgagaccagctgggacgattggaaaccagagatccacggcgatcttgttatgaatgcgtgcgttgtgcctgacggtacatatgaggtgtgcagccgtacgactggccaagcggcagcggaaagcagctccgcaggcacctggacgctgaatgtattatggaaaatgtgtgggatcgacgttcatatggatcctaatatcggaaagcgactgaacgccctagggaacaccctcaccactctgaccggtgaggaagacatcgacgacattgccgatctgaacagcgttaatattgccgatctgtccgatgaggacgaggttgatacgatgtcacctaccattcatacggaggctacggactacaggcgacaggctgcctccgccagccaaccaggggaactgaggggaagaaagatcatgaagcgcattgtggacattagggagctaaacgagcaggcaaaggtgattgatgacttaaaaaagttaggagcatccgaggggaccatcaaccaagagatacagcgctaccaacagctggagtctgtggctgtcaatgacatccggagggatgtccgcaagaaactgagaagatcttccatgagggccgcctccttaaaggacaaatggggcctatcatacaagccttcttactcacgctctaaatctatctccgcctcgggccggccaccactgaaaagaatggagcgcgcctccagccgggtcggcgagactgaggaacttccagagattcgcgtcgacgccgcctccccgggaccccgagtaactttcaatattcaggatacaatcgctgagatacgacggaaaaagatctcgttcaaagtggtattctag

SEQ ID NO: 287832 - DNA, 11043 bp, Artificial Sequence
  derived and/or modified sequence
atggaccagaggaagaatgaaagcatcgtgcccagcatcacccagctggaggacttcctgacagagcacaacagcaatgtggtgtggctgctggtggccaccatcctgagctgtggctggatcatctacctgacctactacaacagcagaaatgtgggcctcatcctgaccctggtgctgaacagactctacaagcacggctacatccacatcggcagcttctccttctctgtgctgagcggcaaggtgatggtgcgggagatctactacatcacagaggacatgagcatccgcatccaggacggcttcatcatcttccgctggtggaagatgtacaaccccaagcagaagcagcacgaccccaaggccgagacccggctgtacatcaccgtgaatgactttgagttccacgtgtacaacagaagtgacctgtatggccgcctgcaggagctgtttggcctggagcccaccatcatcccccccaagaaggatgatgacaagacccgggagattggaagaaccaggacccagagcaagattgaaagagtgaaggtgaagacagagagccaggaccccaccagctcctggaggagcctcatccctgtgatcaaggtgaatgtgtccacaggccgcctggccttcggcaaccactaccagccccagaccctgtgcatcaactttgatgatgccttcctgacctacaccaccaagccacccagcagccacctggaccagttcatgcacatcgtgaagggcaagctggagaatgtgcgggtgatgctggtgcccagccccaggtatgtgggcctgcagaatgatgagcccccccggctgatgggagagggctttgtggtgatgcagagcaatgatgtggacatctactactacatggatgagcccggcctggtgcctgaggagacagaagaaaatattgaaggagagatgagcagcgaggactgcaagctgcaggacctgcccccctgctggggcctggacatcgtgtgtgggaaaggaacagacttcaactacggcccctgggccgaccggcagagggactgcctgtggaagttcttcttccccccagactaccaggtgctgaaggtgtctgaaattgcccagcccggccggccccggcagatcctggcctttgagctgaggatgaacatcatcgcagatgccaccatcgacctgctcttcaccaagaaccgggagaccaatgctgtgcacgtgaatgtgggcgccggcagctacctggagatcaacatccccatgacagtggaggagaatggctacaccccagccatcaagggccagctgctgcacgtggatgccaccacctccatgcagtaccgcaccctgctggaggccgagatgctggccttccacatcaatgccagctacccccgcatctggaacatgccccagacctggcagtgtgagctggaggtgtacaaggccacctaccacttcatctttgcccagaagaacttcttcacagacctgatccaggactggagcagtgacagccccccagacatcttctcctttgtgccctacacctggaacttcaagatcatgttccaccagtttgagatgatctgggccgccaaccagcacaactggattgactgcagcaccaagcagcaggagaatgtgtacctggccgcctgtggggagaccctgaacatcgacttcagcctgcccttcacagactttgtgcctgccacctgcaacaccaagttcagcctgcggggggaggatgtggacctgcacctgttcctgcctgactgccaccccagcaagtacagcctcttcatgctggtgaagaactgccaccccaacaagatgattcatgacaccggcatcccagctgagtgccagagcggccagaagacagtgaagcccaagtggagaaatgtgacccaggagaagagcggctgggtggagtgctggacagtgcccagcgtgatgctgaccatcgactacacctggcaccccatctacccccagaaggcagatgagcagctgaagcagagcctgtctgagatggaggagaccatgctgtctgtgctgcggcccagccagaagaccagtgacagagtggtgagcagccccagcaccagcagcaggcctcccatcgaccccagcgagctgcccccagacaagctgcacgtggagatggagctgagcccagacagccagatcaccctgtatggccccctgctgaatgccttcctgtgcatcaaggagaactactttggagaagatgacatgtacatggactttgaggaggtgatcagcagccctgtgctgagcctgagcaccagcagcagcagcggctggacagctgtgggcatggagaatgacaagaaggaaaatgaaggcagcgccaagagcatccaccccctggccctgcggccctgggacatcaccgtgctggtgaacctgtacaaggtgcacggccgcctgcctgtgcacggcaccacagatggcccagaatgtcccacagccttcctggagcggctgtgctttgagatgaagaagggcttccgggagaccatgctgcagctgatcctgagccccctgaatgtgtttgtgtctgacaactaccagcagaggcctcctgtggatgaggtgctgcgggagggccacatcaacctgagcggcctgcagctgcgggcccacgccatgttttctgctgagggcctgcccctgggcagtgacagcctggagtatgcctggctgattgatgtgcaggccggcagcctgacagccaaggtgacagccccccagctggcctgcctgctggagtggggccagacctttgtgttccacgtggtgtgccgggagtatgagctggagcggcccaagagcgtcatcatctgccagcacggcatcgaccggcgcttctgtgagagcaagctgagctgcatccctggcccctgccccaccagtgatgacctgaagtacaccatgatccggctggccgtggatggagctgacatctacatcgtggagcacggctgtgccaccaacatcaagatgggcgccatccgggtggccaactgcaacctgcacaaccagagcgtgggggagggcatctctgctgccatccaggacttccaggtgcggcagtacatcgagcagctgaacaactgcagaattggcctgcagcctgctgtgctgcggcgggcctactggctggaggccggcagcgccaacctgggcctcatcaccgtggacatcgccctggccgctgaccaccacagcaagcatgaggcccagaggcacttcctggagacccatgatgcccggaccaagaggctgtggttcctgtggccagatgacatcctgaagaacaagcgctgcaggaacaagtgtggctgcctgggcggctgccgcttcttcggcggcaccgtgacaggcctggacttcttcaagctggaggagctgacccccagcagcagcagcgccttcagcagcaccagcgctgagagtgacatgtactacggccagagcctgctgcagcctggagagtggatcatcaccaaggagatccccaagatcattgatggaaatgtgaatggcatgaagaggaaggagtgggagaacaagtctgtgggcatcgaggtggagaggaagacccagcacctgagcctgcaggtgcccctgcggagccacagcagcagcagcagcagcgaggagaacagcagcagcagcgctgcccagcccctgctggccggggagaaggagagccccagctctgtggctgatgaccacctggtgcagaaggagttcctgcacggcaccaagagagatgatggccaggccagcatccccacagagatcagcggcaacagccctgtgagccccaacacccaggacaagtctgtgggccagagccccctgcggagccccctgaagaggcaggcctctgtgtgcagcacccggctgggcagcaccaagagcctgacagctgccttctatggagacaagcagcctgtgacagtgggcgtgcagttcagcagtgatgtgtccagaagtgatgaaaatgtgctggacagccccaagcagaggaggagctttggcagcttcccctacacccccagcgctgacagcaacagcttccaccagtaccgctccatggacagctccatgtccatggctgacagcgaggcctacttctctgctgctgaggagtttgagcccatcagcagtgatgagggccctggcacctacccaggcaggaagaagaagaagaagcagacccagcagattgactacagccggggcagcatctaccacagcgtggagggccccctgaccggccacggggagagcatccaggacagcaggaccctgcccttcaagacccaccccagccaggccagctttgtgtctgccctgggcggggaggatgatgtgattgagcacctgtacatcgtggagggggagaagacagtggagagcgagcagatcaccccccagcagcctgtgatgaactgctaccagacctacctgacccagttccaggtgatcaactggagcgtgaagcaccccaccaacaagaggaccagcaagagcagcctgcaccggcccctggacctggacacccccaccagcgaggagagcagcagcagctttgagcagctgtctgtgcccaccttcaaggtgatcaagcagggcctgacagccaacagcctgctggaccggggcatgcagctgagcggcagcaccagcaacaccccctacacccccctggagaagaagctggccgacaacacagatgatgagaccctgacagaggagtggaccctggaccagcctgtgtcccagaccaggaccacagccatcgtggaggtgaagggcaccgtggacatcgtgctgacccccctggtggccgaggccctggaccgctacatcgaggccatggtgcactgtgccagcaccaggcaccctgctgccatcgtggatgacctgcacgccaaggtgctgcgggaggccgtgcagaacagcaagaccaccttcagcgagaacctgagcagcaagcaggacatccggggcaccaagacagagcagagcaccatcggcaccaccaaccagggccaggcccagaccaacctgaccatgaagcaggacaacgtgaccatcaagggcctgcagaccaacgtgtccatccccaaggtgaacctgtgcctgctgcaggcctctgtggaggagagccccaccacagcccccagccgctctgtgacccacgtgtccctggtggccctgtgctttgacagaattgccacccaggtgaggatgaacagaggagtggtggaggagaccagcaacaatgctgagcccggccgcaccagcaactttgaccgctacgtgcacgccaccaagatgcagccccagagcagcggcagcctgcggagcaatgctggagctgagaagggcaaggagattgctgccaagctgaacatccaccgggtgcacggccagctgcggggcctggacaccacagacatcggcacctgtgccatcacagccatcccctttgagaagagcaaggtgctcttcaccctggaggagctggatgagttcacctttgtggatgaaacagaccagcaggccgtgcctgatgtgaccagaattggccccagccaggagaagtggggctggatcatgtttgaatgtggcctggagaacctgaccatcaagggcggccggcagagcggggctgtgctgtacaacagctttggcatcatgggcaaggccagtgacacagagcggggcggcgtgctgaccagcaacaacagcagtgacagccccactggaagtggctacaacacagatgtgtctgatgacaacctgccctgtgacaggaccagccccagcagtgacctgaatggaaattctgtgtctgatgagcaggatgaaggagtggagagtgatgacctgaagaaggacctgcccctgatgcctcctcctccagacagctgcagcatgaagctgaccatcaaggagatctggttctcctttgctgcccccaccaacgtgcgcagccacacccacgccttcagccggcagctgaacctgctgagcacagccaccccagctgtgggcgcctggctggtgcccatcgaccagctgaagagcagcctgaacaagctggagacagagggcaccctgcgcatctgtgctgtgatgggctgcatcatgacagaggccctggagaacaagtctgtgcacttccccctgcggagcaagtacaaccggctgaccaaggtggcccgcttcctgcaggagaaccccagctgcctgctgtgcaacatcctgcaccactacctgcaccaggccaactacagcatcattgatgatgccaccatgtctgatggcctgcctgccctggtgaccctgaagaagggcctggtggccctggcccggcagtggatgaagttcatcgtggtgaccccagccttcaagggcgtgtccctgcacaggcctgcccagcccctgaagccccagatcgccatggaccatgaacatgaagatggcctgggcctggacaatggaggcggcctgcagagcgacaccagcgcagatggagctgagtttgaatttgatgctgccaccgtgtctgagcacaccatgctgctggagggcacagccaacagacctcctcctggcagcagcggccctgtgactggagctgagatcatgaggaagctgagcaagacccacacccacagcgacagcgccctgaagatcaagggcatccacccctaccacagcctgagctacaccagcggggacacagccacagacagccctgtgcacgtgggccgggccggcatgcctgtgaaggacagccccaggaaggagagcctgctgagctacctgaccggcagcttccccagcctgcacaacctgctggagggcaccccccagaggagcagcgctgctgtgaagagcagcagcctgaccaggactggaaacacagtggccacagacatgctgtctgagcaccccctgctgtctgagcccagctctgtgtccttctacaactggatgagcaatgctgtgggcaacagaggctctgtgctgcaggagagccctgtgaccaagagcggccacaacagcctgcccaccggggtggcccccaacctgcccaccatccccagcgccagtgacttcaacacagtgctgagcagtgaccagaacaccctggatggcacccacagccagcacagcaccagccaggatgatgtggccggcgtggaggaggccaaccagggcttccctgctgtgcagctggctgatgcccaggtggtgttcaagcccctgctgagccacacaggcatccagagccaggacaccatgcccttctgctacaggatgtactttggagagcacctgtccttcagcggcaccctggactgcctgcgggctgacatcgtggacagcgacacagccaaggagaggaagggcaagagggcccggcggcagggccacgtgaacctgccccccctggagttcaagccagccctgatgctgggcaccttcagcatctctgctgtggtgatggagaagtctgtgtgcaccccccagaacagcaccagcgccctgtccttccatgacctgagcaagcgctactacaacaccttccactgcaacttcaccatcagctgccagagcatcagccagcacgtggacatggccctggtgcggctcatccaccagttcagcaccatgattgatgacatcaaggccacccagacagacatcaagctgagccgctacacagctggcagcgccagccccacccccaccttcaagaccaggaagcaccgggacttccgcagcagtgacttcagccgcagcagccggggcagcctgaatggaggcaacagagtgaacaatgccaagaacaagaggaccaacaatgaaaacaacaagaaggagagcaggaacaagaacagcctgggccgctcagaaagaaggaccagcaaggtgtccaggaagggcagcaaggatgtggtggaccacatgaccatccacatggatgacagcgacagcatcaccgtgtctgagcagagcgagcccagcgctgagtgctggcagaacatgtacaagctgctgaacttctacagcctcatcagtgaccccaccggcatcctggagaagagcagcgagaccttcggccctgctggggtgcgcagccccacagagcccacctgcaaggtggtgtttgaaaatgagcaggacaacagcagcctgaccaagacccagaggaagaggagcctggtgaccagcgagccccagcacgtgaccctcatcgtgtttggcatcggcatggtgaacagaacccacctggaggccgacatcggcggcctgaccatggagagcgagctgaagagaattcatggcagcttcaccctgaaggagaagatgaaggatgtgctgcaccagaagatgacagagacctgtgccacagcccacatcggcggcgtgaacatcgtgctgctggagggcatcacccccaacatccagctggaggacttccccaccagccccaccagcacagccaagcaggagttcctgactgtggtgaagtgcagcatcgccaagagccaggccctgtacagcgcccagaggggcctgaagaccaacaatgctgctgtgttcaaggtgggcgccatcagcatcaacatcccccagcacccagccaccctgcacagcatgatggtgcgcagcagccaccagctgagcaagcagatcagtgacctgatccggcagcccagcacagccccccagcctgtgaaggaggacatcgccacccccctgcccagcgagaagacccccacctctgtgaaccagacccctgtggagaccaatgagttcccccagctgcctgagggcctggagaagaagcccatcgtgctgaagttcagcgccatgctggatggcatcgccatcggggccgccctgctgcccagcctgaaggccgagtacaagatgggccgcatgaggagccacggcatgaccggggcccagacccgcttcacctttgagctgcccaaccaccggctgcgcttcaccagcaaggtgtctgccacagacatgagcaccatcccccccagcgccagcctgaacctgccccctgtgaccatgtctgggaagtacatcatggaggagcatgacagctacagcgaccaggtgtggagcattgatgagctgcccagcaagcagggctactacctgcagggcaactacctgcgctgtgtggccgaggtgggcagctttgagcacaacctgaccacagacctgctgaaccacctggtgtttgtgcagaaggtgttcatgaaggaggtgaatgaggtgatccagaaggtgtctggaggagagcagcccatccccctgtggaatgaacatgatggaacagcagatggagacaagcccaagatcctgctgtacagcctgaacctgcagttcaagggcatccaggtgacagccaccacccccagcatgagagctgtgcgctttgagaccggcctgattgagctggagctgagcaaccggctgcagaccaaggccagccctggcagcagcagctacctgaagctgtttgggaagtgccaggtggacctgaacctggccctgggccagatcgtgaagcaccaggtgtatgaggaggccggcagtgacttccaccaggtggcctacttcaagaccagaattggcctgagaaatgccctgcgggaggagatcagcggcagcagtgaccgggaggccgtgctgatcaccctgaaccggcccatcgtgtatgcccagcctgtggcctttgacagagctgtgctcttctggctgaactacaaggccgcctatgacaactggaatgagcagaggatggccctgcacaaggacatccacatggccaccaaggaggtggtggacatgctgcccggcatccagcagaccagcgcccaggccttcggcaccctcttcctgcagctgactgtgaatgacctgggcatctgcctgcccatcaccaacacagcccagagcaaccacactggagacctggacaccggcagcgccctggtgctgaccatcgagagcaccctcatcacagcctgcagcagcgagagcctggtgtccaagggccacttcaagaacttctgcatccgctttgctgatggctttgagacctcctgggatgactggaagccagagatccacggggacctggtgatgaatgcctgtgtggtgcctgatggcacctatgaggtgtgcagcaggaccaccggccaggccgctgctgagagcagcagcgctggcacctggaccctgaatgtgctgtggaagatgtgtggcattgatgtgcacatggaccccaacatcggcaagaggctgaatgccctgggcaacaccctgaccaccctgactggagaggaggacattgatgacattgctgacctgaacagcgtgaacattgctgacctgagtgatgaagatgaggtggacaccatgagccccaccatccacacagaggccacagactaccgccggcaggccgccagcgccagccagcccggggagctgcggggcaggaagatcatgaagagaattgtggacatccgggagctgaatgagcaggccaaggtgattgatgacctgaagaagctgggcgccagcgagggcaccatcaaccaggagatccagcgctaccagcagctggagagcgtggccgtgaatgacatcagaagagatgtgaggaagaagctgcggcgcagctccatgagagctgccagcctgaaggacaagtggggcctgagctacaagcccagctacagccgcagcaagagcatcagcgccagcggccggccccccctgaagaggatggagcgggccagcagccgggtgggggagacagaggagctgcctgagatccgggtggatgctgccagccctggcccccgggtgaccttcaacatccaggacaccatcgccgagatccggaggaagaagatctccttcaaggtggtgttctag

SEQ ID NO: 287833 - DNA, 11043 bp, Artificial Sequence
  derived and/or modified sequence
atggaccagcggaagaacgagagcatcgtgcccagcatcacccagctggaggacttcctgactgagcataattctaacgtggtttggctcctagtcgccactatcctgagctgcggctggataatatatctaacatactacaacagcaggaatgtcggactcatactgaccctagtgctgaaccgcctctacaaacacgggtatattcatatcgggtcttttagcttctctgtcctgagcggtaaggttatggtccgggaaatatattacatcaccgaagatatgagtattcggatccaggacggattcattatctttcgttggtggaagatgtacaacccaaagcagaagcagcacgatcccaaagctgagacaagactttacataaccgttaacgattttgagttccacgtctacaacaggagcgatctctatggaaggttgcaagagctgtttggactggagccgaccatcataccacctaaaaaggacgacgacaagactagggaaatcggccggacccggacacagagtaagattgaacgcgtaaaggtcaagacggagagtcaggacccaacgtcttcgtggcggtcattgatcccagtaattaaagtgaacgtttctacaggcaggttagcttttggaaaccactatcagcctcagaccctctgcatcaacttcgatgacgcctttttgacttacaccacaaaacctcctagttcccatctggatcagtttatgcacattgtcaaaggcaaattagagaatgtgcgcgtcatgctggtgcctagcccccgctatgttggccttcaaaacgatgagccaccgcggctgatgggagagggctttgtcgtgatgcaaagcaatgatgtggatatttactactacatggacgagcctggcctcgtccctgaggagacagaggaaaacatcgaaggtgaaatgtccagtgaggattgtaaattacaggacctgccaccttgctggggactagatatcgtctgtggaaagggcactgattttaattatggcccttgggccgataggcagcgcgattgtttatggaaattcttctttccccctgattatcaggtgcttaaggtatccgagattgcccaacctgggcggcccaggcaaattctcgcctttgaattgcgcatgaacattattgcggatgcaactatagatttgctgtttaccaagaatcgcgaaactaacgccgtccacgtgaacgtcggagccggatcatacctagaaatcaatattcccatgaccgttgaagaaaatggttacacaccggcgattaagggacagctgctacacgttgatgccaccacctccatgcagtatagaaccttacttgaggcagaaatgctggccttccatatcaacgcgagttatccacggatctggaacatgcctcaaacatggcagtgtgagctcgaggtgtataaggccacgtatcactttatcttcgctcagaagaacttctttacagaccttatccaggactggagctccgattcacctccagacatcttcagttttgtgccctacacctggaatttcaagatcatgttccaccaattcgagatgatttgggctgctaatcaacacaattggattgactgtagtacgaagcagcaagagaacgtttaccttgcagcttgtggcgagaccctgaacatcgacttctcactcccattcactgacttcgtcccggccacttgtaacacgaagttctcactgaggggcgaagacgtagatctgcacctgttcctgcccgattgtcatccatcaaagtactccctgttcatgttggtgaaaaattgtcatccaaataaaatgatacacgacaccggtattcccgccgagtgtcaatcaggtcagaagaccgtgaagccaaagtggaggaatgtgacccaggaaaagtctggatgggtcgagtgctggacggtcccaagcgtgatgctgaccatcgattatacgtggcaccccatctacccacaaaaggctgatgaacagctcaaacagagtttgtctgagatggaggagacaatgctttcagtgttacgacccagtcaaaagacatccgacagggtggtgagcagccctagtacttccagccgtccaccaattgacccaagcgagttaccaccagacaagcttcatgttgagatggaactgtctcccgattcccaaatcacactgtatggccctcttctcaatgcgttcctgtgtataaaggaaaattactttggggaggacgacatgtacatggactttgaagaagttataagctctccggtattgtcactgtccacgtcttcatcatccggctggactgcagtcggtatggaaaatgacaagaaggagaacgagggatcagcgaaatcaattcatccccttgctttgcgcccatgggacatcactgtgctggtgaatctgtacaaggtccacgggcgccttcccgtgcacggtacgaccgacggtccagagtgtcccaccgcgttcctggagcggttgtgcttcgagatgaagaagggctttcgcgagacaatgctccaactcatactgtcccccctcaatgtgtttgtcagcgataattaccagcagcgccctcccgtggacgaggtcctgcgggagggccatataaacctgtctgggctccagctccgcgctcatgcaatgttcagcgctgaaggcctgcctctgggatcggactcacttgaatatgcttggctgattgatgtgcaggcagggtctctaactgccaaagtgacagctcctcagctcgcctgtttgctggagtggggtcagacgtttgtcttccacgtagtttgtagagaatatgaactagagcgaccaaaaagcgtgattatctgccagcatggtatagacagaagattctgtgaatctaaactgagttgtataccaggcccctgccctacgagtgatgacttaaagtatacaatgattcgactcgccgtggacggggctgacatctatatcgtcgagcatggttgtgccacaaacataaagatgggggctattagagtcgctaactgcaacttgcataaccagtctgttggtgagggaatctcagccgctattcaggacttccaggttaggcagtacatcgaacagctaaacaactgtaggattggattgcagccggctgtgctccgaagagcatactggctcgaagccgggagtgccaatctggggttaatcacagtggacatcgccctggctgcagaccaccattccaaacacgaagcacaacggcatttcctagaaactcacgatgccaggaccaaacggctctggttcctgtggccagacgacatcctgaaaaacaagcggtgtcgtaacaagtgtggatgtctgggcggatgccgtttcttcggtggcacggtgaccggacttgatttcttcaaactggaagagctgacacccagtagcagcagcgccttttctagcaccagtgctgagtctgatatgtactatgggcaaagtttattgcagcccggcgagtggataattacgaaagagatacctaaaatcatcgatgggaatgtgaatgggatgaaaaggaaggagtgggaaaacaaatccgtgggcatcgaggtcgagaggaaaacgcagcacttgagccttcaggtcccattaaggagtcactcctctagcagctcatcagaggaaaatagttcttcatctgcagcacaaccactattggcaggggagaaggagtccccaagctccgttgccgatgaccacctagtccagaaagagttcctccacgggacaaaaagggatgacgggcaggcctcaattccaacggagatcagcggaaattccccggtgtcgccgaatacccaggataagtcagtcggtcagtctcctctgcgcagccccttgaagcgccaggctagtgtttgctctaccagattgggctcaacaaaaagcctcaccgcagccttttacggggacaaacaaccagtaaccgtcggggttcaattttcatcagacgtgtcccggtcagatgagaatgtgctggacagcccaaaacagcggaggtctttcggatccttcccatatacgccatctgcggactcaaacagcttccaccagtaccgctcaatggactcctcaatgtctatggctgatagcgaggcatacttctcagcggcggaagagttcgagccaatctccagcgatgagggccccgggacttacccaggacgcaagaagaagaaaaaacagacccagcagattgactactcaagaggctccatttaccacagcgtcgaggggccactgacagggcacggcgagtctatccaggactcccgcaccctgccctttaaaactcacccttcacaagccagcttcgtaagtgccctcggcggggaggacgacgtgatcgagcacctgtacatcgtggagggagagaaaaccgtggaatctgagcagattacaccacagcagccggtcatgaactgttaccagacttacctgacacagtttcaagtcattaactggtcggttaagcaccctaccaataagcgtacttctaagtcgtccctgcaccggccattggatctggatacaccaacctcagaggaatccagcagctcttttgagcaactcagcgtgcccacatttaaagtgataaaacaggggttgacagcaaactccctgctggataggggcatgcagctctcgggcagcacttctaataccccatatacccccctcgaaaagaagttagccgacaacaccgacgatgagacactcacagaggaatggacactggaccaacccgtgtcccaaacgaggaccacggccatagtggaggtgaaggggaccgtcgatatcgtgctgactccactggtcgccgaggccctggatagatacatcgaggccatggtccattgcgcatccacacgccaccccgcagccatcgtggatgatctgcacgccaaggtcctccgggaggccgtccagaacagcaagaccactttcagcgagaatctctcaagcaagcaggatattcgaggtaccaaaaccgagcagtctactatcgggacgaccaaccagggacaggcccagacgaacctaacaatgaagcaagataacgtgacaatcaaggggcttcagactaatgttagcatccccaaagtcaacttatgcctccttcaggccagcgttgaagaaagcccaacaacagccccttcccgctctgtcacccatgtctcgctggtggctctctgttttgaccggatcgcgactcaggtacggatgaaccgtggggtggtggaggagacctcaaacaacgctgagccaggcagaacttctaactttgacaggtatgttcacgcaaccaagatgcagccccaaagctctggttctctgcgcagcaatgctggtgccgagaagggcaaagaaatcgctgctaaactgaatatccatcgggtgcatggccagttgcgtggcttagataccacagatattggaacatgtgcaatcaccgccatcccctttgaaaagtcaaaggtgctgtttactctcgaggaactagacgagttcacgttcgtcgacgagactgaccagcaggcagtaccggacgtcacgcgaattggtccatcacaggagaaatggggatggatcatgttcgagtgcgggctggaaaatttgactattaaaggaggtcggcaatctggagcagtcctttacaacagctttggtatcatggggaaggcaagtgacacagagagaggcggggttctgacgagcaacaattctagcgattctcctaccggtagtggatacaacacagatgtcagcgatgacaatctgccctgcgataggacctctcccagctctgacttaaatggcaattccgtcagtgatgaacaggatgagggtgtggagagtgacgatttgaagaaggatctgccattaatgcctccaccccctgattcatgttccatgaagctaaccatcaaagagatctggttttccttcgcagcgccaacgaatgtgcgcagccatactcacgccttttctcggcagctgaatctgctgagtaccgctacaccagcagttggagcatggttggttccgatcgatcaactgaaatcaagccttaataagctggagaccgaaggaacactccggatttgcgcagtgatgggctgtattatgaccgaggccttggagaacaaaagcgtgcacttccccctcagatcgaaatataacagactgactaaggtcgcccgttttctgcaggagaatccctcttgcctactgtgtaacatcctacaccattatctgcaccaggctaactacagtatcattgacgacgcaaccatgtctgatggcctgcctgccttggttacacttaagaagggcctcgtcgcactggccagacagtggatgaagtttatagttgtaacacccgcatttaagggggtcagcctgcacaggccagctcaaccactaaaacctcagatcgcaatggatcatgagcacgaggacggattggggctggataacggagggggtctgcaatcagataccagcgccgatggtgccgagtttgaatttgacgcggccactgtgtctgaacacaccatgctgctggaaggtacggctaatcggccaccacctggtagcagtgggcctgtgaccggggcggaaatcatgaggaagcttagcaagacacacacacactcagattcagcccttaaaatcaaggggatccacccttatcactctctgagttacacctcgggggacacagccacagactcccctgtgcacgtgggaagagcaggaatgcccgtgaaagacagccccagaaaggagtccttgctgtcatatttaaccggatcattcccttcactccataatctgctcgagggaactcctcagagaagctctgcagcagtgaaatcctcttcactgacccgaacgggaaacactgtggccaccgacatgctgagcgagcaccctctcctgagtgagccgtcgtcggtatccttctacaactggatgtccaatgccgtgggcaatcggggaagcgtgctccaagaaagtccggttactaaaagtggtcacaattccctgccaaccggagtggcccctaacttgcctacgatcccctccgccagcgattttaacactgtgctctctagtgatcaaaacaccctggacggcacacactcacagcatagcacttcccaagatgacgttgccggggtggaggaagccaaccaaggatttccagctgttcaactggctgatgcccaggtcgtatttaagcctcttctaagccatacagggatccagtcccaggacacaatgcccttctgctaccggatgtacttcggggagcatctgagcttttctgggacactcgactgtttgagagccgacatcgtggatagtgacacagcgaaagaacgaaagggcaagagggctcgccggcaaggacacgtcaatctcccacccctcgaattcaagcctgcactgatgctgggcacttttagcatcagcgccgtggttatggagaaatctgtgtgtacccctcagaatagtacctccgctctgtcttttcacgatctgtcaaaaaggtattataatacattccattgcaactttaccatctcctgccagtccatctcacagcatgtggacatggcactcgtcaggttgatccaccagttcagcacaatgattgacgacattaaggctacgcagaccgatataaagttatctaggtatactgcgggaagtgcttctccaacaccaactttcaagactcgcaaacacagagacttccgtagttctgactttagccgtagtagcagaggaagcctcaacggtgggaatcgtgtaaataacgctaaaaataaacgtactaacaacgaaaataataaaaaggaaagtagaaataagaattcactcgggaggagcgagaggcggacatccaaggtgagtagaaaaggttccaaggacgttgtggatcacatgacgatccatatggacgactctgattctattactgtgagcgagcagtctgaaccaagtgccgaatgttggcagaatatgtataaattgcttaatttctattcacttatttccgatcccactggcatcctggaaaagtccagtgagacattcggacccgctggagtgcgctctcccactgaaccaacttgtaaagtggtgttcgagaatgaacaggataattcttccctgactaagacgcaacgcaagcgctcactggtgacctccgagccccagcatgtcactctgatcgtgtttggaattgggatggtcaaccgcacccacttagaggccgatatcggagggttaactatggagtctgagctgaaacggattcatggaagcttcaccctgaaagaaaaaatgaaagatgttcttcaccagaagatgactgaaacttgtgcaacagcgcatattggaggcgttaatattgtgctcctcgaagggatcactcctaacatacagttagaggactttccaacctcccccacctctaccgctaagcaggagttcctgaccgtcgttaagtgctctatcgcgaagtcccaggcgttgtatagcgcccagcggggactgaaaactaataatgccgccgtgttcaaggtcggcgccattagcatcaatatccctcagcacccagcgactcttcactccatgatggttcgcagcagccatcagttgtcaaagcagatatcagatctcattcggcagccaagtacagccccgcagcctgtaaaagaagacatcgctaccccccttccttccgagaagacacctactagcgtcaaccagaccccagttgaaaccaatgaattcccacagttacctgaaggcctggagaaaaaacctatagtgctaaaattctccgcaatgctggacggtatcgcaatcggcgcagcgctactgccttctcttaaggccgaatataaaatgggcagaatgcggtcacacggaatgacaggcgcccagacacggtttacgttcgagctacctaaccaccgtctaagattcacgagtaaagtgtccgcaactgatatgagcacgatcccacctagcgcctccctgaacctgccacccgtgacaatgtctgggaaatacattatggaggagcacgattcatactcagaccaggtgtggtcaatcgacgagctcccctcgaaacagggatattaccttcaaggcaactaccttcggtgtgttgccgaggtagggagcttcgaacataatctgaccactgatctgttgaaccacctggtgttcgtccaaaaagtgtttatgaaagaggtgaatgaagtcatccagaaggtctccggtggcgagcagcccatccctctctggaacgagcatgacggaactgccgatggcgataagccaaaaatactgctttattccctcaacttacaattcaaaggaatccaggtcacagcgactactccttctatgcgcgcagtacgcttcgagacagggttaatagaactggaactgagcaatagattgcagaccaaggccagcccaggcagttcttcatacctgaagctgtttgggaagtgccaggtcgatctcaacctggcccttggacagattgtgaagcaccaggtctacgaggaagctggctccgatttccaccaagttgcctacttcaagacccggatcggcttgcggaacgcccttcgcgaagagatttccgggtcttccgacagggaggcagtgttaataaccctgaaccggcctatcgtttacgctcagccagttgcctttgaccgcgccgtgttgttttggctgaactacaaggccgcatatgataattggaatgagcagcgtatggccctccataaggacatacacatggccacaaaagaggtggtggacatgctgcccggaatacagcagacatccgcacaagcctttggaactctgttcttgcaactcacagtaaacgatctcggaatctgtctccctattactaacaccgcgcagtctaatcacacaggtgatctagataccggaagtgctctcgtcctgaccatcgagagtactctgattacagcctgctcctccgagagcctggtgagtaaaggtcattttaagaacttttgcatccggttcgccgacgggtttgaaacgtcctgggatgattggaagcctgagatccatggggaccttgtgatgaacgcttgcgtggtacctgacggcacttacgaagtgtgtagccgcacaacgggccaggccgccgccgagtcttcgtctgcaggcacgtggacattgaatgtgctgtggaagatgtgcggtatcgacgtgcacatggacccaaatatcggcaagagactgaatgctttagggaatacccttaccactctgacaggcgaggaagatattgatgacatcgccgatctgaacagtgttaatatagctgatctgtctgatgaagacgaagtggatacaatgtctcccacaatccatacagaggctaccgattatcgcagacaggccgcatccgcttcacagccaggggagcttcgtggaagaaagattatgaagcgaatcgtcgatattagagagctgaatgagcaagccaaggtgatcgatgacctgaaaaaattgggcgcttctgaggggaccattaaccaggagatacaacgttatcagcagcttgagagcgttgccgttaatgatattagaagggacgtgaggaaaaagctccggagaagtagcatgcgagcagcctcacttaaggataagtggggtttgtcctataagccctcctattctaggtccaaatcaatctcggcatcaggacgtcctcctctcaagaggatggaacgtgctagcagtagggtcggagaaaccgaagaactcccagagataagagtggatgccgcctcacctgggcctagagtaacctttaatatccaggacactatcgcggagattcgacgaaaaaaaatctcatttaaggtcgtgttctag

SEQ ID NO: 287834 - DNA, 11043 bp, Artificial Sequence
  derived and/or modified sequence
atggatcagcgcaagaacgagagtatcgtcccctcaataactcagctagaagattttctcactgagcacaattctaacgtcgtgtggctgctggtggctacgatactatcgtgcggatggattatatacttaacttattacaattcccgcaatgtgggcctgattctgacgcttgtactgaatcgactctataaacacggctacattcatatcggctctttctcattcagtgtgcttagtggcaaggttatggtcagagagatttattatattactgaagacatgagcattagaattcaggacggattcattatattcaggtggtggaaaatgtacaacccaaaacaaaagcagcatgatccaaaagccgagaccaggttatacattacagtgaatgactttgaattccatgtttacaaccgctccgacttatatggtagactgcaagaactcttcggactggagcccactataattccccctaagaaggacgatgacaaaacacgagaaattggacggactagaactcaatcgaaaatcgaacgggttaaagtgaaaacagaaagccaggatccaacatcatcctggcggtccctgattcccgtgatcaaggttaacgtctccacaggtcgccttgccttcggcaatcattaccaaccacaaacattgtgtatcaatttcgacgatgcatttcttacatatacgaccaagccaccaagttcgcatctggaccagtttatgcacatagttaagggaaaactggaaaatgttcgcgtgatgcttgtcccaagccccagatatgtcggacttcaaaacgatgaacctccgaggcttatgggcgagggattcgtggtcatgcagtccaacgacgtggatatctactattatatggacgagcctggattagttccggaggagactgaggagaacatcgagggagagatgtcaagcgaagactgcaaattgcaggacttgcccccatgttgggggttggatatcgtgtgcggcaaaggaaccgactttaactacggcccttgggccgacaggcagagggattgcctttggaaattttttttccctccggattatcaggtactgaaagtatctgagattgctcagcccggacggcctagacaaatcctggccttcgagcttcgcatgaatatcattgcggacgcaactatcgatctgctctttacaaaaaaccgtgaaactaacgccgtgcatgtgaacgttggggctggaagctacttggagatcaatattccaatgaccgttgaagagaacggatatacaccagcgatcaagggccagcttctccacgtcgacgccaccacatcaatgcagtatcgtaccctgttagaggccgaaatgctggccttccacattaacgctagttatcccaggatctggaacatgccccaaacttggcaatgcgagctggaggtttacaaagctacttaccattttatttttgcacagaagaacttttttactgacctgattcaggactggtcctctgattctcctccagatatcttcagctttgtgccttatacttggaattttaagataatgtttcatcagtttgagatgatctgggctgccaaccagcataattggatcgactgctcaacaaaacagcaggaaaacgtttatctcgcagcatgcggggagaccctcaatatcgactttagcctgccgtttactgattttgtccccgcaacttgcaatacaaagttttccctgaggggtgaggatgtcgacctccacctgttcctcccggattgtcacccctcaaaatactcactttttatgttggttaaaaactgccaccctaataaaatgatccatgacaccgggatcccagcggagtgccagtctggacaaaaaaccgtcaaaccgaagtggaggaatgtcacacaagaaaaatctggatgggtggaatgctggaccgttccctctgttatgctcacgatcgattacacatggcatccgatatacccccagaaggctgacgaacagctcaaacagagtttgagtgagatggaggagacgatgctgagcgtgttgcggccatctcaaaaaacaagtgaccgcgtagtgtcatcaccatcaaccagctctcgccctcccatcgacccgtcagaactgccacccgataagttgcatgtggagatggagctgagccccgacagccagatcaccctgtacggcccactcctgaacgcgtttttgtgtatcaaagaaaactattttggcgaggatgatatgtacatggacttcgaggaagtgatctcatcgcctgttctgagcctgagcacaagctcatctagcggatggacagctgtgggcatggagaacgacaaaaaggaaaatgaaggcagtgctaagtccatccaccctctcgccttgagaccatgggatatcaccgtgctcgtgaacctgtacaaggtccatggtaggcttccagtacacggaacaactgacggccctgagtgcccaactgcattcctggagaggctgtgtttcgagatgaaaaaaggatttcgcgagactatgctgcagttaattttgagcccactgaatgtgttcgtctccgataattaccaacaacggcctcctgtcgacgaggtattaagagagggtcacataaacctgtccggcctacagttgcgcgcacacgccatgttcagcgcagaggggcttccgcttgggtctgatagccttgaatacgcctggctaatcgatgtccaggccggttccttgaccgcaaaggttacagcccctcagctggcatgccttctggagtggggtcagactttcgtgtttcatgtcgtctgcagagaatatgaactcgagcgtcctaagtccgtgataatttgccagcacggcatcgatagacggttctgtgaatctaagctgtcttgtatccccggaccttgtccaacttcggacgacctgaagtacactatgatcaggctcgccgtggatggggctgatatctacatagtcgaacatggttgcgccacaaacataaagatgggtgccattcgggtagcaaattgcaatttgcataaccagtctgtgggtgaggggatttcagcagcaatccaggactttcaggtccgacagtatatcgagcaactgaacaactgccgtattggcctacagccggcagttttgcgccgagcttactggctcgaggctggaagtgcgaatctgggactcattacagtggatatcgccctggctgctgaccaccatagcaaacacgaagctcagcgacacttcctggagacacatgatgctcggaccaagcggttgtggttcctttggccagacgacattctgaaaaataagagatgtcgaaacaaatgcggttgcctggggggatgtcgatttttcggcggaactgtcaccgggctggacttcttcaagctggaagagttaactccttcctcatcaagtgccttctccagtacgtcagccgagagcgatatgtactatggccaatcccttttgcagcctggtgaatggataataactaaagagatccccaagattattgatggaaatgtgaatggtatgaaacggaaggagtgggagaataagtctgtaggaatcgaggtggagaggaagacccaacatctttctttgcaggtcccgctcagaagccattctagttcaagttcatccgaggaaaacagcagttcttccgcagcgcagcccctgctggcaggtgagaaggagagtccctcaagtgtggccgacgaccatctggtgcaaaaggagttcctgcacggtactaagcgggatgatggtcaggctagcattcctactgagatatcaggtaacagtcctgtttctccaaacacgcaagacaagtctgtcggccaaagtccactcaggagcccgcttaagcggcaggcaagcgtttgcagcacccggttggggagtacaaaatccttaacggccgctttctacggggacaaacagcccgttactgttggtgtacaattctcttccgatgtgtctaggagtgacgagaacgtgctagattcgccaaaacaaagacgctctttcggatcctttccgtatacccccagcgctgattctaactcctttcatcaataccgttccatggacagctctatgagcatggcggatagtgaagcctattttagtgcggctgaagagttcgagcccatctctagcgacgagggtccaggaacgtatccaggacgaaagaagaagaagaagcaaactcaacaaatcgactattccaggggatctatctaccactcagtggaaggccctttgaccggccatggggagagtatccaggacagcaggacactccccttcaagacccatccctctcaggctagttttgtttctgcactgggaggagaggacgatgtgattgagcacctttatattgtggagggagagaaaacggtagagagcgagcaaatcactccgcagcagcctgtaatgaattgctaccagacttatcttacccagttccaggtgattaactggtccgtgaagcaccccactaataaaaggacatctaagagcagccttcaccggccactcgacctggacacccctacctctgaagagtcctcaagtagcttcgagcagctcagcgtccccacattcaaggtgataaaacagggcctcactgcaaacagtttactcgatcggggaatgcagctgtcgggcagtacctcaaatactccatacactcccctggagaaaaagcttgcggataatactgatgatgaaacacttacagaagagtggactctggatcagcccgtgagtcagaccagaactacagcgatcgtcgaggtgaaaggcaccgtggacatcgttctgactcccctggtagcggaagcgctggacagatatatcgaggcaatggttcactgtgcgagtacacgtcacccagcagcgatcgtagacgacctccacgccaaggtgctgagggaagcagtgcagaattcaaaaaccaccttctctgaaaatttgagcagtaaacaggacatcaggggcactaaaaccgagcaatccacaatcggaaccacgaaccaggggcaggcgcagaccaacttgaccatgaaacaagataacgtcaccatcaaaggcttacaaaccaacgtgagtatcccaaaagtcaacctgtgcctcctgcaggccagcgtggaggaatcgcctaccaccgccccttcacggagcgttacccacgtgtctctggtcgctctgtgttttgaccgcattgcaactcaggtgagaatgaaccggggtgttgtcgaggaaaccagcaataacgctgagcctggcagaactagcaattttgacagatacgtccatgcaacgaagatgcagccacagagctctggttcgctccgttcgaacgccggtgcggagaaggggaaggagattgcagccaaacttaatatccacagagtgcatggtcagctgcggggtctggatactacggacattgggacttgtgccatcacggcaattcctttcgaaaagagcaaagtgttatttactcttgaagaactcgatgagtttacatttgtagacgagaccgaccaacaagctgtccctgacgtaactaggattggaccaagccaggaaaaatggggatggattatgttcgaatgcgggctagaaaacctgacaatcaaggggggacgtcagagcggagcagtcctgtataatagctttggtattatgggcaaagcaagtgataccgagcgtggaggggtactcacaagtaataacagcagtgactcccctacagggagcggatacaataccgacgtatcagatgataatctgccctgtgaccgcacaagcccctcaagtgacctcaatgggaacagtgtgtctgacgaacaagacgagggcgtggagtctgacgacctgaagaaggatctcccactaatgccgccacccccagattcctgtagtatgaaactgacaattaaggaaatctggttttcgttcgccgcaccaaccaacgtccgctcccacacgcatgcgttttcccgtcagctgaacttgctgtccactgcaactcccgcagtgggcgcttggctggttcctattgaccaactgaaaagcagcctcaataaactcgagaccgaaggcaccctcagaatctgtgcagttatgggctgcattatgactgaagcgctggaaaataagagcgttcatttccctctgaggagcaagtacaatagactcaccaaggtcgcccgattccttcaggagaatccgtcttgccttttgtgtaacatcctgcaccactacctccaccaggcaaactattctatcatcgatgacgccacaatgtccgatgggctgcccgctctagtgactttaaaaaaaggcctggtggctctggctcggcagtggatgaagttcatagtggtaactcctgccttcaagggggtgagtctgcatcgtcccgctcagcctttaaagccgcagattgctatggaccacgagcacgaggacggactgggactcgataacggcggagggctgcagtctgacacatctgcagatggggctgaatttgagttcgacgccgctactgtatccgaacacacgatgctgctggagggcactgctaaccgtccccctcctggatccagcgggccagtgaccggcgcagagatcatgaggaagcttagcaagacacacacccactccgattcagcgctaaaaatcaaaggcatccatccatatcactctttatcctacacctccggcgataccgccacagattcccctgttcatgttggccgagccggaatgcctgtcaaagattccccaaggaaggagtcacttctctcttacctcaccggatcatttccaagccttcataacctcctcgaagggacgccgcaacgttcttctgcggcagtcaaaagtagcagccttactagaactggcaacaccgtcgcaacagatatgctgtccgagcacccactcctgtctgagccctcgtctgttagtttttacaattggatgtctaacgctgtggggaatcgcggatccgtcctgcaagagtcaccggttacgaagtcaggtcataactccctgccaacgggcgttgctccaaatcttcctacaatcccctctgcctctgactttaatacagtgttgagcagcgatcagaacacgctagacggtacacattcccagcactcaacctcccaggatgacgtagccggagtggaggaggcgaatcaggggtttccagctgtgcaactagctgacgcccaagttgtgttcaaaccactgttatcccatacaggcatccagtcccaggatacaatgccgttttgttaccggatgtactttggagaacacctgtctttttccggcaccctcgactgcctgcgggctgacatcgtagactcagatacggctaaggagcggaagggaaaaagggcccgaagacaaggtcatgtgaacctcccccctctggagttcaagccggctctgatgttagggacttttagcatctccgccgtagtgatggagaagagtgtctgtaccccgcagaactctacctcagctttaagcttccatgacctgagcaaacggtactacaatactttccactgcaacttcactatcagttgtcagagcatttcacagcacgtcgatatggctctggtgcgcctgatacatcagttcagcactatgatcgatgacattaaggcgactcaaactgacatcaagctgagtaggtacactgcgggttctgcatcacccacgccaacattcaaaacacggaaacatcgggatttccgctcctctgactttagcaggagcagcagggggtcactaaacggaggcaacagggtgaacaacgcgaagaacaagcgaacgaataatgagaacaataaaaaggaatctagaaataaaaattcattgggcaggagcgagcgaaggacatctaaggtatcacggaaggggagcaaagacgttgtcgaccatatgaccatacatatggacgactctgattcgatcacagtttcagaacaaagcgaacccagcgctgagtgctggcagaacatgtataaactcttgaatttttatagccttattagcgaccccacaggcatactcgaaaagtcctctgagacctttggcccagccggagttaggtcaccaacggaacccacgtgcaaagttgtgtttgagaatgagcaggataatagttcactgactaaaacccagaggaaacgcagtctcgtgacctcagagcctcagcatgtgacacttatcgtgttcggcatcggaatggtgaatagaacgcacttggaggctgatatcgggggtctcacaatggagtcagaactgaaacgaattcacggctcctttacgctgaaagagaagatgaaggacgtacttcatcagaaaatgacagaaacttgcgcaacggcacatatcgggggagtcaacattgtgcttcttgaaggaattacccccaatattcagctcgaggattttcccacaagtcccacctccaccgcaaagcaagagttcctgactgtggtgaagtgcagtatcgccaaatctcaggctctgtattcagcccaaagaggattgaaaacgaacaacgctgcagttttcaaagtgggcgctattagcatcaacatcccacagcatcccgcaaccctccatagcatgatggtgaggagtagccatcagctttctaaacagattagcgatctgattagacaacctagcacggctccacaaccagtgaaggaagacatcgcgactccactgccctctgagaagacgcctaccagcgtgaatcagactcccgtggagacaaacgaattcccccagctccccgaggggcttgagaaaaaacctatcgtcctgaagttttccgcaatgctcgacggcatagctatcggagccgcactgctgccatccctgaaggctgaatacaaaatgggtaggatgcgcagccatggaatgaccggagctcagacacggttcacattcgagctccctaaccaccgcttgaggtttactagtaaagtgagcgccaccgacatgagtacaatcccaccatctgcttctctgaacctgccacctgtcaccatgtcaggaaagtacattatggaggaacatgactcctactcagaccaggtgtggtccattgatgagctgcctagtaagcagggttattatctgcagggcaattacctgcgatgcgtggctgaggtgggctcattcgagcacaacctaaccactgatctgcttaatcacctcgtctttgtacagaaggtattcatgaaagaagtcaacgaagtgatccagaaggtttccggaggggagcagccgatccccctgtggaacgagcacgatggtactgcagatggcgataaaccaaagattctgctgtattctctgaacctccagtttaagggtattcaggtgaccgcgactacaccctctatgcgggctgttcggttcgaaaccggccttatcgagttagaactgtcaaacagactccagaccaaggctagtccaggcagctcttcatatctgaagctttttggcaagtgccaggtagacctgaatctggcacttgggcagattgttaaacatcaggtctacgaggaggccggttcggacttccaccaggtggcatactttaaaacaaggatcgggctgcggaatgccctaagggaagagatctctggctcctctgatcgggaagcagtattgatcactttaaacagaccaatcgtctatgcgcagccagtggccttcgatcgcgcagtgctgttttggctgaattacaaggcagcgtacgataactggaatgagcagaggatggcattgcacaaagacatccacatggccactaaggaggttgtggacatgctgccagggatccagcagacaagcgcccaggcgtttggcacattatttctccagcttacagtaaatgatcttggcatctgcctgcccatcaccaataccgctcagtccaatcacacgggcgacctcgacacaggatctgctctggtccttacaatagagtctacccttataacagcctgcagctcagaatcattagtaagcaagggccattttaaaaatttttgtatccggtttgcagacggcttcgagacaagctgggacgattggaaacctgagatccatggcgatctcgtgatgaacgcctgcgttgttccagacggtacatacgaggtgtgttctcgaactactgggcaggccgcagcagagagtagctctgcaggcacctggaccttaaacgtgctctggaagatgtgcggaatagacgtgcatatggatcccaacattggaaagcgccttaacgcacttggcaacacactgacaaccctgaccggagaagaggatattgatgatatcgcggatttaaacagcgttaacatcgccgatttgtcagacgaggacgaagtagacaccatgagtcctacaatacacactgaggcaaccgactacaggagacaggccgcatccgccagccagcccggagaactccgaggacggaaaatcatgaagaggatcgttgatataagagaactcaacgaacaagccaaggtgattgacgatctgaagaaactaggcgcaagtgagggtactatcaatcaggaaattcagaggtaccaacagctggagagtgtcgccgtgaacgatatccggcgagacgtacgtaagaaactgagacgctcctcaatgagagcagcctccttgaaagataagtggggactgagctacaagccctcctattcaaggtctaaaagcatctcagcttctggccgtccacccctcaaacgcatggaaagggcatcttcaagagttggtgaaaccgaagagctgccagagatccgtgtggatgcagcaagccctggtccacgagttactttcaacatacaggatactatcgcggagattcgtagaaagaaaatttccttcaaggttgtgttctag

SEQ ID NO: 287835 - DNA, 11088 bp, Artificial Sequence
  derived and/or modified sequence
gaaatcttttaggcctttagatgttgttctggaaaaactttagtaatggatcaaaggaagaatgagagtattgttcctagtataactcaattagaagattttcttacagaacacaattccaatgttgtttggctccttgttgctaccattttgtcctgtggatggattatttacctcacatattataattcccggaatgttggtcttattttaacactagttcttaacagattatacaagcatggctatatccatattggttccttctctttctctgttctttctggaaaagtcatggttcgtgaaatctattacattacagaagacatgtctattaggattcaagatggattcatcatttttcggtggtggaaaatgtataacccaaaacagaagcaacatgatccaaaggcagaaaccaggttatacatcacagtcaatgactttgaatttcatgtctataatcgctcggatctttatggacgccttcaagagttgtttggtttggagccaacaataattccacctaagaaagatgatgataaaacacgggaaattggaagaacaagaacccaatcgaaaattgaaagagttaaagtaaaaacagaatcccaagaccccacatcttcatggagatcacttattccagtcataaaggtcaatgtgagcacaggacgtttggcctttggaaatcactaccagccgcaaactctgtgcatcaactttgatgatgctttcttaacttatactacaaaaccaccttcaagtcatcttgaccaattcatgcatattgtgaaaggaaagcttgaaaatgttcgagtcatgcttgttcctagtccaagatatgttggtcttcaaaatgatgaaccaccgagattaatgggagaaggttttgtggtgatgcagtcaaatgatgttgacatctactactacatggatgagccaggacttgttccggaagaaacagaagaaaatattgaaggagaaatgagcagtgaggattgcaaattacaagacttgcctccatgttggggactggatatagtttgtggtaaaggaacagattttaattatggaccatgggccgataggcagagagattgtttgtggaagtttttctttccacctgactatcaagttctgaaagtttctgaaattgcacagcctgggagaccaagacagatccttgcttttgaattacgaatgaatattattgcagatgctacaattgatttgctgtttaccaaaaatagggaaacaaatgctgtacatgtaaatgtaggagctggctcatatttagaaattaatattccaatgacagttgaagaaaatggttacactcctgctattaagggacaactcttacatgtggatgccactaccagcatgcaatatcggacccttttagaagcagaaatgttagcattccacatcaatgccagctacccccgaatatggaacatgccgcagacatggcagtgtgaattagaggtttataaagccacttaccacttcatctttgcacagaaaaacttctttacagatttaattcaagactggtctagtgacagtcctccagacattttttcatttgttccatatacgtggaattttaaaatcatgtttcatcagtttgaaatgatttgggctgctaatcaacacaattggatcgactgttctactaaacaacaggaaaatgtgtatctggcagcctgtggagaaacactaaacattgatttttctttgccttttacggactttgttccagctacatgtaataccaagttctctttaagaggagaagatgttgatcttcatttgtttctaccagactgccaccctagtaaatattctttatttatgctggtaaaaaattgccatccaaataagatgattcatgatactggtattcctgctgagtgtcaaagtggccagaaaacagttaaaccaaaatggcgcaacgttactcaggaaaagtctggttgggttgaatgctggactgtcccaagtgtcatgcttacaattgattatacatggcatccaatttatccacaaaaagcagatgaacagctgaaacaatcattatcagaaatggaagagacaatgctatctgtattaaggccatcccagaagacatcagacagagttgtttcttctccctctacttcttcacgcccacctattgatccctcagaacttccacctgataaacttcatgtagaaatggaactttctccagattctcagataactctctatggacctctactaaatgcctttttgtgtataaaggaaaactactttggggaagatgacatgtatatggattttgaagaggttatctcaagtcctgttttgtcactgtcaacatcatccagctctgggtggactgctgttggaatggaaaatgacaaaaaggaaaatgaaggttcagccaagtcaattcatccacttgccttgcgtccttgggatattactgtacttgttaatttgtacaaagttcatgggcgtcttcctgttcatggaactactgatggtcctgaatgccctacagctttcttggaaagactatgttttgaaatgaaaaaaggatttagggagaccatgctgcaacttatcctgtcacccctgaatgtgtttgtcagtgataactatcagcagcgaccccctgtggatgaagtactcagggaaggtcacatcaatttgtcaggtctccagctgagagcacacgctatgttctcagcagaaggtcttcctttgggaagcgattccttagaatacgcatggttaattgatgtgcaggctggaagtcttacagctaaggtcacagcaccacagctggcatgcctcttggagtggggacagacatttgtttttcatgtggtatgtcgggagtatgaactggaaagaccgaaatcagttataatatgtcagcatggaattgatcgtcggttctgtgaatccaagttgagttgtattcctgggccttgtccaacttcagatgatttgaaatatactatgattcgtttagcagtagatggagccgatatttacattgttgagcatggttgtgctacaaatataaagatgggtgcaattcgagttgcaaactgtaatctccacaatcaatcggttggggaaggaatcagtgctgcaattcaggattttcaagtgagacagtacattgagcaattaaataattgcagaattggacttcagcctgcagtgctacggagggcctattggcttgaagctgggtcagccaatttaggacttattactgttgatattgctttagctgctgaccatcattctaaacatgaggcacaaagacatttcttagaaactcatgatgccagaactaagaggttgtggtttttatggccagatgatatcctgaagaataagaggtgtagaaacaaatgtggttgtctcggtggctgcagattctttggtggcacagtaactggcctagatttcttcaaacttgaagagttgacaccttccagtagctctgcattttcaagcacaagtgcagagtctgatatgtattatggacagtctctgctacagcctggagaatggataattactaaagaaattcccaaaattatagatggtaatgtgaatggcatgaagaggaaagaatgggaaaacaaatcagtgggaatagaagtagagagaaaaactcagcaccttagtcttcaagtaccattacgatctcatagttcatcctcttcctcagaagagaacagtagttctagtgctgcacagcctttgttggctggtgaaaaggaaagtccttcatctgttgctgatgaccatttggttcaaaaagagttcttgcatgggacaaaaagagatgatggccaagcaagtatccctacagaaatttcaggaaacagccctgtgtctcctaatactcaggataagtcagtaggtcaatctcctcttagatctcccttgaaacgacaagcctctgtctgttccacccgtcttggaagtactaagagtcttactgctgctttctatggggacaagcagcctgtaacagttggagtccagtttagtagtgatgtctctcgaagtgatgagaatgtactagactcaccaaagcagaggagaagttttggttcattcccatatacaccatcagcagactctaattcatttcatcagtatcgatcaatggattccagcatgtcaatggctgatagtgaagcctacttttctgctgctgaggaatttgagcccattagcagtgatgaaggccctggaacttatccgggtagaaaaaagaagaaaaagcaaacccagcagattgactacagtaggggttccatatatcacagtgtagaagggccacttactggacatggagaaagcattcaggattccagaactctgccattcaaaactcatccttctcaggcttcatttgtttctgcgttaggtggagaagatgatgttatagaacatctatatattgtagaaggtgagaaaacagtggagagtgaacagattactccgcaacaacccgtgatgaattgttatcagacttaccttactcagttccaggtaattaattggtcagttaagcacccaaccaacaaaagaacctctaaatcctcattgcatcgtccccttgatctggatacaccaaccagtgaagaaagttcatcgtcatttgaacagctttctgttccaacttttaaggttatcaagcaggggctcacagctaattctttgctagacagaggcatgcaactttcaggatcaacttcaaatacgccgtatactccattggaaaaaaaactcgctgataacacagatgatgaaacattaacagaagagtggaccctggatcaaccagtgtcccagaccaggacaacagccatagttgaagtaaaaggaactgttgatattgttttgactcccctggtggctgaagctttagacagatatattgaagcaatggttcattgtgctagtacccgacatccagctgcaattgtagatgatcttcatgctaaagtcctcagggaagctgtccaaaatagcaagactaccttttcagaaaatttatcttccaaacaagacattagaggaacaaaaactgagcagtctacaataggaacgactaaccaaggacaagcacagacaaatcttacaatgaagcaagataatgtaacaattaaaggtcttcagactaatgttagcataccaaaggtaaacttatgtttgttacaagcctcagtggaagaatctccaactacggctcctagtaggagtgtgactcatgtttccctagtggcattgtgttttgacagaattgctacacaggttcgcatgaacagaggtgtggttgaagagacttcaaacaatgcagaacctggtagaacatcaaattttgataggtatgttcatgccacaaagatgcagcctcagtcatctggatctctcagatcaaatgctggagcagaaaaaggcaaagaaattgcagctaagttaaacattcatcgagttcatgggcaacttaggggtcttgatacaacagacattgggacctgtgcaatcactgctattccttttgagaagtccaaagttttatttactcttgaagagttggatgaatttacttttgtggatgaaactgatcagcaagctgttccagatgtaactcgaataggtcccagccaagaaaaatggggatggataatgtttgaatgtggacttgaaaatttaaccataaaaggaggaagacagtctggtgctgttttatataacagttttggaattatgggtaaagctagtgacacagaaaggggtggagtgctgacatccaataattcttctgattctccaaccggcagtggctataatactgatgtctctgatgataatcttccatgtgaccggacaagcccttcctcagacttaaatggaaattctgtttcagatgaacaggatgaaggagtcgaatctgatgatttgaaaaaagatctacctctgatgcctcctcctccagattcatgtagcatgaagttgaccattaaagaaatttggtttagttttgcagctcccaccaatgtgagatctcacacacatgcattttctaggcagctgaaccttttaagcactgcaacaccagctgttggtgcatggcttgttcccattgaccaactcaagtcatctttaaacaaattggaaactgagggaaccttgagaatttgtgctgttatgggatgcataatgacagaagcattagagaataaaagtgtacattttcccctaagaagtaaatacaacaggcttacaaaagttgctcgctttctccaagaaaatccttcatgtttactatgtaatatactacaccactatctgcaccaggcaaattactccatcattgatgatgctacaatgagcgatggacttcctgctttggtaactttgaagaaaggtttagttgcactggcaaggcagtggatgaagtttattgtggtgacaccagcctttaaaggagttagcttacatagaccagctcagcctctgaaacctcaaatagctatggaccatgaacatgaagatggacttggattggacaatgggggtggtcttcaaagtgataccagtgctgatggagcagaatttgagttcgatgcagccacagtcagtgaacacacaatgctattagaaggaacagctaaccggcctccacctggtagctctggacctgtaactggagctgagataatgaggaaactttctaaaactcatacccatagtgactctgcattaaaaataaagggcattcacccatatcattctctgagctataccagtggagacactgccactgattctccagtgcatgttggacgtgctgggatgccagtaaaggacagtccaaggaaggagagcctactcagctacctgactggaagcttcccaagcctgcacaacctcctggaaggtactcctcagagaagcagtgctgctgtgaaaagtagctccctaacgagaacaggaaatacagtagccactgatatgttatctgaacatcccttgctatctgagccatcatctgtgagtttctataattggatgtcaaatgctgtgggtaatcgaggaagtgtgttacaagaatctcctgttacaaaatcaggacacaatagtcttcccacaggtgttgcacccaatcttccaacaataccctcagcctcagatttcaacactgtcttgtctagtgaccaaaatactttggatgggacacattctcagcatagcaccagtcaggatgatgtggcaggtgtagaagaagcaaaccaagggtttcctgctgttcagcttgctgatgcacaggttgttttcaagcctcttctgagtcatacagggatccagtcacaggatacaatgccattctgctaccgaatgtactttggagaacacctttcattttcagggactttggactgcctcagagcagatattgtggattcagacacagccaaagagagaaaaggcaaaagagcaagaaggcaaggccatgtgaatcttcctccacttgagttcaaaccagcattaatgttgggaacctttagcatcagtgctgttgtaatggaaaagtccgtgtgcacccctcagaactctaccagtgccctttcttttcatgatctcagcaagcggtattataacacctttcactgcaactttactatttcctgtcagtcaataagccagcatgtagatatggctttggttcgtcttattcatcagtttagcacaatgatagatgacatcaaagcaactcagactgatattaaacttagcagatatacagccggatctgcttccccaacacctaccttcaaaaccagaaaacatcgggactttcgttcatctgactttagccgcagttctagaggaagtcttaatggtggcaatagagtaaataatgcaaagaacaaacggaccaacaatgagaataacaaaaaggaatctcgaaacaagaattcattaggaagatctgaaagaagaacatcaaaagtgtctaggaaaggttcaaaagatgtggtggatcacatgactattcatatggatgactctgattcaattacagtgtcagaacaaagtgagccttcagctgagtgctggcagaatatgtataaattgcttaacttctattcacttatctccgatccaacaggaatattggaaaagtcttcagaaacatttggaccagcaggagttcggagccctacagagccaacatgtaaagttgtgtttgagaatgaacaagacaacagcagtttgactaagactcagaggaaacgtagcttggtaacttctgaacctcagcatgttactctaatagtgtttgggattggcatggtgaaccgcacacacctagaggcagatattggtggactaacaatggaatcagaactgaagaggatccatggcagttttactcttaaggaaaaaatgaaagatgttttacatcaaaagatgactgagacttgtgctactgctcatattggtggggttaatattgtgctgcttgaagggattacaccaaatatacaactggaggattttcctacatctcctacaagtacagccaaacaagagtttctaactgtagtgaaatgtagtattgccaagtcccaagccctctacagtgcccaaagagggctgaagacaaacaatgctgctgtgttcaaagtaggagctatcagtatcaacattcctcagcaccctgccaccttacatagcatgatggttcgaagttctcaccaactatctaaacaaatctcagacctaatcagacagccttctacagccccacagcctgtaaaagaagatattgcaaccccactaccttctgaaaaaaccccaacaagtgttaatcaaactcctgttgaaacaaatgaatttcctcagctaccagaaggcttagaaaagaagcctattgttcttaaattcagtgccatgttagatggtatagccattggagcagcacttttaccatctctgaaagcagaatacaagatgggaagaatgagaagtcatggaatgacaggtgcacagacaagatttacatttgagctgccaaatcacagattgcgttttacttcaaaagtttctgccacagatatgtcaaccattcctccttctgccagtcttaaccttccccctgttaccatgtcagggaaatatataatggaagaacatgatagttattcggatcaggtgtggagtatagatgaactgccttctaaacaaggttactatttacagggaaattatctgcgttgtgtggcagaagttggttcctttgaacataatcttacaactgatcttctaaaccacttggtatttgtacagaaagtgttcatgaaggaagttaatgaagtaatacaaaaagtttctggtggggagcagcctattcctctctggaacgaacatgatggaacagcagatggagataaacctaaaattctcctctattccctaaacttgcagttcaagggtattcaagtaacggccactactccatcaatgagagctgtaagatttgaaactggattgattgaactggaactttctaaccgacttcaaaccaaagcttcaccaggaagtagcagctatctgaaactgtttggcaaatgccaggtggatttaaatctggcattaggacaaattgtcaaacatcaggtttatgaggaagctggttctgattttcatcaagttgcctattttaaaaccagaattggattaagaaatgccctccgagaagaaatcagtggttcttcagatagggaagctgtgcttattactttgaatagaccaattgtttatgcacagcctgtggcctttgatagagctgtgctgttttggctgaattataaggccgcctatgacaactggaatgaacaacgaatggctttacataaggatattcatatggctacaaaggaagtagtagatatgctacctggtatccagcaaacatcagcccaggcctttgggactctttttctccagctcactgtcaatgatctgggaatttgcctacctatcacaaatactgcacagtctaatcatactggagaccttgacactggttctgctttggtattaaccattgaaagtactctcatcactgcatgctcttcagagtctctggttagcaaagggcatttcaaaaacttttgtatccgttttgctgatggatttgagacatcatgggatgactggaaaccagaaattcatggggatttagtgatgaatgcctgtgtagttccagatggcacctatgaagtatgttcaagaactacaggacaagcagcagctgaaagcagtagtgctggaacctggacactcaacgtattgtggaaaatgtgtgggattgatgttcacatggatcctaacattggcaaaaggcttaatgctctgggcaatactcttacaacactgacaggagaggaagacatagatgacattgctgacttaaattcagtgaacatagctgacctgtcagatgaggatgaagttgatactatgtctcccactatccatactgaagccacagattatcgaagacaggcagcatctgctagccagccgggagaacttagaggaagaaaaattatgaagcgtatagtggatatcagagaactgaatgaacaggccaaagtaatagatgatctgaaaaaattaggtgcaagtgaaggaaccataaaccaggaaattcaacgttaccaacagttagaatctgtggctgtgaatgacattagaagagatgttcgtaaaaaattacggaggtccagtatgcgggctgcttccctaaaggataagtggggtttgagttacaaaccaagttacagccgatcaaaaagcatttctgcttctggaagaccacctcttaagcgaatggaaagggcaagttctcgagtaggagaaactgaagagctcccagaaatccgtgtggatgcagcatctcctggacctagagtaacttttaatatccaggatacaatagcagaaattagaaggaagaagatcagcttcaaagttgtattctaa

SEQ ID NO: 287836 - DNA, 11043 bp, Artificial Sequence
  derived and/or modified sequence
atggaccagagaaagaacgagagcatcgtgcccagcatcacccagctggaggacttcctgaccgagcacaacagcaacgtggtgtggctgctggtggccaccatcctgagctgcggctggatcatctacctgacctactacaacagcagaaacgtgggcctgatcctgaccctggtgctgaacagactgtacaagcacggctacatccacatcggcagcttcagcttcagcgtgctgagcggcaaggtgatggtgagagagatctactacatcaccgaggacatgagcatcagaatccaggacggcttcatcatcttcagatggtggaagatgtacaaccccaagcagaagcagcacgaccccaaggccgagaccagactgtacatcaccgtgaacgacttcgagttccacgtgtacaacagaagcgacctgtacggcagactgcaggagctgttcggcctggagcccaccatcatcccccccaagaaggacgacgacaagaccagagagatcggcagaaccagaacccagagcaagatcgagagagtgaaggtgaagaccgagagccaggaccccaccagcagctggagaagcctgatccccgtgatcaaggtgaacgtgagcaccggcagactggccttcggcaaccactaccagccccagaccctgtgcatcaacttcgacgacgccttcctgacctacaccaccaagccccccagcagccacctggaccagttcatgcacatcgtgaagggcaagctggagaacgtgagagtgatgctggtgcccagccccagatacgtgggcctgcagaacgacgagccccccagactgatgggcgagggcttcgtggtgatgcagagcaacgacgtggacatctactactacatggacgagcccggcctggtgcccgaggagaccgaggagaacatcgagggcgagatgagcagcgaggactgcaagctgcaggacctgcccccctgctggggcctggacatcgtgtgcggcaagggcaccgacttcaactacggcccctgggccgacagacagagagactgcctgtggaagttcttcttcccccccgactaccaggtgctgaaggtgagcgagatcgcccagcccggcagacccagacagatcctggccttcgagctgagaatgaacatcatcgccgacgccaccatcgacctgctgttcaccaagaacagagagaccaacgccgtgcacgtgaacgtgggcgccggcagctacctggagatcaacatccccatgaccgtggaggagaacggctacacccccgccatcaagggccagctgctgcacgtggacgccaccaccagcatgcagtacagaaccctgctggaggccgagatgctggccttccacatcaacgccagctaccccagaatctggaacatgccccagacctggcagtgcgagctggaggtgtacaaggccacctaccacttcatcttcgcccagaagaacttcttcaccgacctgatccaggactggagcagcgacagcccccccgacatcttcagcttcgtgccctacacctggaacttcaagatcatgttccaccagttcgagatgatctgggccgccaaccagcacaactggatcgactgcagcaccaagcagcaggagaacgtgtacctggccgcctgcggcgagaccctgaacatcgacttcagcctgcccttcaccgacttcgtgcccgccacctgcaacaccaagttcagcctgagaggcgaggacgtggacctgcacctgttcctgcccgactgccaccccagcaagtacagcctgttcatgctggtgaagaactgccaccccaacaagatgatccacgacaccggcatccccgccgagtgccagagcggccagaagaccgtgaagcccaagtggagaaacgtgacccaggagaagagcggctgggtggagtgctggaccgtgcccagcgtgatgctgaccatcgactacacctggcaccccatctacccccagaaggccgacgagcagctgaagcagagcctgagcgagatggaggagaccatgctgagcgtgctgagacccagccagaagaccagcgacagagtggtgagcagccccagcaccagcagcagaccccccatcgaccccagcgagctgccccccgacaagctgcacgtggagatggagctgagccccgacagccagatcaccctgtacggccccctgctgaacgccttcctgtgcatcaaggagaactacttcggcgaggacgacatgtacatggacttcgaggaggtgatcagcagccccgtgctgagcctgagcaccagcagcagcagcggctggaccgccgtgggcatggagaacgacaagaaggagaacgagggcagcgccaagagcatccaccccctggccctgagaccctgggacatcaccgtgctggtgaacctgtacaaggtgcacggcagactgcccgtgcacggcaccaccgacggccccgagtgccccaccgccttcctggagagactgtgcttcgagatgaagaagggcttcagagagaccatgctgcagctgatcctgagccccctgaacgtgttcgtgagcgacaactaccagcagagaccccccgtggacgaggtgctgagagagggccacatcaacctgagcggcctgcagctgagagcccacgccatgttcagcgccgagggcctgcccctgggcagcgacagcctggagtacgcctggctgatcgacgtgcaggccggcagcctgaccgccaaggtgaccgccccccagctggcctgcctgctggagtggggccagaccttcgtgttccacgtggtgtgcagagagtacgagctggagagacccaagagcgtgatcatctgccagcacggcatcgacagaagattctgcgagagcaagctgagctgcatccccggcccctgccccaccagcgacgacctgaagtacaccatgatcagactggccgtggacggcgccgacatctacatcgtggagcacggctgcgccaccaacatcaagatgggcgccatcagagtggccaactgcaacctgcacaaccagagcgtgggcgagggcatcagcgccgccatccaggacttccaggtgagacagtacatcgagcagctgaacaactgcagaatcggcctgcagcccgccgtgctgagaagagcctactggctggaggccggcagcgccaacctgggcctgatcaccgtggacatcgccctggccgccgaccaccacagcaagcacgaggcccagagacacttcctggagacccacgacgccagaaccaagagactgtggttcctgtggcccgacgacatcctgaagaacaagagatgcagaaacaagtgcggctgcctgggcggctgcagattcttcggcggcaccgtgaccggcctggacttcttcaagctggaggagctgacccccagcagcagcagcgccttcagcagcaccagcgccgagagcgacatgtactacggccagagcctgctgcagcccggcgagtggatcatcaccaaggagatccccaagatcatcgacggcaacgtgaacggcatgaagagaaaggagtgggagaacaagagcgtgggcatcgaggtggagagaaagacccagcacctgagcctgcaggtgcccctgagaagccacagcagcagcagcagcagcgaggagaacagcagcagcagcgccgcccagcccctgctggccggcgagaaggagagccccagcagcgtggccgacgaccacctggtgcagaaggagttcctgcacggcaccaagagagacgacggccaggccagcatccccaccgagatcagcggcaacagccccgtgagccccaacacccaggacaagagcgtgggccagagccccctgagaagccccctgaagagacaggccagcgtgtgcagcaccagactgggcagcaccaagagcctgaccgccgccttctacggcgacaagcagcccgtgaccgtgggcgtgcagttcagcagcgacgtgagcagaagcgacgagaacgtgctggacagccccaagcagagaagaagcttcggcagcttcccctacacccccagcgccgacagcaacagcttccaccagtacagaagcatggacagcagcatgagcatggccgacagcgaggcctacttcagcgccgccgaggagttcgagcccatcagcagcgacgagggccccggcacctaccccggcagaaagaagaagaagaagcagacccagcagatcgactacagcagaggcagcatctaccacagcgtggagggccccctgaccggccacggcgagagcatccaggacagcagaaccctgcccttcaagacccaccccagccaggccagcttcgtgagcgccctgggcggcgaggacgacgtgatcgagcacctgtacatcgtggagggcgagaagaccgtggagagcgagcagatcaccccccagcagcccgtgatgaactgctaccagacctacctgacccagttccaggtgatcaactggagcgtgaagcaccccaccaacaagagaaccagcaagagcagcctgcacagacccctggacctggacacccccaccagcgaggagagcagcagcagcttcgagcagctgagcgtgcccaccttcaaggtgatcaagcagggcctgaccgccaacagcctgctggacagaggcatgcagctgagcggcagcaccagcaacaccccctacacccccctggagaagaagctggccgacaacaccgacgacgagaccctgaccgaggagtggaccctggaccagcccgtgagccagaccagaaccaccgccatcgtggaggtgaagggcaccgtggacatcgtgctgacccccctggtggccgaggccctggacagatacatcgaggccatggtgcactgcgccagcaccagacaccccgccgccatcgtggacgacctgcacgccaaggtgctgagagaggccgtgcagaacagcaagaccaccttcagcgagaacctgagcagcaagcaggacatcagaggcaccaagaccgagcagagcaccatcggcaccaccaaccagggccaggcccagaccaacctgaccatgaagcaggacaacgtgaccatcaagggcctgcagaccaacgtgagcatccccaaggtgaacctgtgcctgctgcaggccagcgtggaggagagccccaccaccgcccccagcagaagcgtgacccacgtgagcctggtggccctgtgcttcgacagaatcgccacccaggtgagaatgaacagaggcgtggtggaggagaccagcaacaacgccgagcccggcagaaccagcaacttcgacagatacgtgcacgccaccaagatgcagccccagagcagcggcagcctgagaagcaacgccggcgccgagaagggcaaggagatcgccgccaagctgaacatccacagagtgcacggccagctgagaggcctggacaccaccgacatcggcacctgcgccatcaccgccatccccttcgagaagagcaaggtgctgttcaccctggaggagctggacgagttcaccttcgtggacgagaccgaccagcaggccgtgcccgacgtgaccagaatcggccccagccaggagaagtggggctggatcatgttcgagtgcggcctggagaacctgaccatcaagggcggcagacagagcggcgccgtgctgtacaacagcttcggcatcatgggcaaggccagcgacaccgagagaggcggcgtgctgaccagcaacaacagcagcgacagccccaccggcagcggctacaacaccgacgtgagcgacgacaacctgccctgcgacagaaccagccccagcagcgacctgaacggcaacagcgtgagcgacgagcaggacgagggcgtggagagcgacgacctgaagaaggacctgcccctgatgccccccccccccgacagctgcagcatgaagctgaccatcaaggagatctggttcagcttcgccgcccccaccaacgtgagaagccacacccacgccttcagcagacagctgaacctgctgagcaccgccacccccgccgtgggcgcctggctggtgcccatcgaccagctgaagagcagcctgaacaagctggagaccgagggcaccctgagaatctgcgccgtgatgggctgcatcatgaccgaggccctggagaacaagagcgtgcacttccccctgagaagcaagtacaacagactgaccaaggtggccagattcctgcaggagaaccccagctgcctgctgtgcaacatcctgcaccactacctgcaccaggccaactacagcatcatcgacgacgccaccatgagcgacggcctgcccgccctggtgaccctgaagaagggcctggtggccctggccagacagtggatgaagttcatcgtggtgacccccgccttcaagggcgtgagcctgcacagacccgcccagcccctgaagccccagatcgccatggaccacgagcacgaggacggcctgggcctggacaacggcggcggcctgcagagcgacaccagcgccgacggcgccgagttcgagttcgacgccgccaccgtgagcgagcacaccatgctgctggagggcaccgccaacagacccccccccggcagcagcggccccgtgaccggcgccgagatcatgagaaagctgagcaagacccacacccacagcgacagcgccctgaagatcaagggcatccacccctaccacagcctgagctacaccagcggcgacaccgccaccgacagccccgtgcacgtgggcagagccggcatgcccgtgaaggacagccccagaaaggagagcctgctgagctacctgaccggcagcttccccagcctgcacaacctgctggagggcaccccccagagaagcagcgccgccgtgaagagcagcagcctgaccagaaccggcaacaccgtggccaccgacatgctgagcgagcaccccctgctgagcgagcccagcagcgtgagcttctacaactggatgagcaacgccgtgggcaacagaggcagcgtgctgcaggagagccccgtgaccaagagcggccacaacagcctgcccaccggcgtggcccccaacctgcccaccatccccagcgccagcgacttcaacaccgtgctgagcagcgaccagaacaccctggacggcacccacagccagcacagcaccagccaggacgacgtggccggcgtggaggaggccaaccagggcttccccgccgtgcagctggccgacgcccaggtggtgttcaagcccctgctgagccacaccggcatccagagccaggacaccatgcccttctgctacagaatgtacttcggcgagcacctgagcttcagcggcaccctggactgcctgagagccgacatcgtggacagcgacaccgccaaggagagaaagggcaagagagccagaagacagggccacgtgaacctgccccccctggagttcaagcccgccctgatgctgggcaccttcagcatcagcgccgtggtgatggagaagagcgtgtgcaccccccagaacagcaccagcgccctgagcttccacgacctgagcaagagatactacaacaccttccactgcaacttcaccatcagctgccagagcatcagccagcacgtggacatggccctggtgagactgatccaccagttcagcaccatgatcgacgacatcaaggccacccagaccgacatcaagctgagcagatacaccgccggcagcgccagccccacccccaccttcaagaccagaaagcacagagacttcagaagcagcgacttcagcagaagcagcagaggcagcctgaacggcggcaacagagtgaacaacgccaagaacaagagaaccaacaacgagaacaacaagaaggagagcagaaacaagaacagcctgggcagaagcgagagaagaaccagcaaggtgagcagaaagggcagcaaggacgtggtggaccacatgaccatccacatggacgacagcgacagcatcaccgtgagcgagcagagcgagcccagcgccgagtgctggcagaacatgtacaagctgctgaacttctacagcctgatcagcgaccccaccggcatcctggagaagagcagcgagaccttcggccccgccggcgtgagaagccccaccgagcccacctgcaaggtggtgttcgagaacgagcaggacaacagcagcctgaccaagacccagagaaagagaagcctggtgaccagcgagccccagcacgtgaccctgatcgtgttcggcatcggcatggtgaacagaacccacctggaggccgacatcggcggcctgaccatggagagcgagctgaagagaatccacggcagcttcaccctgaaggagaagatgaaggacgtgctgcaccagaagatgaccgagacctgcgccaccgcccacatcggcggcgtgaacatcgtgctgctggagggcatcacccccaacatccagctggaggacttccccaccagccccaccagcaccgccaagcaggagttcctgaccgtggtgaagtgcagcatcgccaagagccaggccctgtacagcgcccagagaggcctgaagaccaacaacgccgccgtgttcaaggtgggcgccatcagcatcaacatcccccagcaccccgccaccctgcacagcatgatggtgagaagcagccaccagctgagcaagcagatcagcgacctgatcagacagcccagcaccgccccccagcccgtgaaggaggacatcgccacccccctgcccagcgagaagacccccaccagcgtgaaccagacccccgtggagaccaacgagttcccccagctgcccgagggcctggagaagaagcccatcgtgctgaagttcagcgccatgctggacggcatcgccatcggcgccgccctgctgcccagcctgaaggccgagtacaagatgggcagaatgagaagccacggcatgaccggcgcccagaccagattcaccttcgagctgcccaaccacagactgagattcaccagcaaggtgagcgccaccgacatgagcaccatcccccccagcgccagcctgaacctgccccccgtgaccatgagcggcaagtacatcatggaggagcacgacagctacagcgaccaggtgtggagcatcgacgagctgcccagcaagcagggctactacctgcagggcaactacctgagatgcgtggccgaggtgggcagcttcgagcacaacctgaccaccgacctgctgaaccacctggtgttcgtgcagaaggtgttcatgaaggaggtgaacgaggtgatccagaaggtgagcggcggcgagcagcccatccccctgtggaacgagcacgacggcaccgccgacggcgacaagcccaagatcctgctgtacagcctgaacctgcagttcaagggcatccaggtgaccgccaccacccccagcatgagagccgtgagattcgagaccggcctgatcgagctggagctgagcaacagactgcagaccaaggccagccccggcagcagcagctacctgaagctgttcggcaagtgccaggtggacctgaacctggccctgggccagatcgtgaagcaccaggtgtacgaggaggccggcagcgacttccaccaggtggcctacttcaagaccagaatcggcctgagaaacgccctgagagaggagatcagcggcagcagcgacagagaggccgtgctgatcaccctgaacagacccatcgtgtacgcccagcccgtggccttcgacagagccgtgctgttctggctgaactacaaggccgcctacgacaactggaacgagcagagaatggccctgcacaaggacatccacatggccaccaaggaggtggtggacatgctgcccggcatccagcagaccagcgcccaggccttcggcaccctgttcctgcagctgaccgtgaacgacctgggcatctgcctgcccatcaccaacaccgcccagagcaaccacaccggcgacctggacaccggcagcgccctggtgctgaccatcgagagcaccctgatcaccgcctgcagcagcgagagcctggtgagcaagggccacttcaagaacttctgcatcagattcgccgacggcttcgagaccagctgggacgactggaagcccgagatccacggcgacctggtgatgaacgcctgcgtggtgcccgacggcacctacgaggtgtgcagcagaaccaccggccaggccgccgccgagagcagcagcgccggcacctggaccctgaacgtgctgtggaagatgtgcggcatcgacgtgcacatggaccccaacatcggcaagagactgaacgccctgggcaacaccctgaccaccctgaccggcgaggaggacatcgacgacatcgccgacctgaacagcgtgaacatcgccgacctgagcgacgaggacgaggtggacaccatgagccccaccatccacaccgaggccaccgactacagaagacaggccgccagcgccagccagcccggcgagctgagaggcagaaagatcatgaagagaatcgtggacatcagagagctgaacgagcaggccaaggtgatcgacgacctgaagaagctgggcgccagcgagggcaccatcaaccaggagatccagagataccagcagctggagagcgtggccgtgaacgacatcagaagagacgtgagaaagaagctgagaagaagcagcatgagagccgccagcctgaaggacaagtggggcctgagctacaagcccagctacagcagaagcaagagcatcagcgccagcggcagaccccccctgaagagaatggagagagccagcagcagagtgggcgagaccgaggagctgcccgagatcagagtggacgccgccagccccggccccagagtgaccttcaacatccaggacaccatcgccgagatcagaagaaagaagatcagcttcaaggtggtgttctag

SEQ ID NO: 287837 - DNA, 1821 bp, Artificial Sequence
  derived and/or modified sequence
atgggaaacacctgtagggtgtgctaccaactggaagccatcaagagaagtaacgaaatgtcaaacgtgatgggcaataccacctggacaacatctggcttaaaatctcagggcagacttagtgtcggatcaaacagagaccgagaaattagtatgagcgtgggtttgggccgaagccagctggatagcaaagggggcgtggtcggcggcaccatagatgtgaacgcactggaaatggtggcccacattagtgaacacccgaaccaacagccatctcacaagatccagatcaccatgggttccactgaggctcgcgtggattacatgggcagctctattctgatgggcatcttctctaacgccgaccttaagcttcaggacgagtggaaggtgaatctctataacactcttgatagctctattactgataagagtgaaatctttgtgcatggagatctgaagtgggacattttccaggtgatgatatcccgcagtacgacccccgaccttatcaagattggaatgaagctgcaggagttctttactcagcaatttgatacatccaagcgagctctatctacatggggccccgtgccctatctgccacctaaaacaatgacgagcaatctcgaaaagtcttcccaggagcagcttctggacgctgcccaccacaggcactggcctggggtattgaaggtcgtcagcggctgccatatctcactgttccagatcccacttcccgaggacgggatgcaatttggcgggtctatgagcctgcacggcaaccacatgacacttgcatgcttccatgggcccaattttcgtagtaaatcttgggctctttttcacctcgaagagcctaatatcgccttctggaccgaagcccagaaaatctgggaagacggaagcagtgatcacagtacgtacatcgtgcagacactagattttcatctggggcacaacacgatggtcactaaaccatgcggagctctggaaagtcctatggcaaccatcacaaaaataactcgccggcgccacgaaaatcccccacacggagtcgcctccgtgaaggagtggttcaattatgtaacagcgacacgcaacgaagaacttaatctcctgcggaatgtcgatgcaaataatactgagaactcaacaaccgtgaaaaattctagtctcctcagcgggtttcgaggcggtagctcttacaatcacgagactgagactatcttcgctcttcctcgaatgcaactggatttcaagagtattcacgttcaggagccacaggaaccttctctacaggacgcttccctcaagcccaaggtggagtgctccgtggtgacagagtttactgaccatatttgcgtgacaatggacgccgaactgattatgtttttgcacgacctggtttctgcctatttgaaagaaaaggagaaggcaatatttccgccaagaatcctcagcacacggcccggccaaaaatcgccaattattattcatgacgacaacagtagcgacaaggacagggaagacagtatcacatacacaactgtcgactggcgcgattttatgtgcaacacctggcacctcgaaccaacattgcgcctgatctcatggaccggaagaaagattgatccagtgggggttgattacatcttacagaaactcgggtttcatcacgctagaaccacaattcccaagtggctccagcgaggcgtcatggatcctctagacaaagtactgagcgttctaataaagaagctgggaaccgccttgcaggacgagaaagaaaaaaaaggaaaagacaaggaagagcactag

SEQ ID NO: 287838 - DNA, 1821 bp, Artificial Sequence
  derived and/or modified sequence
atgggcaacacctgccgggtgtgctaccagctggaggccatcaagaggagcaatgagatgagcaatgtgatgggcaacaccacctggaccaccagcggcctgaagagccagggccgcctgtctgtgggcagcaacagagaccgggagatctccatgtctgtgggcctgggccgcagccagctggacagcaagggcggcgtggtgggcggcaccattgatgtgaatgccctggagatggtggcccacatcagcgagcaccccaaccagcagcccagccacaagatccagatcaccatgggcagcacagaggcccgggtggactacatgggcagcagcatcctgatgggcatcttcagcaatgctgacctgaagctgcaggatgagtggaaggtgaacctgtacaacaccctggacagcagcatcacagacaagtctgagatctttgtgcacggggacctgaagtgggacatcttccaggtgatgatcagccgcagcaccaccccagacctgatcaagattggcatgaagctgcaggagttcttcacccagcagtttgacaccagcaagagggccctgagcacctggggccctgtgccctacctgccccccaagaccatgaccagcaacctggagaagagcagccaggagcagctgctggatgctgcccaccaccgccactggccaggagtgctgaaggtggtgtctggctgccacatcagcctcttccagatccccctgcctgaagatggcatgcagtttggaggctccatgagcctgcacggcaaccacatgaccctggcctgcttccacggccccaacttccgcagcaagtcctgggccctcttccacctggaggagcccaacatcgccttctggacagaggcccagaagatctgggaggatggcagcagtgaccacagcacctacatcgtgcagaccctggacttccacctgggccacaacaccatggtgaccaagccctgtggggccctggagagccccatggccaccatcaccaagatcaccaggagaagacatgaaaatcctcctcatggagtggcctctgtgaaggagtggttcaactacgtgacagccaccagaaatgaggagctgaacctgctgagaaatgtggatgccaacaacacagagaacagcaccaccgtgaagaacagcagcctgctgagcggcttccggggcggcagcagctacaaccatgaaacagagaccatctttgccctgcccaggatgcagctggacttcaagagcatccacgtgcaggagccccaggagcccagcctgcaggatgccagcctgaagcccaaggtggagtgcagcgtggtgacagagttcacagaccacatctgtgtgaccatggatgctgagctgatcatgttcctgcatgacctggtgtctgcctacctgaaggagaaggagaaggccatcttccccccacgcatcctgagcaccaggcctggccagaagagccccatcatcatccatgatgacaacagcagtgacaaggaccgggaggacagcatcacctacaccaccgtggactggagggacttcatgtgcaacacctggcacctggagcccaccctgcggctcatctcctggacaggcaggaagattgatcctgtgggcgtggactacatcctgcagaagctgggcttccaccacgcccggaccaccatccccaagtggctgcagaggggcgtgatggaccccctggacaaggtgctgtctgtgctgatcaagaagctgggcacagccctgcaggatgagaaggagaagaagggcaaggacaaggaggagcactag

SEQ ID NO: 287839 - DNA, 1821 bp, Artificial Sequence
  derived and/or modified sequence
atgggcaacacctgccgggtgtgctaccagctggaggccatcaagaggtcaaacgaaatgagcaacgttatgggtaacacaacgtggactacctccggcctgaagagccagggacgactttctgttggatctaaccgagaccgggaaattagtatgtcagtgggattgggcaggagccaactcgacagtaagggcggtgtagttggaggcaccatcgacgtcaacgcactggagatggtcgcacacatctccgagcaccctaatcagcagccaagtcataaaatccagatcacaatgggctcaacagaagcccgggttgattatatgggatcttctattttgatggggattttttccaatgccgacctgaaactccaagacgagtggaaggtgaacctatacaataccctagactcatccattacggataagtccgaaatcttcgttcacggcgaccttaaatgggatattttccaggtgatgatctcccgcagtaccactcccgatttgatcaagattggaatgaaactgcaggagttcttcacacagcagtttgacacttccaagagagcgttaagcacatggggtccggtaccgtatctccctcccaagacaatgacctcaaaccttgaaaaatctagtcaggagcagttactcgacgccgcccatcatcgacactggcctggcgtgctcaaagtcgtgagcgggtgtcatattagcctgttccagatcccccttcctgaagacggcatgcagttcggaggttccatgtcactccatgggaatcacatgaccttagcctgtttccacgggcctaattttcgctctaaaagttgggcgctcttccacctggaggaacccaacattgccttctggacagaggcacaaaaaatttgggaagacggctcgtccgatcattcaacatacatagtgcagacattagatttccatctgggccataacacgatggttactaaaccctgtggtgcgttagagtcccccatggcgactatcactaagataacccgccgacgtcacgagaaccccccgcacggcgtggcttctgtgaaggagtggtttaactacgttactgccacaaggaatgaagaattgaatttattacgaaacgtcgatgctaacaacacagaaaattcaactacagtcaaaaacagcagtctgctgtctggattccgggggggctccagctacaatcacgagactgagaccatctttgccttgccccgtatgcaactcgactttaaatcgattcatgtgcaggaaccccaggaacctagcttacaggatgctagcctgaagcctaaagtagagtgttctgtcgtcaccgaattcaccgaccatatttgcgttacgatggatgctgagctgatcatgttcctgcacgacctggtttccgcgtacctgaaggaaaaggagaaggccattttccccccaaggattctgtctaccagacccggacagaaaagtcctatcatcatccatgatgacaactcctccgacaaggatagagaggactcaatcacctacaccacggttgattggagggattttatgtgcaacacctggcacctggagcctaccctgcgcctcatatcctggactggccgcaagattgacccagtgggagtcgactacatattgcagaaactgggtttccaccacgcaagaactaccatcccaaagtggttgcagcggggcgttatggatccacttgacaaggtgctaagcgtccttattaagaagttaggcactgccctccaggacgagaaggagaaaaagggaaaagataaagaggaacattag

SEQ ID NO: 287840 - DNA, 1821 bp, Artificial Sequence
  derived and/or modified sequence
atgggcaatacctgtcgcgtgtgttaccagcttgaggccatcaagagatcaaatgagatgtctaatgtgatgggcaacacaacctggaccacgtccgggcttaaaagccagggacggctctccgtcggatccaacagggaccgcgagatttccatgagtgtgggcctgggcaggtcacagttagattctaaaggcggagttgtcgggggtaccatcgatgtgaacgctctggagatggtagcacacatttcggagcaccctaaccagcagcctagtcataagatccagatcaccatgggcagcactgaggccagagtggactatatgggaagctctatcctgatggggatcttctctaatgctgacctcaaattgcaggatgagtggaaggtgaacctatacaacaccttagactcttctattactgataagtccgaaatttttgttcacggagatctgaaatgggacatcttccaggtgatgattagcaggtccaccacaccagacctgataaaaattggaatgaagttgcaggagtttttcacgcaacagttcgacacatccaagcgggcattgtcaacatgggggcctgtgccatacctgccaccaaaaaccatgacaagtaacctggagaagtcctcccaggagcagttactcgatgctgcacatcatagacattggccaggggtcctgaaggtcgtttcgggttgccacatcagtcttttccagataccacttccagaagacggcatgcagtttggtgggtcaatgagtcttcatggaaatcacatgactctcgcttgtttccatgggcctaatttcaggagcaagtcttgggccctgtttcacttggaggagccaaatatagccttctggaccgaagcacagaagatttgggaggacggtagctctgaccactcgacgtacatcgtgcagaccttggatttccacctgggccacaacactatggtgactaaaccttgtggggcactcgagagtccaatggccacaatcaccaagattactaggcggcgacatgagaaccctccccacggagttgcatccgttaaagagtggtttaattatgtcactgcaacaagaaatgaggaactgaatcttctcaggaacgttgacgctaataatacagagaattcaactaccgtaaagaatagcagcctgctcagtggtttccgcggaggatctagctacaaccacgaaacagaaaccatctttgccctgcctcgcatgcagctggacttcaagtcaatccatgtacaggaaccacaggaaccaagcctgcaggatgccagccttaagcccaaggtggagtgttcagttgtaaccgagttcacagatcacatttgcgtgactatggacgccgagcttataatgtttctgcacgacttggtttctgcatatctaaaagaaaaagaaaaagctatatttccccctcggattctcagcacacgccctggtcagaagagcccaatcattatccatgatgataacagttccgataaggacagggaggacagtattacctacacaacagtggattggcgcgatttcatgtgtaacacgtggcacttagagcccaccctgcgcctgatttcgtggacaggaaggaagattgaccccgtgggtgtcgattatatcctacagaagctggggtttcatcatgccagaactactataccgaaatggttacagaggggcgtcatggatcccctggacaaagtcctcagcgtgctgattaaaaagctggggactgccttacaggacgagaaggagaagaagggaaaagataaagaggaacactag

SEQ ID NO: 287841 - DNA, 3346 bp, Artificial Sequence
  derived and/or modified sequence
ttaccagtatcaagagtagaatgcatgttaaagctgccatccctggatttggtgttttcttcaaaccgaggagaactggagactttagggactacatatcctgcagagactttatcccctggaggtaatgctactcagagtggaacaaagacttctgctagcaaaactggaataccaggttcatcgggattaggcagccctcttggccgaagtcgacatagtagtagtcagtcagacctgaccagttccagcagtagttcatctggcttgagcttcactgcatgcatgtctgacttttccctttatgtatttcatccatatggagcagggaaacaaaaaactgctgtttctggcctcacacctggatcaggaggattagggaatgtggatgaggagcccacttcagtcactggtcgaaaagattcactcagtataaaccttgagtttgtaaaagtgagtttgtcacggatcaggcgttcaggaggtgcctcattttttgaaagtcagtctgtaagcaagtctgcaagcaaaatggatactacgttaataaatatatctgctgtttgtgatatagggtctgcctcctttaaatatgatatgcgccgactcagtgaaattctggcatttccaagagcatggtatagaagaagtattgcaagacgtctattccttggagaccaaactataaatttgccaacatctggcccagggacacctgattccattgaaggggtaagccaacacctttcccctgaatcatcaagaaaagcttactgcaagacctgggagcagccaagtcagtcagcctccttcacccacatgcctcagtcacctaatgtgttcaatgagcatatgacaaacagcaccatgtcaccagggacagtaggacagagcctaaaatccccagcttccataagatcaaggagtgtatctgattcttcagttcctcgaagagattcactttcaaaaacatcaactccttttaacaaatcaaacaaagcagcaagccaacaagggaccccatgggaaacacttgtcgtgtttgctatcaacttgaagcaattaaacgttcaaatgaaatgagtaatgtaatgggaaatacaacttggacaactagtggtttgaagagccagggccgtctgtcagtaggaagtaatcgtgatcgagagatcagcatgtctgttggtctgggaagatcacaattagattctaaaggaggagtagttggagggaccatagatgtcaatgctttggagatggttgctcatatttctgaacatccaaatcagcaacccagtcacaaaattcagattactatgggttctactgaagctcgtgttgattacatgggctcaagtatcctcatgggcatcttcagtaatgctgatcttaagcttcaggatgaatggaaagtaaacttgtataatacattggattcaagcataactgataaaagtgagattttcgtccatggagatttgaagtgggatattttccaagtaatgatatcaaggtcaaccacaccagatctgataaaaataggaatgaagctccaggaatttttcacacaacaatttgataccagcaaacgagctctgtctacctggggaccagttccttaccttccgccaaagacaatgactagcaacctagaaaaaagttcacaagaacaattacttgatgcagcacatcatcgacactggcctggagtattgaaggtggtatcaggatgccacatatccttatttcagattccattaccagaagatggaatgcaatttggaggatcaatgagcttacatggaaatcatatgacactggcatgttttcatggtccaaattttcgttcaaaatcttgggccctttttcatttagaagaaccaaatattgctttttggactgaagctcagaaaatctgggaagatggctccagtgatcattctacatatattgtacaaacactagattttcacctgggtcataatactatggttaccaaaccatgtggtgctttggaaagtcctatggcaacaataaccaagataacaaggcgtcgccatgaaaatccaccccatggagtagcaagtgtgaaagaatggttcaattatgttacagctacaaggaatgaagagctaaatctgcttcgtaatgttgatgctaacaacactgagaatagcactactgtgaagaattctagtttgttgagtggattcagaggaggttctagctacaaccatgaaacagagactatctttgcattaccaaggatgcagcttgactttaaatccattcatgttcaagaaccacaggagccttcattacaggatgccagcctgaagccaaaagtagaatgtagtgtggtgacagagttcactgaccacatttgtgtgactatggatgctgagctcatcatgtttcttcatgatttagtatcagcttatcttaaagaaaaagaaaaagccatctttccacctcggattttatctactcgaccaggacaaaaaagtccaattattatacatgacgacaattcctctgataaagatagagaagatagcatcacttatactactgtggactggagagattttatgtgcaatacatggcatctagaacctactcttagattaatttcttggactggaagaaagattgatccagtaggtgttgattatattcttcaaaaattgggctttcatcatgctaggactactattcctaaatggcttcaaagaggagtcatggatccactggacaaggttctgtcagttcttatcaaaaagctcggtactgcactacaggatgaaaaggaaaagaaaggcaaagacaaagaagaacactaaaaaagtaatttgatctgtgaacaaattatgattgtgtctgttttattacactggagtgtttttttagtataataatttgaaatataactttaaaataattctaaatttgtggctataattaaaagtttgtaagttaacctgttctagttccatcattctgtgtacagtgaagtattgcatgataatgtaaattttgtgaaaaactagattaaaatatataactgcttgttatggtttataattatataatgtgcaatacaattcctgcatctttaaaatgtctgcagaataactgtgaatttttttgttattggattggccgtaacttttagaaaaaaatcttgttgatgataatgtgattttggggaggtcattaattgctttttcttttttaaatgtagacttatataaatacctgtttgtatatagcttgagtaattgtgatatgattgtataccactaaaatattgttaactattataataaagtcacagtaatggttt

SEQ ID NO: 287842 - DNA, 1821 bp, Artificial Sequence
  derived and/or modified sequence
atgggcaacacctgcagagtgtgctaccagctggaggccatcaagagaagcaacgagatgagcaacgtgatgggcaacaccacctggaccaccagcggcctgaagagccagggcagactgagcgtgggcagcaacagagacagagagatcagcatgagcgtgggcctgggcagaagccagctggacagcaagggcggcgtggtgggcggcaccatcgacgtgaacgccctggagatggtggcccacatcagcgagcaccccaaccagcagcccagccacaagatccagatcaccatgggcagcaccgaggccagagtggactacatgggcagcagcatcctgatgggcatcttcagcaacgccgacctgaagctgcaggacgagtggaaggtgaacctgtacaacaccctggacagcagcatcaccgacaagagcgagatcttcgtgcacggcgacctgaagtgggacatcttccaggtgatgatcagcagaagcaccacccccgacctgatcaagatcggcatgaagctgcaggagttcttcacccagcagttcgacaccagcaagagagccctgagcacctggggccccgtgccctacctgccccccaagaccatgaccagcaacctggagaagagcagccaggagcagctgctggacgccgcccaccacagacactggcccggcgtgctgaaggtggtgagcggctgccacatcagcctgttccagatccccctgcccgaggacggcatgcagttcggcggcagcatgagcctgcacggcaaccacatgaccctggcctgcttccacggccccaacttcagaagcaagagctgggccctgttccacctggaggagcccaacatcgccttctggaccgaggcccagaagatctgggaggacggcagcagcgaccacagcacctacatcgtgcagaccctggacttccacctgggccacaacaccatggtgaccaagccctgcggcgccctggagagccccatggccaccatcaccaagatcaccagaagaagacacgagaaccccccccacggcgtggccagcgtgaaggagtggttcaactacgtgaccgccaccagaaacgaggagctgaacctgctgagaaacgtggacgccaacaacaccgagaacagcaccaccgtgaagaacagcagcctgctgagcggcttcagaggcggcagcagctacaaccacgagaccgagaccatcttcgccctgcccagaatgcagctggacttcaagagcatccacgtgcaggagccccaggagcccagcctgcaggacgccagcctgaagcccaaggtggagtgcagcgtggtgaccgagttcaccgaccacatctgcgtgaccatggacgccgagctgatcatgttcctgcacgacctggtgagcgcctacctgaaggagaaggagaaggccatcttcccccccagaatcctgagcaccagacccggccagaagagccccatcatcatccacgacgacaacagcagcgacaaggacagagaggacagcatcacctacaccaccgtggactggagagacttcatgtgcaacacctggcacctggagcccaccctgagactgatcagctggaccggcagaaagatcgaccccgtgggcgtggactacatcctgcagaagctgggcttccaccacgccagaaccaccatccccaagtggctgcagagaggcgtgatggaccccctggacaaggtgctgagcgtgctgatcaagaagctgggcaccgccctgcaggacgagaaggagaagaagggcaaggacaaggaggagcactag

SEQ ID NO: 287843 - protein, 73 aa, Artificial Sequence
  derived and/or modified sequence
MSYYQRPFSPSAYSLPASLNSSIVMQHGTSLDSTDTYPQHAQSLDGTTSSSIPLYRSSEEEKRVTVIKAPHYP

SEQ ID NO: 287844 - protein, 797 aa, Artificial Sequence
  derived and/or modified sequence
MGVSRLMDLLADSREVIRNDGVLLLQALTRSNGAIQKIVAFENAFERLLDIISEEGNSDGGIVVEDCLILLQNLLKNNNSNQNFFKEGSYIQRMKPWFEVGDENSGWSAQKVTNLHLMLQLVRVLVSPTNPPGATSSCQKAMFQCGLLQQLCTILMATGVPADILTETINTVSEVIRGCQVNQDYFASVNAPSNPPRPAIVVLLMSMVNERQPFVLRCAVLYCFQCFLYKNQKGQGEIVSTLLPSTIDATGNSVSAGQLLCGGLFSTDSLSNWCAAVALAHALQENATQKEQLLRVQLATSIGNPPVSLLQQCTNILSQGSKIQTRVGLLMLLCTWLSNCPIAVTHFLHNSANVPFLTGQIAENLGEEEQLVQGLCALLLGISIYFNDNSLESYMKEKLKQLIEKRIGKENFIEKLGFISKHELYSRASQKPQPNFPSPEYMIFDHEFTKLVKELEGVITKAIYKSSEEDKKEEEVKKTLEQHDNIVTHYKNMIREQDLQLEELRQQVSTLKCQNEQLQTAVTQQVSQIQQHKDQYNLLKIQLGKDNQHQGSYSEGAQMNGIQPEEIGRLREEIEELKRNQELLQSQLTEKDSMIENMKSSQTSGTNEQSSAIVSARDSEQVAELKQELATLKSQLNSQSVEITKLQTEKQELLQKTEAFAKSVEVQGETETIIATKTTDVEGRLSALLQETKELKNEIKALSEERTAIKEQLDSSNSTIAILQTEKDKLELEITDSKKEQDDLLVLLADQDQKILSLKNKLKDLGHPVEEEDELESGDQEDEDDESEDPGKDLDHI

SEQ ID NO: 287845 - DNA, 396 bp, Artificial Sequence
  derived and/or modified sequence
atggagatcaaggaggagggcgccagcgaggagggccagcacttcctgcccaccgcccaggccaacgaccccggcgactgccagttcaccagcatccagaagacccccaacgagccccagctggagttcatcctggcctgcaaggacctggtggcccccgtgagagacagaaagctgaacaccctggtgcagatcagcgtgatccaccccgtggagcagagcctgaccagatacagcagcaccgagatcgtggagggcaccagagaccccctgttcctgaccggcgtgaccttccccagcgagtaccccatctacgaggagaccaagatcaagctgaccgtgtacgacgtgaaggacaagagccacgacaccatcgccaacagcagcagaatctag

SEQ ID NO: 287846 - DNA, 255 bp, Artificial Sequence
  derived and/or modified sequence
atggagatcaaggaggagggcgccagcgaggagggccagcacttcctgcccaccgcccaggccaacgaccccggcgactgccagttcaccagcatccagaagacccccaacgagccccagctggagttcatcctggcctgcaaggacctggtggcccccgtgagagacagaaagctgaacaccctggtgcagatcagcgtgatccaccccgtggagcagagcctgaccagatacagcagcaccgagatcgtgtag

SEQ ID NO: 287847 - DNA, 162 bp, Artificial Sequence
  derived and/or modified sequence
atggagatcaaggaggagggcgccagcgaggagggccagcacttcctgcccaccgcccaggccaacgaccccggcgactgccagttcaccagcatccagaagacccccaacgagccccagctggagttcatcctggacctgaaccaggagctgagagactag

SEQ ID NO: 287848 - DNA, 396 bp, Artificial Sequence
  derived and/or modified sequence
atggaaataaaagaagagggggcctcagaggaaggacaacattttctacctacagcccaggctaacgatcctggggattgtcaattcacttctattcagaagacaccaaacgaaccccaacttgagtttatcctggcttgcaaggacctcgttgccccagttagagacaggaaactgaataccttagtgcagatctctgtcatccatcctgtagagcagagtctcactaggtatagctccactgaaatcgtggagggcacgagagatcctctgttcttaacaggggtgacgtttcctagcgaatacccaatctatgaagaaacgaagattaagctaacagtgtacgatgtgaaggacaaaagtcacgatacgatagccaatagctcccgtatctag

SEQ ID NO: 287849 - DNA, 255 bp, Artificial Sequence
  derived and/or modified sequence
atggaaatcaaagaagaaggagctagcgaggaaggacagcacttcctgcccacagctcaggcaaacgatcccggcgactgccaattcactagtatccagaagaccccaaatgaacctcagctcgagttcattcttgcgtgtaaagatcttgtggctcctgtccgtgatcggaagctaaacaccctggtgcaaatttccgttatccaccctgtggaacagagcctgacccgctattccagtaccgagattgtgtag

SEQ ID NO: 287850 - DNA, 162 bp, Artificial Sequence
  derived and/or modified sequence
atggagattaaggaagagggcgcttctgaggaggggcagcactttctgccaaccgcgcaggctaatgatccaggcgattgtcaattcacctccatccagaagacacctaacgaaccccagctcgagtttattttggatttgaatcaggagctgagggattag

SEQ ID NO: 287851 - DNA, 396 bp, Artificial Sequence
  derived and/or modified sequence
atggagatcaaggaggagggcgccagcgaggagggccagcacttcctgcccacagcccaggccaatgaccccggggactgccagttcaccagcatccagaagaccccaaatgagccccagctggagttcatcctggcctgcaaggacctggtggcccctgtgcgggacaggaagctgaacaccctggtgcagatcagcgtcatccaccctgtggagcagagcctgacccgctacagcagcacagaaattgtggagggcacccgggaccccctcttcctgactggagtgaccttccccagcgagtaccccatctatgaggagaccaagatcaagctgactgtgtatgatgtgaaggacaagagccatgacaccatcgccaacagcagccgcatctag

SEQ ID NO: 287852 - DNA, 255 bp, Artificial Sequence
  derived and/or modified sequence
atggagatcaaggaggagggcgccagcgaggagggccagcacttcctgcccacagcccaggccaatgaccccggggactgccagttcaccagcatccagaagaccccaaatgagccccagctggagttcatcctggcctgcaaggacctggtggcccctgtgcgggacaggaagctgaacaccctggtgcagatcagcgtcatccaccctgtggagcagagcctgacccgctacagcagcacagaaattgtgtag

SEQ ID NO: 287853 - DNA, 162 bp, Artificial Sequence
  derived and/or modified sequence
atggagatcaaggaggagggcgccagcgaggagggccagcacttcctgcccacagcccaggccaatgaccccggggactgccagttcaccagcatccagaagaccccaaatgagccccagctggagttcatcctggacctgaaccaggagctgcgggactag

SEQ ID NO: 287854 - DNA, 583 bp, Artificial Sequence
  derived and/or modified sequence
gcgcacacgctcacacgctcgcaagcgaacgcaggaaagtcaggctaaaagtgtctgctgctgctgccgccccccactccgcctccgggagagaatacaaagaaatggtgttacctggcaagaggtcttctgtcttttatgaaaaattagacaaagggggcgctgttttggggaaatggcagaactccctcagaggctgatctaagggttcccggcagaaggggccatcttcagaggctctggttgcatgactgtttggagtttgatggcctgaagagccttgaaaccagcgaaacaataatcaaagagcagttctgtcaaagaaaacaacataaatcaggtacagaatttcagagtgggatatcagatctttagtgtgaagatacatctacattaaaccaggaatcactagaactgacatttggacaagaaaatttggaaaattttaaaactgtgaaggttgatcatggaaattaaagaggaaggggcatcagaagaagggcagcactttcttcctacagcccaggccaatgatcccggggactgtcagttcacaagtatccagaagactccaaatgaaccg

SEQ ID NO: 287855 - DNA, 673 bp, Artificial Sequence
  derived and/or modified sequence
atggaaattaaagaggaaggggcatcagaagaagggcagcactttcttcctacagcccaggccaatgatcccggggactgtcagttcacaagtatccagaagactccaaatgaaccgcagttggaattcatccttgcatgcaaggatctcgtggctcctgtccgtgatcgtaaactgaatacactggtgcagatctccgtaatccaccccgtggagcagagtctgacaagatactccagcaccgaaattgtggagggaacaagggacccactgtttttgactggtgtcacattcccatctgagtatcccatctatgaggagaccaaaataaaactaacagtctatgatgtcaaggataagtctcatgacaccatagctaactcatccagaatttgagtataagtggatcttgaggtcctcagagctgagacaacttgagacaacttgctcagtcacctgttcaaatgtctgcaggatggttggccaagtgcaagacatcacatgagcttcttgacagctgcacgatggtaacttaatgagacacaacagttttcttgtgaaatagctggacatgcagagaggtcacatgaataataagctcacacctgtgttcccgccacccggatattattcaaagcacaaaacatcataaataaagtcaaggtcctctata

SEQ ID NO: 287856 - DNA, 563 bp, Artificial Sequence
  derived and/or modified sequence
aaagcgcagatggggagagtcatttgccccacaccctacacagcccggaataaccaggaatacaaagaaatggtgttacctggcaagaggtcttctgtcttttatgaaaaattagacaaagagccttgaaaccagcgaaacaataatcaaagagcagttctgtcaaagaaaacaacataaatcaggtacagaatttcagagtgggatatcagatctttagtgtgaagatacatctacattaaaccaggaatcactagaactgacatttggacaagaaaatttggaaaattttaaaactgtgaaggttgatcatggaaattaaagaggaaggggcatcagaagaagggcagcactttcttcctacagcccaggccaatgatcccggggactgtcagttcacaagtatccagaagactccaaatgaaccgcagttggaattcatccttgcatgcaaggatctcgtggctcctgtccgtgatcgtaaactgaatacactggtgcagatctccgtaatccaccccgtggagcagagtctgacaagatactccagcaccgaaattgtg

SEQ ID NO: 287857 - DNA, 1506 bp, Artificial Sequence
  derived and/or modified sequence
agacagcagaaggatcactgggctggaagctctaacaggcattgccagcctagctacctgcagtttgaggcaagggcagggtcacttaccctgctgtctgaatgtctcctgggacaacaggaggctgcactcactggctgagttcagacagaagagggatcatcggactggaagctctggcagagccttgaaaccagcgaaacaataatcaaagagcagttctgtcaaagaaaacaacataaatcaggtacagaatttcagagtgggatatcagatctttagtgtgaagatacatctacattaaaccaggaatcactagaactgacatttggacaagaaaatttggaaaattttaaaactgtgaaggttgatcatggaaattaaagaggaaggggcatcagaagaagggcagcactttcttcctacagcccaggccaatgatcccggggactgtcagttcacaagtatccagaagactccaaatgaaccgcagttggaattcatccttgatttgaatcaagaattaagagattagcagctgcaagaatttattcataataatgttctaccagtataaaaaacttcaatttctttttttatatatatttttaaaatatactaagaaacaacaacagataattttatcttgtcaaatggcaagaaatgcttgatgagcgaacacaagtttactaaaaaaatattatttcaagtcatcatggaactgtattgttgatcctagaagacacagtccccaaactgttaggttccttagcactttaagatcttcaactacaccatttcttgaagaattttttaaaaactactctttcaagggtattacagataaacccgtggatgttttactgtccatttttgtcatttttttctttgagattttttaattccacaaatcctccgacgtcacctattattgtatgagtaacttctattcatttcccaatgaaagaataatagcttcttaaatatttttatcatgtttaagggtgtgcatatttatttaatcagaagtaaaacaagaacaaattctaggaaaaagaaattcagtaaggaagagggctttttcgtctaattttaactaaatctttgatatttgattctctactcttaaccaaagtattcaaattatttaggaatttcaatgaccttgctttctaaattaggaaaacagccacaccaatcaatttgctaggtgccatattgctttgtataagttattttccatcaaggatttgtgtctgctttgtgtgctgctatataataattatgtcttgctgaagttcttctgcttattgaattcctctactgaagttccttacttattcaaataagtaaggtaggaggtacttagtcaattgagcagctaattggctaaaagtgtcttgagcacaagataagcatgtactgaaaaactgagtatctcttgtccattgttaactgtatttctaatggttgattgcatttaaattaaataattcacccctacaa

SEQ ID NO: 287858 - DNA, 396 bp, Artificial Sequence
  derived and/or modified sequence
atggagatcaaggaggagggcgccagcgaggagggccagcacttcctgcccacagcacaggctaacgatcccggagactgccagttcacctccattcagaagaccccgaacgagccccaactggagttcattcttgcctgcaaggacctggtcgcccctgtgagagaccgcaaactgaacacacttgttcaaatatcggtaattcatccagttgagcaatcccttactaggtattcctccaccgaaattgtagaggggacgagagaccctctattcttgacaggggtcaccttcccatctgaatacccaatatatgaggaaacaaaaattaagctgaccgtgtatgacgtcaaggacaaatctcacgatactattgctaattccagccgcatctag

SEQ ID NO: 287859 - DNA, 255 bp, Artificial Sequence
  derived and/or modified sequence
atggagatcaaggaggagggcgccagcgaggagggccagcacttcctccccaccgcacaggctaatgacccgggtgattgtcagttcacaagtatccagaaaacccctaacgagcctcagctcgaattcatactcgcctgcaaagacttagtcgcaccagtccgggaccgaaaattgaacaccctggtccagatatccgttatccaccctgttgagcagtctctcaccaggtacagcagcaccgaaattgtgtag

SEQ ID NO: 287860 - DNA, 162 bp, Artificial Sequence
  derived and/or modified sequence
atggagatcaaggaggagggcgccagcgaggagggccagcacttcttaccaactgcacaagcaaatgacccaggcgattgtcagtttacaagtatacaaaagacacccaatgagccgcagctggagtttattctcgatttgaatcaggagctgcgagattag

SEQ ID NO: 287861 - DNA, 396 bp, Artificial Sequence
  derived and/or modified sequence
atggaaataaaggaggaaggggcaagcgaggaaggccaacactttcttcccacagcgcaggcaaatgaccctggcgattgccagttcacatccattcagaaaactccaaacgaacctcagctcgagttcattctcgcctgtaaggatctggtggcaccggttcgggatcgcaagcttaacacactggtacagatttctgttatccacccggtggagcagagcttgaccagatattcctccaccgagatcgtggaaggcaccagagaccccctgtttttgaccggggtgacattcccctctgagtaccccatttatgaggagactaaaataaaactgaccgtgtacgatgtgaaggataagagtcacgatactatcgccaactcaagtaggatctag

SEQ ID NO: 287862 - DNA, 255 bp, Artificial Sequence
  derived and/or modified sequence
atggaaattaaagaagagggagcttccgaagagggccaacactttctccccactgcacaggcaaacgatcccggtgactgtcagtttacctctatccagaaaacccccaacgagcctcagctggagtttatcttggcttgcaaggatctggtcgctcccgtccgggatagaaaactgaacacactcgtgcagatcagtgtgatccatccagtggagcagtccctcacccggtactctagcacagaaatcgtgtag

SEQ ID NO: 287863 - DNA, 162 bp, Artificial Sequence
  derived and/or modified sequence
atggaaattaaggaggagggcgcttctgaagaaggccagcacttcctccccactgctcaggcaaacgaccccggtgactgccagttcacatcgattcagaagacccctaatgaaccacagctggaattcatcttagatctcaaccaagagctcagggattag

SEQ ID NO: 287864 - DNA, 621 bp, Artificial Sequence
  derived and/or modified sequence
atgagcagcgagatgctgcccgccttcatcgagaccagcaacgtggacaagaagcagggcatcaacgaggaccaggaggagagccagaagcccagactgggcgagggctgcgagcccatcagcaagagacagatgaagaagctgatcaagcagaagcagtgggaggagcagagagagctgagaaagcagaagagaaaggagaagagaaagagaaagaagctggagagacagtgccagatggagcccaacagcgacggccacgacagaaagagagtgagaagagacgtggtgcacagcaccctgagactgatcatcgactgcagcttcgaccacctgatggtgctgaaggacatcaagaagctgcacaagcagatccagagatgctacgccgagaacagaagagccctgcaccccgtgcagttctacctgaccagccacggcggccagctgaagaagaacatggacgagaacgacaagggctgggtgaactggaaggacatccacatcaagcccgagcactacagcgagctgatcaagaaggaggacctgatctacctgaccagcgacagccccaacatcctgaaggagctggacgagagcaaggcctacgtgatcggctag

SEQ ID NO: 287865 - DNA, 603 bp, Artificial Sequence
  derived and/or modified sequence
atgagcagcgagatgctgcccgccttcatcgagaccagcaacgtggacaagaagcagggcatcaacgaggaccaggaggagagccagaagcccagactgggcgagggctgcgagcccatcagcaagagacagatgaagaagctgatcaagcagaagcagtgggaggagcagagagagctgagaaagcagaagagaaaggagaagagaaagagaaagaagctggagagacagtgccagatggagcccaacagcgacggccacgacagaaagagagtgagaagagacgtggtgcacagcaccctgagactgatcatcgactgcagcttcgaccacctgatggtgctgaaggacatcaagaagctgcacaagcagatccagagatgctacgccgagaacagaagagccctgcaccccgtgcagttctacctgaccagccacggcggccagctgaagaagaacatggacgagaacgacaagggctgggtgaactggaaggacatccacatcaagcccgagcactacagcgagctgatcaagaaggaggacctgatctacctgaccagcgacagccccaacatcctgaaggagctggacgagagctag

SEQ ID NO: 287866 - DNA, 621 bp, Artificial Sequence
  derived and/or modified sequence
atgtcttctgaaatgctgcctgctttcatcgagacctctaacgtcgacaagaagcagggaatcaacgaggatcaggaagagtcacagaaacctcgcctcggcgaaggctgcgagccaatcagcaaacgtcagatgaagaaactcatcaagcaaaaacagtgggaggaacaaagggaacttcgaaaacagaagcggaaggaaaaaaggaagagaaagaaactggagaggcaatgtcagatggaaccaaatagtgatggccatgatagaaagagggttcggcgagacgtggttcacagcaccctgaggctgataattgactgctccttcgaccatctgatggtactgaaggatattaagaaactgcacaaacaaattcaacgatgctacgccgagaaccggcgagctctgcatcccgtgcagttctatctgacaagccacggcggccagctgaagaagaacatggacgagaacgataaaggctgggtgaactggaaagatattcacatcaagccggaacattatagtgagttaattaaaaaggaggacctgatctacctgacctccgacagccccaatattctgaaggaattagatgagtcaaaggcatatgttattgggtag

SEQ ID NO: 287867 - DNA, 603 bp, Artificial Sequence
  derived and/or modified sequence
atgtcatctgagatgctaccagctttcattgagactagcaatgtggacaagaagcaaggaataaacgaagatcaggaggagtctcaaaagcctcgcctgggggaaggttgcgagcctatctcgaagcgccagatgaagaagctcattaaacagaagcagtgggaggaacagagggagctgcggaagcagaagcggaaagaaaagagaaaacggaagaagttggaacgacagtgccagatggaaccgaattctgatggtcatgaccgcaaacgcgtgagaagggatgtggtgcacagtactctgcgcctcattattgactgctccttcgatcatctgatggtactcaaggacataaagaagctgcataagcaaattcagcgttgctacgcggaaaataggagggcactacacccagtgcagttctacttgacatcccatggcggccagctcaaaaagaatatggatgagaacgataaggggtgggtaaattggaaggacatccacattaaacccgagcactattcggaactgatcaagaaagaagacctcatatacttgactagcgattcaccaaacatactgaaagagctggacgaaagttag

SEQ ID NO: 287868 - DNA, 621 bp, Artificial Sequence
  derived and/or modified sequence
atgagcagcgagatgctgcctgccttcatcgagaccagcaatgtggacaagaagcagggcatcaatgaagaccaggaggagagccagaagccccggctgggggagggctgtgagcccatcagcaagaggcagatgaagaagctgatcaagcagaagcagtgggaggagcagcgggagctgaggaagcagaagaggaaggagaagaggaagaggaagaagctggagcggcagtgccagatggagcccaacagtgatggccatgacaggaagagggtgagaagagatgtggtgcacagcaccctgcggctcatcatcgactgcagctttgaccacctgatggtgctgaaggacatcaagaagctgcacaagcagatccagcgctgctacgcagaaaatagaagagccctgcaccctgtgcagttctacctgaccagccacggcggccagctgaagaagaacatggatgaaaatgacaagggctgggtgaactggaaggacatccacatcaagccagagcactacagcgagctgatcaagaaggaggacctgatctacctgaccagtgacagccccaacatcctgaaggagctggatgagagcaaggcctacgtgattggatag

SEQ ID NO: 287869 - DNA, 603 bp, Artificial Sequence
  derived and/or modified sequence
atgagcagcgagatgctgcctgccttcatcgagaccagcaatgtggacaagaagcagggcatcaatgaagaccaggaggagagccagaagccccggctgggggagggctgtgagcccatcagcaagaggcagatgaagaagctgatcaagcagaagcagtgggaggagcagcgggagctgaggaagcagaagaggaaggagaagaggaagaggaagaagctggagcggcagtgccagatggagcccaacagtgatggccatgacaggaagagggtgagaagagatgtggtgcacagcaccctgcggctcatcatcgactgcagctttgaccacctgatggtgctgaaggacatcaagaagctgcacaagcagatccagcgctgctacgcagaaaatagaagagccctgcaccctgtgcagttctacctgaccagccacggcggccagctgaagaagaacatggatgaaaatgacaagggctgggtgaactggaaggacatccacatcaagccagagcactacagcgagctgatcaagaaggaggacctgatctacctgaccagtgacagccccaacatcctgaaggagctggatgagagctag

SEQ ID NO: 287870 - DNA, 621 bp, Artificial Sequence
  derived and/or modified sequence
atgagcagcgagatgctgcccgccttcatcgagaccagcaacgtggacaaaaaacaagggatcaacgaagaccaagaagagagccaaaagccaaggctaggggagggctgtgaaccgatttcaaaaagacagatgaagaaactcatcaagcagaagcagtgggaagagcaacgcgagcttaggaagcagaaaagaaaagaaaaaagaaagcgcaaaaagctagaacgccaatgtcagatggaacccaacagtgatggccacgatcgcaaacgggtaagacgcgacgtcgttcacagtactctgcggctgatcattgactgctcatttgatcatctgatggtgctgaaggacatcaaaaagctgcacaagcagatccagaggtgctacgctgaaaacagaagggcactgcatcccgtgcaattctacttaaccagtcacggcggccagctgaagaaaaatatggatgagaatgataagggctgggtgaattggaaagacatacacattaaacccgaacactactcagagcttatcaagaaggaagatctaatttatctgacgtccgactcacccaacatccttaaagagctggacgagtccaaagcttacgtgattggatag

SEQ ID NO: 287871 - DNA, 603 bp, Artificial Sequence
  derived and/or modified sequence
atgagcagcgagatgctgcccgccttcatcgagaccagcaacgtggataagaagcaggggatcaacgaggaccaggaggaatctcagaagccaaggctgggagaaggctgcgaacctatcagcaagcgtcaaatgaagaaactgatcaaacagaagcaatgggaagagcagagggagctccgaaagcagaagaggaaggagaagagaaaacgaaagaaactggaacgacagtgtcaaatggagccgaattcagacgggcacgaccgtaagcgcgtgcggcgagatgtggtgcactcgacactgcgactgatcatagattgttcctttgaccacctgatggttctaaaagatattaagaagctgcataagcagattcaacggtgctacgctgagaacagaagggctttgcaccccgtgcagttctacttgaccagccacggcggtcagctcaagaaaaacatggacgagaatgacaagggctgggtaaactggaaggatatccatatcaaacctgaacattattcagaactgattaagaaggaagacctgatttacctgaccagcgacagcccgaatatcctgaaagagctggacgagagttag

SEQ ID NO: 287872 - DNA, 621 bp, Artificial Sequence
  derived and/or modified sequence
atgtcttctgagatgctacccgcattcattgagacttccaatgtggacaagaaacagggcattaacgaagaccaggaggagtctcagaaaccgcgacttggagaggggtgtgaacctatttcaaaacggcagatgaagaagttaattaaacagaagcagtgggaagagcaaagggaactgaggaagcagaagaggaaggaaaagcgcaaacgcaaaaagcttgagaggcaatgccagatggagccaaatagtgatgggcatgaccgcaagagagtcaggcgcgacgtagtgcattccaccctgaggctaattattgattgtagctttgatcacctgatggtgctaaaggacataaaaaaactccataagcagattcagcggtgttatgccgagaaccgccgtgcgttacaccccgtgcagttctacctcactagccacggagggcagctgaagaaaaatatggatgagaatgacaagggttgggtaaactggaaggacatccacattaagcctgagcactactccgagctaatcaaaaaagaggatctgatttacctgacctccgatagccctaatatcttgaaggagctggacgaaagtaaggcttacgtcatcggttag

SEQ ID NO: 287873 - DNA, 603 bp, Artificial Sequence
  derived and/or modified sequence
atgagcagcgagatgctaccagccttcattgagacttcaaatgtggacaagaagcagggaattaatgaggaccaggaggagtctcagaaacctaggctgggcgagggatgtgagcctattagtaagcgacaaatgaaaaaattaattaaacagaagcaatgggaagagcagcgcgaattgagaaaacagaagaggaaagagaaacggaaacgaaagaagctggaaaggcagtgccagatggaaccgaactcagacggccacgatcgtaagagggtcaggcgcgatgtcgtccattcaactctgaggctgataatcgactgctctttcgaccacctaatggtgttgaaggatattaaaaagctgcacaagcagattcagagatgctatgccgaaaatagaagagctctccacccagtgcaattctacctgaccagccacggaggccagttgaagaagaacatggacgagaacgacaaagggtgggtcaactggaaagacatccacattaagcccgagcattacagcgagcttattaaaaaggaggatctcatctacctgaccagtgactctcctaatattctgaaggaactcgatgaatcttag

SEQ ID NO: 287874 - DNA, 802 bp, Artificial Sequence
  derived and/or modified sequence
ccgcggcctacccagctgctccctggttcgccagagacagcttaatcccgtctctgaaatgcgtttgctggctgggagcctagaagggatagtgggcgaggctccgccccgtggtggggcgctttccgtcggcgtgtgttttggggttgccatcggcccgtagtatgtgaaaaaggcaccaaataatgtcatctgaaatgttgccagcatttattgaaacttctaatgttgacaaaaagcaaggcataaatgaagatcaagaggagagccagaagccaagattaggtgaagggtgtgaaccaatatctaaacgacaaatgaaaaaactaataaaacagaaacaatgggaagagcaacgggaactccgcaaacaaaagcgaaaagaaaaacgcaagaggaaaaaattagagcgacaatgtcaaatggaaccaaactcagatggacatgacagaaaacgtgttcgaagagatgttgttcatagcacccttcgccttattattgactgtagttttgatcacttgatggtattaaaggacattaagaaacttcataagcagattcaacgatgttacgcagaaaaccgacgggcactgcatcctgtgcagttttacttgacaagccacggaggccagctgaaaaagaacatggatgaaaatgacaaaggatgggtcaactggaaggatatccatatcaaaccagagcactatagtgaactcataaagaaagaagacctgatttaccttacgtcagattcacctaatatactgaaggaattagatgaatcaaaggcctatgtgattgg

SEQ ID NO: 287875 - DNA, 788 bp, Artificial Sequence
  derived and/or modified sequence
ctacccagctgctccctggttcgccagagacagcttaatcccgtctctgaaatgcgtttgctggctgggagcctagaagggatagtgggcgaggctccgccccgtggtggggcgctttccgtcggcgtgtgttttggggttgccatcggcccgtagtatgtgaaaattgtttttcagaggcaccaaataatgtcatctgaaatgttgccagcatttattgaaacttctaatgttgacaaaaagcaaggcataaatgaagatcaagaggagagccagaagccaagattaggtgaagggtgtgaaccaatatctaaacgacaaatgaaaaaactaataaaacagaaacaatgggaagagcaacgggaactccgcaaacaaaagcgaaaagaaaaacgcaagaggaaaaaattagagcgacaatgtcaaatggaaccaaactcagatggacatgacagaaaacgtgttcgaagagatgttgttcatagcacccttcgccttattattgactgtagttttgatcacttgatggtattaaaggacattaagaaacttcataagcagattcaacgatgttacgcagaaaaccgacgggcactgcatcctgtgcagttttacttgacaagccacggaggccagctgaaaaagaacatggatgaaaatgacaaaggatgggtcaactggaaggatatccatatcaaaccagagcactatagtgaactcataaagaaagaagacctgatttaccttacgtcagattcacctaatatactgaaggaattagatgaatc

SEQ ID NO: 287876 - protein, 208 aa, Artificial Sequence
  derived and/or modified sequence
MAGTARHDREMAIQAKKKLTTATDPIERLRLQCLARGSAGIKGLGRVFRIMDDDNNRTLDFKEFMKGLNDYAVVMEKEEVEELFRRFDKDGNGTIDFNEFLLTLRPPMSRARKEVIMQAFRKLDKTGDGVITIEDLREVYNAKHHPKYQNGEWSEEQVFRKFLDNFDSPYDKDGLVTPEEFMNYYAGVSASIDTDVYFIIMMRTAWKL

SEQ ID NO: 287877 - protein, 190 aa, Artificial Sequence
  derived and/or modified sequence
MAGTARHDREMAIQAKKKLTTATDPIERLRLQCLARGSAGIKGLGRVFRIMDDDNNRTLDFKEFMKGLNDYAVVMEKEEVEELFRRFDKDGNGTIDFNEFLLTLRPPMSRARKEVIMQAFRKLDKTGDGVITIEDLREVYNAKHHPKYQNGEWSEEQVFRKFLDNFDSPYDKDGLVTPEEFMNYYAGVSA

SEQ ID NO: 287878 - DNA, 969 bp, Artificial Sequence
  derived and/or modified sequence
aaggtggcttgggagggaccagttttcctagatgcaggagacagcgtccatagtttcagttcgaagcaactggtggcaaaaggttagcatttaagatggcagggacagcgcgccatgaccgagagatggcgatccaggccaagaaaaagctcaccacggccaccgaccccattgaaagactccgactgcagtgcctggccaggggctctgctgggatcaaaggacttggcagagtgtttagaattatggatgacgataataatcgaacccttgattttaaagaatttatgaaagggttaaatgattatgctgtggtcatggaaaaagaagaggtggaagaacttttccggaggtttgataaagatggaaatggaacaatagacttcaatgaatttcttctcacattaagacctccaatgtccagagccagaaaagaggtaatcatgcaagcttttagaaagttagacaagactggagatggtgttataacaatcgaagaccttcgtgaagtatataatgcaaaacaccacccaaagtaccagaatggggaatggagtgaggaacaagtatttaggaaatttctggataactttgattcaccctatgacaaagatggattggtgacccctgaggagttcatgaactactatgcaggtgtgagcgcatccattgacactgatgtgtacttcatcatcatgatgagaaccgcctggaagctttaagcacatgacctggggaccaggccctgggacagccatgtggctccaaatgactaaatgtcagctcaaaaaccagaatcgtatttgatttcacactcatcctaatgtttttttctgtgtcaaaatattgcattttctggggccaaaaaacaggcagaaataaaagacattgagtagccaactgtgagtttgccttgcctaagactgtttcctttgttctaaaataggacttaaataaaatgagctctgt

SEQ ID NO: 287879 - DNA, 1004 bp, Artificial Sequence
  derived and/or modified sequence
gagaaaaggcagaaccagagtagagattgacagtgagctgagccaatcaggctgtgaatctgcagcagtgatcccaggtcctccaattaatactaagagagtggaccagggcccctgaggaagacagatggcagggacagcgcgccatgaccgagagatggcgatccaggccaagaaaaagctcaccacggccaccgaccccattgaaagactccgactgcagtgcctggccaggggctctgctgggatcaaaggacttggcagagtgtttagaattatggatgacgataataatcgaacccttgattttaaagaatttatgaaagggttaaatgattatgctgtggtcatggaaaaagaagaggtggaagaacttttccggaggtttgataaagatggaaatggaacaatagacttcaatgaatttcttctcacattaagacctccaatgtccagagccagaaaagaggtaatcatgcaagcttttagaaagttagacaagactggagatggtgttataacaatcgaagaccttcgtgaagtatataatgcaaaacaccacccaaagtaccagaatggggaatggagtgaggaacaagtatttaggaaatttctggataactttgattcaccctatgacaaagatggattggtgacccctgaggagttcatgaactactatgcaggtgtgagcgcatccattgacactgatgtgtacttcatcatcatgatgagaaccgcctggaagctttaagcacatgacctggggaccaggccctgggacagccatgtggctccaaatgactaaatgtcagctcaaaaaccagaatcgtatttgatttcacactcatcctaatgtttttttctgtgtcaaaatattgcattttctggggccaaaaaacaggcagaaataaaagacattgagtagccaactgtgagtttgccttgcctaagactgtttcctttgttctaaaataggacttaaataaaatgagctctgtaaa

SEQ ID NO: 287880 - DNA, 665 bp, Artificial Sequence
  derived and/or modified sequence
aaggtggcttgggagggaccagttttcctagatgcaggagacagcgtccatagtttcagttcgaagcaactggtggcaaaaggttagcatttaagatggcagggacagcgcgccatgaccgagagatggcgatccaggccaagaaaaagctcaccacggccaccgaccccattgaaagactccgactgcagtgcctggccaggggctctgctgggatcaaaggacttggcagagtgtttagaattatggatgacgataataatcgaacccttgattttaaagaatttatgaaagggttaaatgattatgctgtggtcatggaaaaagaagaggtggaagaacttttccggaggtttgataaagatggaaatggaacaatagacttcaatgaatttcttctcacattaagacctccaatgtccagagccagaaaagaggtaatcatgcaagcttttagaaagttagacaagactggagatggtgttataacaatcgaagaccttcgtgaagtatataatgcaaaacaccacccaaagtaccagaatggggaatggagtgaggaacaagtatttaggaaatttctggataactttgattcaccctatgacaaagatggattggtgacccctgaggagttcatgaactactatgcaggtgtgagcgca

SEQ ID NO: 287881 - protein, 436 aa, Artificial Sequence
  derived and/or modified sequence
MTAVYMNGGGLVNPHYARWDRRDSVESGCQTESSKEGEEGQPRQLTPFEKLTQDMSQDEKVVREITLGKRIGFYRIRGEIGSGNFSQVKLGIHSLTKEKVAIKILDKTKLDQKTQRLLSREISSMEKLHHPNIIRLYEVVETLSKLHLVMEYAGGGELFGKISTEGKLSEPESKLIFSQIVSAVKHMHENQIIHRDLKAENVFYTSNTCVKVGDFGFSTVSKKGEMLNTFCGSPPYAAPELFRDEHYIGIYVDIWALGVLLYFMVTGTMPFRAETVAKLKKSILEGTYSVPPHVSEPCHRLIRGVLQQIPTERYGIDCIMNDEWMQGVPYPTPLEPFQLDPKHLSETSTLKEEENEVKSTLEHLGITEEHIRNNQGRDARSSITGVYRIILHRVQRKKALESVPVMMLPDPKERDLKKGSRVYRGIRHTSKFCSIL

SEQ ID NO: 287882 - DNA, 1311 bp, Artificial Sequence
  derived and/or modified sequence
atgaccgccgtgtacatgaacggcggcggcctggtgaacccccactacgccagatgggacagaagagacagcgtggagagcggctgccagaccgagagcagcaaggagggcgaggagggccagcccagacagctgacccccttcgagaagctgacccaggacatgagccaggacgagaaggtggtgagagagatcaccctgggcaagagaatcggcttctacagaatcagaggcgagatcggcagcggcaacttcagccaggtgaagctgggcatccacagcctgaccaaggagaaggtggccatcaagatcctggacaagaccaagctggaccagaagacccagagactgctgagcagagagatcagcagcatggagaagctgcaccaccccaacatcatcagactgtacgaggtggtggagaccctgagcaagctgcacctggtgatggagtacgccggcggcggcgagctgttcggcaagatcagcaccgagggcaagctgagcgagcccgagagcaagctgatcttcagccagatcgtgagcgccgtgaagcacatgcacgagaaccagatcatccacagagacctgaaggccgagaacgtgttctacaccagcaacacctgcgtgaaggtgggcgacttcggcttcagcaccgtgagcaagaagggcgagatgctgaacaccttctgcggcagccccccctacgccgcccccgagctgttcagagacgagcactacatcggcatctacgtggacatctgggccctgggcgtgctgctgtacttcatggtgaccggcaccatgcccttcagagccgagaccgtggccaagctgaagaagagcatcctggagggcacctacagcgtgcccccccacgtgagcgagccctgccacagactgatcagaggcgtgctgcagcagatccccaccgagagatacggcatcgactgcatcatgaacgacgagtggatgcagggcgtgccctaccccacccccctggagcccttccagctggaccccaagcacctgagcgagaccagcaccctgaaggaggaggagaacgaggtgaagagcaccctggagcacctgggcatcaccgaggagcacatcagaaacaaccagggcagagacgccagaagcagcatcaccggcgtgtacagaatcatcctgcacagagtgcagagaaagaaggccctggagagcgtgcccgtgatgatgctgcccgaccccaaggagagagacctgaagaagggcagcagagtgtacagaggcatcagacacaccagcaagttctgcagcatcctgtag

SEQ ID NO: 287883 - DNA, 1311 bp, Artificial Sequence
  derived and/or modified sequence
atgacggcagtttatatgaacggggggggattggtgaacccacattatgctcgatgggaccgccgcgacagtgtcgagtctggctgtcagacagaaagctcaaaagagggggaagaaggccaacctagacaattgaccccctttgagaaacttactcaagacatgtctcaggacgagaaagtggtgcgggaaattacactcggaaagcggattggtttctacaggatccggggagagatcggttccggcaatttcagccaggtcaagctcgggatccactccctgacaaaggagaaggtggccataaaaattctggataaaactaagcttgaccaaaaaacccagagactgctgagcagagaaatctctagcatggaaaagctccatcatcctaatattatccggctgtacgaggtcgtggagacgctttccaaactgcatcttgtcatggagtacgcaggtgggggagagctcttcggtaagataagcacagagggcaaattgagcgagcccgaaagtaagctgatttttagtcaaattgtgagcgccgtgaagcatatgcatgagaaccagatcattcatcgagatcttaaggcggaaaatgtgttctacacctctaatacatgtgtgaaggtgggggacttcgggttcagcacggtgtccaagaaaggagagatgctcaacactttttgcgggagcccaccctatgcggctcccgagctgttccgagacgagcattacattggcatctatgtggatatctgggccttgggcgttctgttatactttatggttaccgggacaatgcctttcagggcagagacagtggctaaactcaagaaaagtattctggagggtacatacagcgttccgccccacgtttctgaaccttgccacaggctgatccgcggagtgctgcagcaaatacccactgagcgctatgggattgactgtattatgaatgatgaatggatgcagggagtgccttaccccactcccctggaaccatttcagctggacccaaaacatttatcagagacgtctacgctaaaagaagaggaaaacgaggttaagtctactctcgagcacctgggcatcacagaagaacatatccggaacaaccagggaagagacgcccgttcatcgattacaggagtttataggattatccttcaccgtgtgcaaaggaagaaggctttggagtctgtgcccgttatgatgctccccgatccaaaagaacgcgacctaaaaaaaggaagcagagtctacaggggaatccgtcacacatcgaaattctgttccatcctgtag

SEQ ID NO: 287884 - DNA, 1311 bp, Artificial Sequence
  derived and/or modified sequence
atgacagcggtttatatgaacggcggcggcctggtgaatccacactacgctcggtgggaccgcagagactctgtggagtcggggtgccagacagagtcaagtaaagaaggtgaggaaggccaacctcggcagttgaccccgttcgaaaaactaactcaggacatgagtcaagacgaaaaggtcgtgagagaaattactcttgggaaaaggataggattctacagaatccggggcgagatcggctcaggaaacttcagccaggtcaagctaggcatccactctctgaccaaagaaaaagtggctataaagatactggataaaactaagctagatcagaagacccagcggctactctcacgcgagatttcttctatggagaaacttcaccacccaaacatcattagactgtacgaggtggtcgaaacgctgagcaaactgcatctggttatggagtacgctggcgggggcgaactatttggcaagattagtactgaagggaagctgtcggagccagagtctaaactgatcttctctcagatcgttagcgccgttaagcacatgcacgagaatcaaattattcaccgagacctgaaggctgagaatgttttctataccagcaatacgtgtgtaaaagtcggggactttggcttctccaccgtctctaaaaagggagagatgctgaataccttctgcgggagtccgccttacgcagcaccagagctgttcagagacgagcattatattgggatctatgtcgatatttgggccctcggggtattgctgtatttcatggttacaggtaccatgcctttccgtgcagagacggtcgccaaactcaagaagtccatcctcgaggggacctatagcgtgccccctcatgttagtgagccctgccaccgtctaattagaggagttcttcaacagatccccacagaaagatatgggattgattgtatcatgaatgatgagtggatgcaaggcgtcccatatccgacccccctggaaccatttcaacttgatccaaagcacctgtctgagacctctaccctcaaggaggaagagaatgaggtgaagtcaaccctggaacacctgggcatcacggaggagcacatccggaataatcagggacgcgatgcccggagctccattacaggagtttatagaatcatcctgcatcgggttcagcgtaaaaaggctctcgaatctgtgcccgttatgatgcttccggacccgaaagagcgggacctgaagaagggttcccgcgtctatcggggcattcgtcacacatccaaattttgcagtatcctttag

SEQ ID NO: 287885 - DNA, 1311 bp, Artificial Sequence
  derived and/or modified sequence
atgacagctgtgtacatgaatggaggcggcctggtgaacccccactacgcccgctgggacagaagagacagcgtggagagcggctgccagacagagagcagcaaggagggggaggagggccagccccggcagctgaccccatttgagaagctgacccaggacatgagccaggatgagaaggtggtgcgggagatcaccctgggcaagagaattggcttctaccgcatccggggggagatcggcagcggcaacttcagccaggtgaagctgggcatccacagcctgaccaaggagaaggtggccatcaagatcctggacaagaccaagctggaccagaagacccagaggctgctgagccgggagatcagctccatggagaagctgcaccaccccaacatcatccggctgtatgaggtggtggagaccctgagcaagctgcacctggtgatggagtatgccggcggcggggagctgtttgggaagatcagcacagagggcaagctgtctgagcctgagagcaagctgatcttcagccagatcgtgtctgctgtgaagcacatgcatgagaaccagatcatccaccgggacctgaaggccgagaatgtgttctacaccagcaacacctgtgtgaaggtgggggactttggcttcagcacagtgtccaagaagggggagatgctgaacaccttctgtggcagccccccctatgctgcccctgagctgttcagagatgagcactacatcggcatctacgtggacatctgggccctgggcgtgctgctgtacttcatggtgacaggcaccatgcccttccgggcagagaccgtggccaagctgaagaagagcatcctggagggcacctacagcgtgccccctcatgtgtctgagccctgccacaggctcatccggggcgtgctgcagcagatccccacagaaagatatggcatcgactgcatcatgaatgatgagtggatgcagggcgtgccctaccccacccccctggagcccttccagctggaccccaagcacctgtctgagaccagcaccctgaaggaggaggagaatgaggtgaagagcaccctggagcacctgggcatcacagaggagcacatccggaacaaccagggcagagatgcccggagcagcatcaccggggtgtaccgcatcatcctgcaccgggtgcagaggaagaaggccctggagagcgtgcctgtgatgatgctgcctgaccccaaggagcgggacctgaagaagggcagccgggtgtaccggggcatccgccacaccagcaagttctgcagcatcctgtag

SEQ ID NO: 287886 - DNA, 1311 bp, Artificial Sequence
  derived and/or modified sequence
atgaccgccgtgtacatgaacggcggcggcctggtgaacccccactatgctcgatgggatcgtcgggatagtgtggaatcaggctgccagacagagagcagcaaggagggggaagaaggccagccacgccaactcacccccttcgagaagcttacgcaagacatgagccaggatgaaaaggtggtgagggaaattactctcggcaaacgaatcgggttttatcgaattcgaggcgaaatcgggtcagggaacttttcgcaagtgaaactgggaatccattcacttactaaagaaaaggtggccatcaagatactagacaaaacaaagctcgatcaaaagacgcagcgactgctctcacgagagatcagcagcatggaaaagctgcatcatccaaatataattaggctgtatgaggttgtggagaccctttctaagctccatttggtcatggaatacgctggaggcggcgagttgtttgggaaaatctctaccgaaggcaagctcagcgagccagagtcgaagctgatatttagccaaattgtcagcgctgttaagcacatgcatgaaaaccagatcatccatcgcgacttaaaggccgaaaacgttttctacaccagtaacacttgcgtgaaggtgggtgatttcggattctcgactgtaagcaagaagggcgagatgctaaatactttttgcggctccccaccctacgccgcaccggagctctttcgcgatgagcactatatcggcatctacgtcgacatatgggcgttgggcgtattgttgtatttcatggtgaccggtacaatgccttttcgcgccgagactgttgctaaactcaaaaaatcgattctggaggggacatattcagtccccccacatgtgtctgagccatgtcacagactcattcggggcgttctgcagcagatccccactgagaggtatggcatcgactgcatcatgaacgatgaatggatgcaaggcgtgccttatcctaccccactggaacccttccagcttgatcctaaacacctttcagagacgagcactctgaaagaagaggagaacgaagtcaaaagtacactcgaacatttaggaataactgaagaacatattagaaacaaccagggtcgggacgctcgctcatctattacaggcgtttatagaatcatacttcaccgtgttcagcgcaaaaaagcgctggagtccgttccagtcatgatgctccccgatccgaaagagcgggacctgaaaaaggggtctagagtctaccggggaattcgacacacctcaaaattctgcagcatcctttag

SEQ ID NO: 287887 - DNA, 1311 bp, Artificial Sequence
  derived and/or modified sequence
atgaccgccgtgtacatgaacggcggcggcctggtgaacccccactatgccagatgggataggcgtgatagtgtggagagtggttgccagaccgagtcatcaaaggagggagaggaaggccagccacgccagctcacgcccttcgagaagctgactcaggacatgtcacaagatgagaaagtggtgcgggaaattaccttgggaaaacgaatcggattctatcggatccgtggggaaatcggctcgggcaacttcagccaagtgaagctggggatccactcattgactaaggaaaaagtggccattaaaatcctggataagaccaagctggatcaaaagacgcagaggttactgtctagggagatcagttctatggagaaactccaccacccgaatataatcaggctctacgaagttgtggagactctatcaaaactccacttggtgatggaatacgctggaggcggcgaattgtttgggaagatatctactgaaggaaagctcagtgaaccagagtctaaattaatcttctctcagatcgtgtccgccgtgaagcatatgcacgaaaaccagataatacatcgtgacttaaaggccgagaatgtgttctacacttctaacacctgtgttaaggtaggcgactttggttttagcaccgtgagcaagaaaggtgagatgttgaacactttctgtggaagcccaccatatgctgcaccggaactgtttagggatgaacattatatcggcatctacgtcgatatctgggctctaggcgtgcttctttattttatggttactggcactatgccattcagagccgagaccgttgcaaaactaaagaagagtatcctcgaaggcacttattcagtacccccgcacgttagcgaaccatgccaccggctgatcaggggggttctccagcaaatcccaactgaaaggtatggaatcgactgtatcatgaatgacgagtggatgcagggggttccataccccacacccttggaaccctttcaactggacccaaagcatctgagcgagacatcaacactgaaagaggaggagaacgaggtgaagtctacactggaacacctggggataaccgaggagcatatccggaacaaccaaggcagagacgccagatcgagtatcacgggcgtgtaccgcatcatcctgcatcgggtccagcggaagaaggccctggagtccgtccccgtgatgatgctgccagatccaaaagagagggatttaaaaaagggctcccgcgtgtatcgcggtattcgtcatacgagtaagttctgctctatactgtag

SEQ ID NO: 287888 - DNA, 1311 bp, Artificial Sequence
  derived and/or modified sequence
atgacggctgtgtacatgaacggcggtggactggtgaatcctcactatgccagatgggaccgcagggactcagtagaatctgggtgccagacagagagctctaaagagggtgaagaaggacagccgaggcagcttacaccgttcgagaaattaacccaagatatgagccaggacgagaaggtcgttcgcgaaataacactcgggaaaaggatcggcttctatcgcattcgaggagaaattggatccggaaatttttctcaagtcaagttggggatccactccttgacaaaagaaaaagtggccatcaagattctggacaagacaaagctggaccagaaaacccagaggctcctgagccgcgagatatcgtccatggagaagctgcaccaccccaacattatccgcctttacgaggtagtggagactctgtcaaaactgcacctcgttatggagtacgctggtgggggtgagttgtttggaaaaatctccacggagggaaaactttctgagcctgaaagcaaattgattttctctcagattgtgtctgcagttaagcatatgcatgagaatcagatcattcaccgcgacctgaaagccgagaatgtgttctacaccagcaacacatgcgtcaaagtgggcgacttcggcttctcaacggtgtctaagaaaggagagatgctcaacactttctgcgggtcaccgccttacgccgcaccagagctgtttcgggacgagcactacattggaatctacgtcgacatctgggcgcttggggtgttactctatttcatggtgacaggtaccatgccttttcgcgctgagaccgtcgctaaactaaagaaatctatattggaagggacctacagcgttcctccacatgtgtctgaaccatgccatcgcctgattcgtggggtgctgcagcagatcccaactgagagatatggcattgattgcatcatgaatgacgagtggatgcagggagttccataccccactcctttagagcccttccagctggatccgaagcatctgagcgaaacctctaccctgaaggaggaggagaatgaggtcaaatcgacactggagcacttggggataaccgaagaacatataaggaacaatcaaggtagggacgcccgttcctccattacaggcgtctataggatcatcctgcacagagtgcagcggaaaaaagctttggagtccgtcccagtaatgatgctgcccgatcctaaggaacgcgatcttaaaaaagggagtagggtctatcgcggtattcggcatactagcaagttctgtagcattttatag

SEQ ID NO: 287889 - DNA, 1311 bp, Artificial Sequence
  derived and/or modified sequence
atgactgctgtctacatgaatggcggagggctggttaatccacattacgcacgatgggacaggcgggactcagttgaaagtggatgccagacggagtcatctaaggagggcgaagaaggtcagccgaggcagttgacccccttcgagaagctgacacaggatatgtcccaggatgaaaaagtcgtgcgagagatcacacttggcaaacggatcgggttctatcgtattagaggcgaaatcggatcaggcaatttcagccaagtgaaactagggattcatagcctgaccaaagaaaaagttgcaataaagatcctggataagaccaaactcgaccaaaagacacagcggctcctttcacgtgaaatctcttctatggaaaaactccaccaccccaacatcattagattgtacgaagtggtggagactctttccaagttacacctggtgatggagtatgctgggggaggggaactgttcggtaaaatctcaacagagggcaagctgtctgaacccgagagcaagctcattttttcacagattgtatcagcagtcaagcacatgcacgagaatcaaatcattcatcgggacctgaaggccgagaacgtgttctacacgtcaaacacttgcgtgaaggttggcgattttggtttctctacagtgtcaaaaaagggtgagatgctcaacaccttctgcgggtcaccaccttacgccgctccagagttgtttcgtgacgagcattacataggcatttatgtggatatttgggcactcggcgtgctgctgtacttcatggtgaccggcacgatgcctttcagggccgagaccgtggcgaaactaaagaagtcaatcctagaaggaacatacagtgtccccccacatgtgagtgaaccctgtcaccgactaatcagaggtgtgctgcaacaaattcccactgagaggtacgggattgattgtatcatgaacgacgaatggatgcagggagtaccttaccctactccccttgagccatttcagctggatccgaaacacttgtcagaaacctccacccttaaggaagaagagaacgaagttaagtcgacgctcgaacacctcggcataactgaggaacatattaggaacaaccagggcagggacgcccgtagctcgattactggagtgtaccggatcattctgcatagagtgcagagaaagaaagcactcgaatccgtgccagtgatgatgcttccagaccctaaggagcgggatctcaaaaagggcagccgcgtatacagggggatccgccacacctccaaattttgtagcatcctgtag

SEQ ID NO: 287890 - DNA, 2313 bp, Artificial Sequence
  derived and/or modified sequence
ggggtttgccctgggccgctgccggtcaggtcggccgcccctgacagctccgggagcctcaagcgcgacagcggcgccctcacctcgggacatccacacaccgaccgctcctgctccagaggcaacaacccagcgcgcctagcctggcgccgtgcagcgaagcccaagagctggcctcgccacgaaggttgaaccagccaaattttcgagacagctcacggcttagaggaaggttcatctaaataaaggccggctaaagtgacattgcagggattaaatccttctttggctgcctgtgtgaccagaaggcttatttgcaagtttcttctttcctggggtccagattattaggtctccagcgccctgcagcttgacagaaagagaagcatgaaatgaaggtcagagatgagatcccgcagcagggacgtgggggcctcccaggggcatttacgcaccagagtgcaagattctctggccatcaagggaaatagcaaacagaagcctttgtcctggggcacagccacctaccacaaagcatcagactccacgtctggccagaaagttcctggagtcccatcaggccagtgggtatgtaacatgtgcctaattgtacagctagagcctgcaagttcaacgtgagggaaggtgggaaatgtcttgagtgaggcgagcagctcctggctgggctgggcagactcagctaccacgttcactgccttcctctcactaaagccgagagggaggctgctcagctctcaggaaaactcttttgaaccctgggcacctgctgtcctcagttggcatctcccaccctctgagcctcttctgctcctgcacaacctgcctcttcgctgagatggagacgtgagcccccgtggacgatgactgcagtgtatatgaatggaggtggcctggtgaacccccactatgcccggtgggatcggcgcgacagtgtagaaagtggctgtcagaccgagagtagcaaggagggtgaggagggacagccccgccagctgacgcccttcgagaaactgacacaggacatgtcccaggatgagaaggtggtgagggagatcacgctggggaaacggataggcttctaccgaattcgaggggaaatcggaagtggaaacttctcccaagtgaagcttgggattcactccctaaccaaagaaaaggtggccattaagatcctggacaagaccaagttagaccagaaaacccagaggctactatcccgagaaatctccagcatggaaaagctgcaccatcccaacatcatccgcctttacgaagtggtggagaccctatccaagctgcacttggtgatggagtatgcagggggtggggagctcttcggaaaaattagcactgaggggaagctctctgaaccagaaagcaagctcatcttctcccagattgtgtctgccgtgaagcacatgcatgaaaaccaaattattcatagagatctgaaagcagaaaatgtattctataccagtaatacttgtgtgaaggtgggcgattttggattcagcacagtaagcaaaaaaggtgaaatgctgaacactttctgtgggtctcctccctacgctgcgcctgaactcttccgggacgagcactacatcggcatttacgtggatatctgggccttgggggtgcttttgtacttcatggtgactggcaccatgccatttcgggcagaaaccgtggccaaactaaaaaagagcatcctcgagggcacatacagtgtaccgccgcacgtgtcagagccctgccaccgactcatccgaggagtccttcagcagatccccacggagaggtacggaatcgactgcatcatgaatgatgaatggatgcaaggggtgccataccctacacctttggaacctttccaactggatcccaaacatttgtcggaaaccagcactctcaaggaagaagaaaatgaggtcaaaagcactttagaacatttgggcattacagaagagcatattcgaaataaccaagggagagatgctcgcagctcaatcacaggggtctatagaattattttacatagagtccaaaggaagaaggctttggaaagtgtcccagtcatgatgctaccagaccctaaagaaagagacctcaaaaaagggtcccgtgtctacagagggataagacacacatccaaattttgctcgattttataaattgcactagactgcttgtaactaaccaagatgattgttgctgcttctaaatttttttcaaggacaacttgagtggagacatttttgtaatttttaaataaacttaaatttgagatatgca

SEQ ID NO: 287891 - DNA, 2929 bp, Artificial Sequence
  derived and/or modified sequence
agagccctaaggcaccagaccaaatctggagcgtttgttacaagggcagaagaccggcgtgatctccccacgcgcgccggccggtgctgctggtggagagaactgacatctaacgcatgtggcccaggagaacaaaaccttccattgcaccccacgccgcgactctccccagcgaaaggtgcttcttttggaagaccgcacgaagtaaggaagagcctcttttcctcttcctggatatccctccaggaatattagaagctccaggactccttgatacgaccaggaaaagatcgcaaccgggtctttaaaatatcgattccagccagcttctgcgtgcttgacacatcttggcagatggagaagtcaaggcaatagataacatgggcagcaaagattctgctatagcacttctttcctttctgttttttccttccctccttccctccttttccctcttctccctccctcctttcctcctcctcctctccccttctcttctcctcctccctccctccctttctccctttctcctctcttttccccttccctcccctgttttcgtcctcctgagtacagtagacaagagggctctctgtctaccccccctcccccaccccattcctcatcccgtttcaaaataagagcgaatgaatcacattctaagctcttacccgtgcagttctgacaagtttggaaattacacaaatcgcgtttgcaattgaggccgcgggaatccaaaagggaaacaaacgaaaccagatgaaaaaaagtgattccaagtcaagatttcaaatggaaatctaaggttgaaccagccaaattttcgagacagctcacggcttagaggaaggttcatctaaataaaggccggctaaagtgacattgcagggattaaatccttctttggctgcctgtgtgaccagaaggcttatttgcaagtttcttctttcctggggtccagattattaggtctccagcgccctgcagcttgacagaaagagaagcatgaaatgaaggtcagagatgagatcccgcagcagggacgtgggggcctcccaggggcatttacgcaccagagtgcaagattctctggccatcaagggaaatagcaaacagaagcctttgtcctggggcacagccacctaccacaaagcatcagactccacgtctggccagaaagttcctggagtcccatcaggccagtgggtatgtaacatgtgcctaattgtacagctagagcctgcaagttcaacgtgagggaaggtgggaaatgtcttgagtgaggcgagcagctcctggctgggctgggcagactcagctaccacgttcactgccttcctctcactaaagccgagagggaggctgctcagctctcaggaaaactcttttgaaccctgggcacctgctgtcctcagttggcatctcccaccctctgagcctcttctgctcctgcacaacctgcctcttcgctgagatggagacgtgagcccccgtggacgatgactgcagtgtatatgaatggaggtggcctggtgaacccccactatgcccggtgggatcggcgcgacagtgtagaaagtggctgtcagaccgagagtagcaaggagggtgaggagggacagccccgccagctgacgcccttcgagaaactgacacaggacatgtcccaggatgagaaggtggtgagggagatcacgctggggaaacggataggcttctaccgaattcgaggggaaatcggaagtggaaacttctcccaagtgaagcttgggattcactccctaaccaaagaaaaggtggccattaagatcctggacaagaccaagttagaccagaaaacccagaggctactatcccgagaaatctccagcatggaaaagctgcaccatcccaacatcatccgcctttacgaagtggtggagaccctatccaagctgcacttggtgatggagtatgcagggggtggggagctcttcggaaaaattagcactgaggggaagctctctgaaccagaaagcaagctcatcttctcccagattgtgtctgccgtgaagcacatgcatgaaaaccaaattattcatagagatctgaaagcagaaaatgtattctataccagtaatacttgtgtgaaggtgggcgattttggattcagcacagtaagcaaaaaaggtgaaatgctgaacactttctgtgggtctcctccctacgctgcgcctgaactcttccgggacgagcactacatcggcatttacgtggatatctgggccttgggggtgcttttgtacttcatggtgactggcaccatgccatttcgggcagaaaccgtggccaaactaaaaaagagcatcctcgagggcacatacagtgtaccgccgcacgtgtcagagccctgccaccgactcatccgaggagtccttcagcagatccccacggagaggtacggaatcgactgcatcatgaatgatgaatggatgcaaggggtgccataccctacacctttggaacctttccaactggatcccaaacatttgtcggaaaccagcactctcaaggaagaagaaaatgaggtcaaaagcactttagaacatttgggcattacagaagagcatattcgaaataaccaagggagagatgctcgcagctcaatcacaggggtctatagaattattttacatagagtccaaaggaagaaggctttggaaagtgtcccagtcatgatgctaccagaccctaaagaaagagacctcaaaaaagggtcccgtgtctacagagggataagacacacatccaaattttgctcgattttataaattgcactagactgcttgtaactaaccaagatgattgttgctgcttctaaatttttttcaaggacaacttgagtggagacatttttgtaatttttaaataaacttaaatttgagatatg

SEQ ID NO: 287892 - DNA, 471 bp, Artificial Sequence
  derived and/or modified sequence
atgcggggaggaggtggagtccccctcattcacttttccctccctgtctgctctccctttctttatctgtccttgcctgaaccccaggcaaagcaccagcggagaccaggttccgaacagggtgcacacgttgcgtctgtggaccaccctcccgcatgtacagcattgggcggaccgagaaacgccagaccatccgcaggtgggtcgctgttcacatctctccagccatctgaggatacatctgagtggggcgcagaacctgcggatggagaaaataagaacgacgacacattatacaccccagacgatctcagtataccaggccatttcgtgcccactgtgtgcccagctgagacgttaggctgctccagactagaattatctgtgatcggctttgaggaggggccaagcatggggactgctgtgtttcaattgcaatatctgctagatcttctgggatctcgactctag

SEQ ID NO: 287893 - protein, 601 aa, Artificial Sequence
  derived and/or modified sequence
MLSWNRVRAKLPSSQMVTTFGLAGIVGYHTVWGVTPALHSPLMSVTNAISGLTAVGGLALMGGHLYPSTTSQGLAALAAFISSVNIAGGFLVTQRMLDMFKRPTDPPEYNYLYLLPAGTFVGGYLAALYSGYNIEQIMYLGSGLCCVGALAGLSTQGTARLGNALGMIGVAGGLAATLGVLKPGPELLAQMSGAMALGGTIGLTIAKRIQISDLPQLVAAFHSLVGLAAVLTCIAEYIIEYPHFATDAAANLTKIVAYLGTYIGGVTFSGSLIAYGKLQGLLKSAPLLLPGRHLLNAGLLAASVGGIIPFMVDPSFTTGITCLGSVSALSAVMGVTLTAAIGGADMPVVITVLNSYSGWALCAEGFLLNNNLLTIVGALIGSSGAILSYIMCVAMNRSLANVILGGYGTTSTAGGKPMEISGTHTEINLDNAIDMIREANSIIITPGYGLCAAKAQYPIADLVKMLTEQGKKVRFGIHPVAGRMPGQLNVLLAEAGVPYDIVLEMDEINHDFPDTDLVLVIGANDTVNSAAQEDPNSIIAGMPVLEVWKSKQVIVMKRSLGVGYAAVDNPIFYKPNTAMLLGDAKKTCDALQAKVRESYQK

SEQ ID NO: 287894 - DNA, 1806 bp, Artificial Sequence
  derived and/or modified sequence
atgctaagctggaatagggtgcgggcaaagctgccgagcagtcagatggtcacaaccttcgggctcgccggtattgtcggttaccatactgtgtggggagtaacacctgcgctccacagccccctgatgagtgttaccaatgcaatctccggcctgacagcagtaggggggctcgcactgatggggggccacctgtacccttctaccacgtcccagggactagctgctctcgctgcattcatttcctccgtcaacatagcaggggggtttctagtgactcagcggatgctcgatatgttcaagagacctactgatccacccgaatataattatctctatctcttgccagcaggcactttcgtgggcggatatctggccgcactttacagtgggtataatattgaacagattatgtacctgggttccggtctttgttgtgtcggtgccctagccggactgtctacccaggggacagcaaggcttggtaacgctctgggtatgataggagtggccggcggcttggctgctacgcttggtgtgctgaagccaggaccagaactactcgcccagatgtccggagctatggcactcggcggcaccataggtttgacgatcgccaagagaatccagatttccgacctacctcaactggtcgccgcatttcatagtctagtcggccttgcggccgtcctcacttgtattgcagaatacattattgagtaccctcactttgcgaccgatgcagccgctaatcttactaagatagtggcttatctcggaacatacatagggggcgtgaccttttctggttctttgatcgcatacggtaagctgcagggactgttgaagtctgccccgctgcttctccctggaaggcaccttctgaacgccggcttactcgccgcttctgtaggagggattatcccttttatggtggatccgtctttcactacaggtattacctgcttggggagcgtaagcgctctgtccgctgtcatgggcgttaccttgacggcagcaattggaggagccgacatgccagtggtgatcaccgtcttgaacagttacagcggctgggctctgtgcgctgaaggcttcctcttgaacaacaatctgctaactattgtgggtgcccttattggctcgtctggagccattctgtcatacatcatgtgcgtagcaatgaaccgttccctcgcgaacgtcattctgggagggtacggaacaaccagtaccgcagggggcaaacccatggagatttccggaactcacaccgagattaatctggataatgccattgatatgataagagaggcaaattccatcataattacccctggttacggcctttgtgcagcaaaagctcaatatcccatcgcagacttggtgaagatgctgacagaacagggcaaaaaggtcaggtttggcatccacccagtggctggaagaatgccaggacagctgaatgttctgttggctgaagctggggtgccgtatgatatcgtgcttgaaatggacgaaattaatcatgacttccctgacaccgaccttgtcttagttatcggagcaaacgacacggtgaactctgctgcacaggaagatcccaacagcatcatagccgggatgcccgttctcgaggtttggaaatcaaagcaggtgatcgtgatgaaaagatccctgggagttggctatgctgcggttgacaatcctattttctacaagccaaataccgctatgctgctgggcgacgctaaaaagacgtgtgatgcccttcaagcaaaggtgcgagagtcctaccagaagtag

SEQ ID NO: 287895 - DNA, 1806 bp, Artificial Sequence
  derived and/or modified sequence
atgctgtcctggaacagagtgcgggccaagctgcccagcagccagatggtgaccaccttcggcctggccggcatcgtgggctaccacacagtgtggggcgtgaccccagccctgcacagccccctgatgtctgtgaccaatgccatcagcggcctgacagctgtgggcggcctggccctgatgggcggccacctgtaccccagcaccaccagccagggcctggccgccctggccgccttcatcagctctgtgaacattgctgggggcttcctggtgacccagaggatgctggacatgttcaagaggcccacagaccccccagagtacaactacctgtacctgctgcctgctggcacctttgtgggcggctacctggccgccctgtacagcggctacaacatcgagcagatcatgtacctgggcagcggcctgtgctgcgtgggcgccctggccggcctgagcacccagggcacagcccggctgggcaatgccctgggcatgattggagtggccggcggcctggccgccaccctgggcgtgctgaagccaggccctgagctgctggcccagatgtctggggccatggccctgggcggcaccatcggcctgaccatcgccaagaggatccagatcagtgacctgccccagctggtggccgccttccacagcctggtgggcctggccgctgtgctgacctgcatcgccgagtacatcatcgagtacccccactttgccacagatgctgctgccaacctgaccaagatcgtggcctacctgggcacctacatcggcggcgtgaccttcagcggcagcctgattgcctacggcaagctgcagggcctgctgaagagcgcccccctgctgctgcccggccgccacctgctgaatgccggcctgctggccgcctctgtgggcggcatcatccccttcatggtggaccccagcttcaccaccggcatcacctgcctgggctctgtgtctgccctgtctgctgtgatgggcgtgaccctgacagctgccatcggcggcgctgacatgcctgtggtgatcaccgtgctgaacagctacagcggctgggccctgtgtgccgagggcttcctgctgaacaacaacctgctgaccatcgtgggcgccctgattggcagcagcggggccatcctgagctacatcatgtgtgtggccatgaacagaagcctggccaacgtcatcctgggcggctacggcaccaccagcacagctgggggcaagcccatggagatcagcggcacccacacagagatcaacctggacaatgccatcgacatgatccgggaggccaacagcatcatcatcaccccaggctacggcctgtgtgccgccaaggcccagtaccccatcgctgacctggtgaagatgctgacagagcagggcaagaaggtgcgcttcggcatccaccctgtggccggccgcatgcctggccagctgaatgtgctgctggccgaggccggcgtgccctatgacatcgtgctggagatggatgagatcaaccacgacttcccagacacagacctggtgctggtgattggagccaatgacacagtgaacagcgctgcccaggaggaccccaacagcatcatcgccggcatgcctgtgctggaggtgtggaagagcaagcaggtgattgtgatgaagaggagcctgggcgtgggctatgctgctgtggacaaccccatcttctacaagcccaacacagccatgctgctgggagatgccaagaagacctgtgatgccctgcaggccaaggtgcgggagagctaccagaagtag

SEQ ID NO: 287896 - DNA, 1806 bp, Artificial Sequence
  derived and/or modified sequence
atgctgagctggaaccgggtgcgggccaagctgcccagcagccagatggtcaccacctttggcttggccggtatcgtgggatatcacacagtttggggggttacaccggccctgcacagtcctctgatgtcagtcactaacgctatcagcgggctgacagcggtgggcgggcttgctcttatgggcggacatctctacccctcaacgacatcccaaggacttgcagctctggccgcatttatcagctctgtgaatatagccggcggtttcctggtgacacagaggatgctggatatgttcaagcgacccactgaccctccagaatataattatctatatttgcttcccgccggcaccttcgtcggcggataccttgcagccctctactcaggctacaatattgagcagattatgtacctgggctccggtttgtgttgcgtgggagcactggccggactgtcaactcagggcacagccaggctcgggaacgcactcggaatgatcggggtagcggggggtctggccgccactctgggcgtgcttaagccagggcccgagttgctggcacaaatgtccggggccatggccctgggcgggacgattggactgacaatcgccaaaagaatccagatctctgatttaccacaactcgtggcggcctttcacagccttgtgggactggcagctgttttgacctgtatagccgagtatatcatcgagtatccgcattttgctaccgacgcagccgccaatctgacgaagatagtagcgtatctcggaacctatatcggcggagttacattttctggaagcctcatcgcatacggcaagttacagggcctgctgaaatcagccccactgcttctccccggtagacacttgctgaatgcaggattgctcgctgccagtgtgggtggaattatcccttttatggttgatccgtcctttaccaccgggatcacttgccttgggtcagtttccgctctctctgctgtgatgggtgtgaccctcacagccgcaatcggcggtgcggacatgccggtcgtcattactgtcctgaattcctacagtggctgggcactttgtgctgagggtttcctgctgaacaacaacttgttaacaatcgtgggagcacttattggctctagtggggcaatcctgtcgtacattatgtgtgtggctatgaaccggtctcttgccaacgtcatcttaggcggctacggaaccacctccacagccgggggcaaaccaatggaaatctccggtacacacactgaaatcaacctggacaacgccattgatatgatccgcgaagctaacagtataatcattactcccggatacggcctatgcgcagctaaagctcaatatcccatcgctgatctggtaaagatgctaacagagcagggcaaaaaagtacgcttcggtatccatccagtcgccggccggatgcccggacagttgaatgtgctgctggctgaagctggcgtaccctacgacattgtcctggagatggacgaaattaaccatgatttcccggatacggatttggtgctggtcatcggagcgaacgacacggtgaactctgctgcgcaggaagatcccaattccattattgcggggatgcccgttttggaggtctggaaaagtaagcaggttattgtaatgaagagatccctgggggtgggatacgcggcagtcgataacccgatcttttacaagcctaacaccgcgatgcttcttggggatgccaaaaagacttgtgacgccctgcaggcgaaggtgcgcgaaagttaccaaaagtag

SEQ ID NO: 287897 - DNA, 2391 bp, Artificial Sequence
  derived and/or modified sequence
ctttcccttgggtcctctctgttacagaagttctgatttttcctagcgagctggaggaaaggcaggtacccggagtggagttatattacctgtttctttgttctgatgggaccccagagaggacatcacgctttgtaactggttcttcaaggggagaagcaaatgtgtccctgaaaacttcagctgccgcgtttggcaccagtgatttgccttcaaggaaactggggagtcagaaaattgggaactcatatcaacatggcaaacctattgaaaacagtggtgactggctgctggtgttcagaacttggtcaagcagggttttaatgttgtcgtggaatcgggtgcgggcgaagcttccaagttctcagatggtgaccacttttggcttggctggcattgtggggtatcataccgtctggggagtgacccctgctctccactcaccactgatgtctgtgacaaatgcaatctcagggctgactgcagttggtgggttggcactgatgggaggacatttgtatccttccacaacttctcagggccttgctgctcttgctgcattcatatcctctgtcaacattgcaggtggctttctggtgactcagagaatgctggacatgttcaagcgtcccactgaccccccagaatacaactacctgtacctgctccctgccggcacctttgttggtggatatttagctgccctctacagtggttataacattgaacagatcatgtacctaggctcgggtttgtgctgtgtcggtgccttggctggcctctccacccagggaacagcacgtcttggcaatgcactgggcatgattggggttgctggaggactggcagccaccctcggagtcctaaaaccgggcccagaattactagctcagatgtctggagcgatggctttgggtggtaccattggattgacaattgccaaacgcatccagatttctgatttacctcaattagttgctgcttttcacagtttagtgggtttggcagctgtacttacttgcatagctgagtacattatagaatatccacattttgctacggatgcagcagcaaatctcaccaagattgtggcctacctcggcacttacattggtggcgtcacctttagtgggtctctcattgcctatggaaaattgcagggtctcctgaaatctgcccctctcctactgcctggaaggcacttactcaatgcaggcttactggctgctagtgtgggcgggataatcccattcatggtggacccaagctttactactggcatcacctgtctgggttcagtgtctgctctctctgctgtcatgggtgtgactttgacagctgctattgggggtgctgacatgcccgtcgttatcactgtgctgaacagctactcaggctgggccctgtgtgcagagggcttcctgctcaacaacaatctgctgaccatcgtgggtgcactcataggctcgtctggtgctatcctgtcatacatcatgtgtgtggcaatgaatcgctccctggctaatgtgattcttggaggctatggcaccacttcaacagctggtggaaaacccatggaaatttctggcacacatacggaaatcaaccttgacaatgcaattgacatgattcgagaagctaatagcattattattacaccaggctatggtctctgtgcagccaaagctcaataccccattgctgatttggtaaagatgctcactgagcaaggcaaaaaagtcaggtttggaattcacccagttgcaggccgaatgcctggtcagcttaatgtgctgctggctgaggctggtgtgccatatgacattgtgttggaaatggatgagatcaaccatgattttccagatactgatttggtccttgtaattggagctaatgacactgttaattcagcagctcaagaagatcccaactctattattgcaggcatgccagtccttgaggtctggaaatcaaagcaggtgattgttatgaagaggtctttgggtgttggctatgctgcagtggacaatccaatcttctacaaacctaacacggccatgcttctaggtgatgccaagaaaacatgtgacgcgctccaggcgaaagttagagaatcctatcagaagtaaatattaaggatcaagctgttagctaataatgccacctctgcagttttgggaacaggcaaataaagtatcagtatacatggtgatgtacatctgtagcaaagctcttggagaaaatgaagactgaagaaagcaaagcaaaaactgtatagagagatttttcaaaagcagtaatccctcaattttaaaaaaggattgaaaattctaaatgtctttctgtgcatattttttgtgttaggaatcaaaagtattttataaaaggaga

SEQ ID NO: 287898 - DNA, 1806 bp, Artificial Sequence
  derived and/or modified sequence
atgctgtcttggaaccgtgtgcgagcaaaacttccgtcatcacaaatggtcacgacatttggtctggcgggaattgtggggtaccatacagtgtggggtgtcacccccgctcttcattctcctctgatgagtgtcacaaacgccatatccggcctcacagctgtcggcggactcgcgctcatgggcggacatctgtacccttccaccacttctcaagggttggccgctctggcagcatttatatctagtgttaatatagccggagggtttctggtaactcaaaggatgcttgacatgttcaagcgtcctacagaccctcccgagtacaattatctatatttgctgcccgcaggcacgtttgtaggtggctacctggccgcattatactcgggatacaacattgagcagattatgtacctcggttctggcctatgctgcgtcggagcgctggctgggctgtccacgcagggtacagccaggctcggtaacgcactcggaatgatcggcgtcgccggaggcttggccgctacccttggggtattaaaaccaggtcctgaattgttagcccaaatgtccggcgcaatggcacttggcggtacaataggcctgaccatcgcaaagcgtatccaaatttccgatctcccacaactcgtcgccgctttccactctcttgtgggactagccgctgtcctaacatgtatagctgaatacatcatcgaatatcctcatttcgctacggatgcagcagcgaatctaactaagattgttgcttacctcggtacctacattggcggtgtaacattctcaggctctttgatcgcatacggcaagctacagggcctgctgaagtctgcacccctcctgctccccggacgccacctactgaacgcagggctgcttgccgcttccgtgggcggaattatccccttcatggtggacccctccttcacaacgggcatcacctgtctggggtccgtgagcgcactcagcgccgtcatgggggtcaccttaaccgcggctatcggaggagccgacatgccagtggttatcaccgtgctcaatagttactcaggttgggctctctgcgccgagggctttcttctgaacaacaacttgttaactatcgtgggggcactgataggaagctccggggctatcctgtcatatattatgtgcgttgccatgaataggtccctggcaaatgtcattctaggcggttacggcacaacttccaccgcagggggtaaacctatggagataagcggaactcataccgagatcaacctggacaatgctattgatatgatccgtgaagccaatagcattatcataacacccggatatggactctgtgctgcaaaggcacagtatccgatagccgacttggttaaaatgctcactgagcaaggcaaaaaggtgcggttcggaattcaccctgtggcgggacgtatgcccggtcagttgaacgttctgctagctgaggccggtgtcccttacgatatcgtactggagatggacgagattaatcacgacttccccgataccgatctcgttctagtcatcggtgccaatgacacagttaactccgccgcacaggaggatcccaacagcattattgctggcatgccggttctagaggtgtggaagagcaagcaggttattgtgatgaagagaagtctgggtgttggttatgctgctgtagataaccctatcttctacaagcccaacacagctatgctcttgggggacgccaaaaaaacttgcgatgccttgcaggctaaagtgcgagaaagctatcagaagtag

SEQ ID NO: 287899 - DNA, 1806 bp, Artificial Sequence
  derived and/or modified sequence
atgctgagctggaacagagtgagagccaagctgcccagcagccagatggtgaccaccttcggcctggccggcatcgtgggctaccacaccgtgtggggcgtgacccccgccctgcacagccccctgatgagcgtgaccaacgccatcagcggcctgaccgccgtgggcggcctggccctgatgggcggccacctgtaccccagcaccaccagccagggcctggccgccctggccgccttcatcagcagcgtgaacatcgccggcggcttcctggtgacccagagaatgctggacatgttcaagagacccaccgacccccccgagtacaactacctgtacctgctgcccgccggcaccttcgtgggcggctacctggccgccctgtacagcggctacaacatcgagcagatcatgtacctgggcagcggcctgtgctgcgtgggcgccctggccggcctgagcacccagggcaccgccagactgggcaacgccctgggcatgatcggcgtggccggcggcctggccgccaccctgggcgtgctgaagcccggccccgagctgctggcccagatgagcggcgccatggccctgggcggcaccatcggcctgaccatcgccaagagaatccagatcagcgacctgccccagctggtggccgccttccacagcctggtgggcctggccgccgtgctgacctgcatcgccgagtacatcatcgagtacccccacttcgccaccgacgccgccgccaacctgaccaagatcgtggcctacctgggcacctacatcggcggcgtgaccttcagcggcagcctgatcgcctacggcaagctgcagggcctgctgaagagcgcccccctgctgctgcccggcagacacctgctgaacgccggcctgctggccgccagcgtgggcggcatcatccccttcatggtggaccccagcttcaccaccggcatcacctgcctgggcagcgtgagcgccctgagcgccgtgatgggcgtgaccctgaccgccgccatcggcggcgccgacatgcccgtggtgatcaccgtgctgaacagctacagcggctgggccctgtgcgccgagggcttcctgctgaacaacaacctgctgaccatcgtgggcgccctgatcggcagcagcggcgccatcctgagctacatcatgtgcgtggccatgaacagaagcctggccaacgtgatcctgggcggctacggcaccaccagcaccgccggcggcaagcccatggagatcagcggcacccacaccgagatcaacctggacaacgccatcgacatgatcagagaggccaacagcatcatcatcacccccggctacggcctgtgcgccgccaaggcccagtaccccatcgccgacctggtgaagatgctgaccgagcagggcaagaaggtgagattcggcatccaccccgtggccggcagaatgcccggccagctgaacgtgctgctggccgaggccggcgtgccctacgacatcgtgctggagatggacgagatcaaccacgacttccccgacaccgacctggtgctggtgatcggcgccaacgacaccgtgaacagcgccgcccaggaggaccccaacagcatcatcgccggcatgcccgtgctggaggtgtggaagagcaagcaggtgatcgtgatgaagagaagcctgggcgtgggctacgccgccgtggacaaccccatcttctacaagcccaacaccgccatgctgctgggcgacgccaagaagacctgcgacgccctgcaggccaaggtgagagagagctaccagaagtag

SEQ ID NO: 287900 - DNA, 1128 bp, Artificial Sequence
  derived and/or modified sequence
agtgcgcgctggcgcaaggttggtggaagtcgcgttgtgcagtttcactgttacatgccttgaagtgatgaggaggtttctgttactatatgctacacagcagggacaggcaaaggccatcgcagaagaaatatgtgagcaagctgtggtacatggattttctgcagatcttcactgtattagtgaatccgataaggtctcggtgattcagaatacacctacttttgcaatggggggaagataattgataaacgacttcaagagcttggagcccggcatttctatgacactggacatgcagatgactgtgtaggtttagaacttgtggttgagccgtggattgctggactctggccagccctcagaaagcattttaggtcaagcagaggacaagaggagataagtggcgcactcccggtggcatcacctgcatcctcgaggacagaccttgtgaagtcagagctgctacacattgaatctcaagtcgagcttctgagattcgatgattcaggaagaaaggattctgaggttttgaagcaaaatgcagtgaacagcaaccaatccaatgttgtaattgaagactttgagtcctcacttacccgttcggtacccccactctcacaagcctctctgaatattcctggtttacccccagaatatttacaggtacatctgcaggagtctcttggccaggaggaaagccaagtatctgtgacttcagcagatccagtttttcaagtgccaatttcaaaggcagttcaacttactacgaatgatgccataaaaaccactctgctggtagaattggacatttcaaatacagacttttcctatcagcctggagatgccttcagcgtgatctgccctaacagtgattctgaggtacaaagcctactccaaagactgcagcttgaagataaaagagagcactgcgtccttttgaaaataaaggcagacacaaagaagaaaggagctaccttaccccagcatatacctgcgggatgttctctccagttcatttttacctggtgtcttgaaatccgagcaattcctaaaaaggcatttttgcgagcccttgtggactataccagtgacagtgctgaaaagcgcaggctacaggagctgtgc

SEQ ID NO: 287901 - protein, 163 aa, Artificial Sequence
  derived and/or modified sequence
MEVPDYEMFPASSSSPSETTSAWISLSMSLSAFWSKPFNKSLGSSKLSNISLPSSEPSKLFQPLPVPKLLPHFQVHQAGLTCDYSELPHHISTEQEIECLIQSVHYLLKNLPNPTLVTIARSSLDDYCPSDQVDTIQEKVLNMLRALYGNLDLQVYAAESPPS

SEQ ID NO: 287902 - protein, 177 aa, Artificial Sequence
  derived and/or modified sequence
LVSQEEYKILQELYQFKKPGTNLTEEDLVDIVDTRIHQLEDLEATFADLCDGDDEETVQRWASNPGMESLVPLVQSLKKRMEVPDYEMVHQAGLTCDYSELPHHISTEQEIECLIQSVHYLLKNLPNPTLVTIARSSLDDYCPSDQVDTIQEKVLNMLRALYGNLDLQVYAAESPPS

SEQ ID NO: 287903 - DNA, 2679 bp, Artificial Sequence
  derived and/or modified sequence
cttgtatcacaagaagagtacaaaatcttacaagagctgtaccaatttaagaaacctggcaccaacctaacagaggaagatttggtagatattgttgatactcgaattcatcaattagaggatttagaagccactttcgctgatttgtgtgatggtgatgatgaagaaacggtacagagatgggcttcaaaccctggaatggaatcactagttccccttgtacagagtttgaaaaaacggatggaagtaccagactatgaaatggttcaccaggctggtttaacctgcgattattcagaacttcctcaccatatcagcacagaacaagaaatagagtgtcttattcaatctgtgcattatttgctgaaaaatttaccaaatcctactcttgtgacaattgcaaggtcaagtctggatgattactgtccttctgaccaagttgacactattcaagaaaaggtcctcaatatgctacgtgccctctatggaaatctagacctccaagtgtatgcagcagagtctcctccatcttgaaacaaacaaaacattaggctcctgttgtatcttggtttagtaacaggcccttaattaacttatttgtacatgagtcttccagagaacactgttttatattaactttcagttgaaatctttcagatattttgaatctctgaacaaccattgtcagttgtgaatgatggtaaattttttggcatcaagtctcataaccccaactgatagaactgttgcttatctgtcttccttaagtattttttagggttttgtttttttttttgtttgtttgtttgtttgtcttcacttttcccccaggtctgttgagctgtatgagattcattcatacttcatttattcattcaactaatatttgttgaacacttacatgtaccagacattattaagtgctgggtatatggtaatgaacagaatagacaaggcccctgcccttttaggggagacagatgagaagtaaattacgggttatgagaaatgttatgaaggaaaggacaacaacagacatgtcttagtacttagggtatcatggctttataggaaagtaacattctctatctttttttttttttttaattttataaaaatagagatggggtctcaccatgttacccaggctggtctcaaactcctgggcacaagcaatccacctgccttcgcctcccgaagtgctgggattacagatgtaagtcactaccccagccagaaactaacattctcaaaagctactaccaaaaaaaccccacaaatttgccaatccatgaaagtatcataggaagtctacctttccaaggaatttggcattgtggccctgctcttgccaaatgctctccagcattgttggtatcaaggtggtctggttgagtaaacttgaccaaacaaaaattaactgttttttgcttttctgtttttgttttgctgatcaaaaaagcccttcagggtctcttgtgcatccaggaggtcattgtagatatcaataatatagtgcctaagtgccactttattgccaagtctagattgatacttttttcagataaaccagctttttatgtaaagagtaagggaaaaagttaaatctttaattctgacctgccataaatacccaaagatataaactgtcttccaccacccccctcataactaagacatccttcctgagtcactcttaatcatgaaacttgattttctcaattggccagtcttctgatctttagtatctctttagttcagtaatttttacctacctacttgatttattttcctttaaaaggtgaaatgacatttaaagaaaaacaaacacccatcattcctcagtcccaacacagcagttcttttcactcttgcttgtaactttcaggccttacccacatgtgttcctatagagttgcatgtagctaaaattatagtgtgctgcctaactttgtgctaataacgaaggacacacattatcattgcctcacagtggatggcacctgaccccatttttccaaggattctattttccagtgaatttttgtcaccgagttaatttcccaagtctgatagcatgaatgcttatttgtgctgtgaaaagcagagcagcctgactcagctttccattttcataggataatatgtgccaaaaaaggtttattttcttggtaaaatcagaattgtagaattgtgctatttttaatttttaaaatttttggttagagcttatagacattacttttatgattattttgcgtgctaaataagttaaagggtatgttttgaactatagcactaattaatgtgtgtgatcctagtatgttgatagctttgattttgtgagtggtttactagtcatttattatgattcccatgaactctgatatgattcattgtggttttaactcaggttgaataaaagcatccatttcttttataggaaggtttgtttaattctcatgttctgtgatcatctctttgagaataaaattcagtccctaatagttgaaaagaatcaacttagtaaattatgtcttgcacattccaaataggaaggtatttactttatcaagatgtgtttcatttgtgttctgagtaccagtgaggggataccgtggtacagtgttttgaattgtgtactaatatcattaaagcatgggattttagtggcttttt

SEQ ID NO: 287904 - DNA, 492 bp, Artificial Sequence
  derived and/or modified sequence
atggaggtgcccgactacgagatgttccccgccagcagcagcagccccagcgagaccaccagcgcctggatcagcctgagcatgagcctgagcgccttctggagcaagcccttcaacaagagcctgggcagcagcaagctgagcaacatcagcctgcccagcagcgagcccagcaagctgttccagcccctgcccgtgcccaagctgctgccccacttccaggtgcaccaggccggcctgacctgcgactacagcgagctgccccaccacatcagcaccgagcaggagatcgagtgcctgatccagagcgtgcactacctgctgaagaacctgcccaaccccaccctggtgaccatcgccagaagcagcctggacgactactgccccagcgaccaggtggacaccatccaggagaaggtgctgaacatgctgagagccctgtacggcaacctggacctgcaggtgtacgccgccgagagcccccccagctag

SEQ ID NO: 287905 - DNA, 534 bp, Artificial Sequence
  derived and/or modified sequence
ctggtgagccaggaggagtacaagatcctgcaggagctgtaccagttcaagaagcccggcaccaacctgaccgaggaggacctggtggacatcgtggacaccagaatccaccagctggaggacctggaggccaccttcgccgacctgtgcgacggcgacgacgaggagaccgtgcagagatgggccagcaaccccggcatggagagcctggtgcccctggtgcagagcctgaagaagagaatggaggtgcccgactacgagatggtgcaccaggccggcctgacctgcgactacagcgagctgccccaccacatcagcaccgagcaggagatcgagtgcctgatccagagcgtgcactacctgctgaagaacctgcccaaccccaccctggtgaccatcgccagaagcagcctggacgactactgccccagcgaccaggtggacaccatccaggagaaggtgctgaacatgctgagagccctgtacggcaacctggacctgcaggtgtacgccgccgagagcccccccagctag

SEQ ID NO: 287906 - DNA, 492 bp, Artificial Sequence
  derived and/or modified sequence
atggaagtgccggattacgaaatgtttcctgcctcttcttcatcaccctctgaaaccacctccgcatggatttctctctcaatgtcattatccgccttctggagcaaacccttcaacaaatccttaggcagtagcaagctttccaatatctcgctcccctctagcgagcctagcaagctcttccagcccctccccgtgcctaagctgttgccccacttccaggtccaccaggctggtctcacatgtgattattcagagctgccccatcacatctctactgaacaagagatcgaatgtctgattcagtccgtgcactacttgttaaaaaaccttccaaaccctactctcgtgaccatagcccgctccagcctggacgactactgcccatctgatcaggttgatacaattcaggaaaaagttctaaacatgttgcgggctctgtacggaaaccttgacctgcaggtttacgctgccgagtcaccaccgtcctag

SEQ ID NO: 287907 - DNA, 534 bp, Artificial Sequence
  derived and/or modified sequence
ttggtttcacaagaggaatataagatactgcaggaactctaccaattcaaaaagccaggaacgaaccttaccgaggaagatcttgtggacatagtggacactcgaatacatcagcttgaagacctcgaagcaacgtttgccgacctgtgcgatggcgatgacgaggagacggtgcagagatgggccagtaaccctgggatggagtccctggttccccttgttcaaagcctgaaaaagaggatggaagtcccggattatgagatggtacaccaggcaggcctgacttgtgattactctgagttaccacaccacatctcaaccgagcaagagatagagtgcctaatccaaagcgtccattacctgctcaagaacttgccaaatccgactctcgtgaccatcgccaggtccagcttggacgactactgcccgtcagaccaggtcgataccattcaagagaaagtgttaaacatgctccgagcattatatggcaatttagatctccaggtatacgccgcagagtcccctccttcatag

SEQ ID NO: 287908 - DNA, 492 bp, Artificial Sequence
  derived and/or modified sequence
atggaggtgcctgactatgagatgtttcctgccagcagcagcagccccagcgagaccaccagcgcctggatcagcctgtccatgagcctgagcgccttctggagcaagcccttcaacaagagcctgggcagcagcaagctgagcaacatcagcctgcccagcagcgagcccagcaagctgttccagcccctgcctgtgcccaagctgctgccccacttccaggtgcaccaggccggcctgacctgtgactacagcgagctgccccaccacatcagcacagagcaggagattgagtgcctgatccagagcgtgcactacctgctgaagaacctgcccaaccccaccctggtgaccatcgcccggagcagcctggatgactactgccccagcgaccaggtggacaccatccaggagaaggtgctgaacatgctgcgggccctgtatggcaacctggacctgcaggtgtatgctgctgagagcccccccagctag

SEQ ID NO: 287909 - DNA, 534 bp, Artificial Sequence
  derived and/or modified sequence
ctggtgtcccaggaggagtacaagatcctgcaggagctgtaccagttcaagaagccaggcaccaacctgacagaggaggacctggtggacatcgtggacacccgcatccaccagctggaggacctggaggccacctttgctgacctgtgtgatggagatgatgaggagaccgtgcagcgctgggccagcaaccctggcatggagagcctggtgcccctggtgcagagcctgaagaagaggatggaggtgcctgactatgagatggtgcaccaggccggcctgacctgtgactacagcgagctgccccaccacatcagcacagagcaggagattgagtgcctgatccagagcgtgcactacctgctgaagaacctgcccaaccccaccctggtgaccatcgcccggagcagcctggatgactactgccccagcgaccaggtggacaccatccaggagaaggtgctgaacatgctgcgggccctgtatggcaacctggacctgcaggtgtatgctgctgagagcccccccagctag

SEQ ID NO: 287910 - DNA, 492 bp, Artificial Sequence
  derived and/or modified sequence
atggaggtgcccgactacgagatgttccccgccagcagcagcagcccatctgaaactacatctgcctggatcagtctcagtatgtcactcagcgctttctggtccaagccttttaacaaaagtctgggaagcagtaaactgagcaacatttcactcccctcgtcggaacctagtaagctttttcagcccctgcccgtccctaagctgcttccacattttcaggtgcaccaggcagggttgacgtgcgactactccgagctgccacatcacatctcaacagaacaagaaattgaatgtctgattcagtcagtgcactatctgttgaaaaacctcccaaatccgacactggttactatagctcgctctagtctggatgattactgcccgagcgaccaagtggacaccatccaggagaaagtgcttaatatgttgcgagctctgtacgggaacctggacctgcaggtatacgcagctgagagtcctccttcctag

SEQ ID NO: 287911 - DNA, 534 bp, Artificial Sequence
  derived and/or modified sequence
ctggtgagccaggaggagtacaagatcctgcaggagctgtaccagtttaagaagccaggcacgaacttgactgaggaagacctggtggacattgttgatacccggattcatcagctcgaggacttggaagcaaccttcgcagacctatgcgatggagacgatgaggagaccgtgcagcggtgggcctccaacccaggaatggagtccctggtgcccctggtgcagagcctgaagaagagaatggaggtgccagactacgaaatggtgcatcaagccggactgacctgcgattactccgagctcccccaccacatctcaacagaacaggagatcgaatgccttattcagtcggtccattacctcctcaagaacctgccaaatcccactctcgtgaccatagcgcggagtagcctggatgattactgccccagcgatcaggtagacaccatacaggaaaaggtgctcaatatgcttagggcactgtacgggaatctggatctgcaagtttacgctgcagaatcacctccctcttag

SEQ ID NO: 287912 - DNA, 492 bp, Artificial Sequence
  derived and/or modified sequence
atggaagtgccagactatgaaatgtttcctgcgagctcatcttctccttcagagacaacgagcgcctggatcagcttatctatgtctctgtccgccttttggtccaaaccattcaataagtcactgggaagtagcaagctgtccaacatctcactgccgtcaagcgagcctagcaagctctttcaacccctgcccgtgcctaagctgttaccacatttccaagtccatcaggcgggactaacatgcgactattccgagctcccccaccacatctcgaccgagcaagagatcgagtgtttgatacagagcgtgcactacctactcaagaacctaccgaatccaaccttagttaccatagccaggtcttctttagatgattactgtccttccgatcaggtcgataccatacaggaaaaagtactgaacatgctccgcgctttgtacgggaacctcgacctgcaagtgtatgccgctgagagtcctccctcatag

SEQ ID NO: 287913 - DNA, 534 bp, Artificial Sequence
  derived and/or modified sequence
ctggtgtcccaagaagagtataagattctgcaagaactatatcagttcaagaagccgggaactaatctgactgaagaggatctggtcgacattgtggataccaggatccaccagctggaggacttggaagcaaccttcgccgacttatgtgacggtgacgatgaggaaacagtgcagcggtgggctagcaacccaggcatggaatcattggtgccacttgtccaaagcttgaaaaagcggatggaggtaccagattacgaaatggtgcatcaggcagggctaacttgcgattactccgaactgccacatcacatatctaccgagcaggagattgagtgcctgatccaaagtgtccactacctcctgaaaaacttgcctaatcctaccctcgtcacaatcgctagaagttctctagacgactattgcccttccgatcaagtggacacgatccaggaaaaagtactcaatatgttgcgggctctatacggcaatcttgatctacaggtgtacgccgcagagagtccaccatcctag

SEQ ID NO: 287914 - protein, 892 aa, Artificial Sequence
  derived and/or modified sequence
GKHKLLSTGPTEPWSIREKLCLASSVMRSGDQNWVSVSRAIKPFAEPGRPPDWFSQKHCASQYSELLETTETPKRKRGEKGEVVETVEDVIVRKLTAERVEELKKVIKETQERYRRLKRDAELIQAGHMDSRLDELCNDIATKKKLEEEEAEVKRKATDAAYQARQAVKTPPRRLPTVMVRSPIDSASPGGDYPLGDLTPTTMEEATSGVTPGTLPSTPVTSFPGIPDTLPPGSAPLEAPMTPVTDDSPQKKMLGQKATPPPSPLLSELLKKGSLLPTSPRLVNESEMAVASGHLNSTGVLLEVGGVLPMIHGGEIQQTPNTVAASPAASESVSQATIVMMPALPAPSSAPAVSTTESVAPVSQPDNCVPMEAVGDPHTVTVSMDSSEISMIINSIKEECFRSGVAEAPVGSKAPSIDGKEELDLAEKMDIAVSYTGEELDFETVGDIIAIIEDKVDDHPEVLDVAAVEAALSFCEENDDPQSLPGPWEHPIQQERDKPVPLPAPEMTVKQERLDFEETENKGIHELVDIREPSAEIKVEPAEPEPVISGAEIVAGVVPATSMEPPELRSQDLDEELGSTAAGEIVEADVAIGKGDETPLTNVKTEASPESMLSPSHGSNPIEDPLEAETQHKFEMSDSLKEESGTIFGSQIKDAPGEDEEEDGVSEAASLEEPKEEDQGEGYLSEMDNEPPVSESDDGFSIHNATLQSHTLADSIPSSPASSQFSVCSEDQEAIQAQKIWKKAIMLVWRAAANHRYANVFLQPVTDDIAPGYHSIVQRPMDLSTIKKNIENGLIRSTAEFQRDIMLMFQNAVMYNSSDHDVYHMAVEMQRDVLEQIQQFLATQLIMQTSESGISAKSLRGRDSTRKQDASEKDGGTRGRRCAIEADMKMKK

SEQ ID NO: 287915 - DNA, 2274 bp, Artificial Sequence
  derived and/or modified sequence
ctggccaagaagatcaccctgaagaagaagctggaggaggaggaggccgaggtgaagagaaaggccaccgacgccgcctaccaggccagacaggccgtgaagaccccccccagaagactgcccaccgtgatggtgagaagccccatcgacagcgccagccccggcggcgactaccccctgggcgacctgacccccaccaccatggaggaggccaccagcggcgtgacccccggcaccctgcccagcacccccgtgaccagcttccccggcatccccgacaccctgccccccggcagcgcccccctggaggcccccatgacccccgtgaccgacgacagcccccagaagaagatgctgggccagaaggccacccccccccccagccccctgctgagcgagctgctgaagaagggcagcctgctgcccaccagccccagactggtgaacgagagcgagatggccgtggccagcggccacctgaacagcaccggcgtgctgctggaggtgggcggcgtgctgcccatgatccacggcggcgagatccagcagacccccaacaccgtggccgccagccccgccgccagcgagagcgtgagccaggccaccatcgtgatgatgcccgccctgcccgcccccagcagcgcccccgccgtgagcaccaccgagagcgtggcccccgtgagccagcccgacaactgcgtgcccatggaggccgtgggcgacccccacaccgtgaccgtgagcatggacagcagcgagatcagcatgatcatcaacagcatcaaggaggagtgcttcagaagcggcgtggccgaggcccccgtgggcagcaaggcccccagcatcgacggcaaggaggagctggacctggccgagaagatggacatcgccgtgagctacaccggcgaggagctggacttcgagaccgtgggcgacatcatcgccatcatcgaggacaaggtggacgaccaccccgaggtgctggacgtggccgccgtggaggccgccctgagcttctgcgaggagaacgacgacccccagagcctgcccggcccctgggagcaccccatccagcaggagagagacaagcccgtgcccctgcccgcccccgagatgaccgtgaagcaggagagactggacttcgaggagaccgagaacaagggcatccacgagctggtggacatcagagagcccagcgccgagatcaaggtggagcccgccgagcccgagcccgtgatcagcggcgccgagatcgtggccggcgtggtgcccgccaccagcatggagccccccgagctgagaagccaggacctggacgaggagctgggcagcaccgccgccggcgagatcgtggaggccgacgtggccatcggcaagggcgacgagacccccctgaccaacgtgaagaccgaggccagccccgagagcatgctgagccccagccacggcagcaaccccatcgaggaccccctggaggccgagacccagcacaagttcgagatgagcgacagcctgaaggaggagagcggcaccatcttcggcagccagatcaaggacgcccccggcgaggacgaggaggaggacggcgtgagcgaggccgccagcctggaggagcccaaggaggaggaccagggcgagggctacctgagcgagatggacaacgagccccccgtgagcgagagcgacgacggcttcagcatccacaacgccaccctgcagagccacaccctggccgacagcatccccagcagccccgccagcagccagttcagcgtgtgcagcgaggaccaggaggccatccaggcccagaagatctggaagaaggccatcatgctggtgtggagagccgccgccaaccacagatacgccaacgtgttcctgcagcccgtgaccgacgacatcgcccccggctaccacagcatcgtgcagagacccatggacctgagcaccatcaagaagaacatcgagaacggcctgatcagaagcaccgccgagttccagagagacatcatgctgatgttccagaacgccgtgatgtacaacagcagcgaccacgacgtgtaccacatggccgtggagatgcagagagacgtgctggagcagatccagcagttcctggccacccagctgatcatgcagaccagcgagagcggcatcagcgccaagagcctgagaggcagagacagcaccagaaagcaggacgccagcgagaaggacggcggcaccagaggcagaagatgcgccatcgaggccgacatgaagatgaagaagtag

SEQ ID NO: 287916 - DNA, 2679 bp, Artificial Sequence
  derived and/or modified sequence
ggcaagcacaagctgctgagcaccggccccaccgagccctggagcatcagagagaagctgtgcctggccagcagcgtgatgagaagcggcgaccagaactgggtgagcgtgagcagagccatcaagcccttcgccgagcccggcagaccccccgactggttcagccagaagcactgcgccagccagtacagcgagctgctggagaccaccgagacccccaagagaaagagaggcgagaagggcgaggtggtggagaccgtggaggacgtgatcgtgagaaagctgaccgccgagagagtggaggagctgaagaaggtgatcaaggagacccaggagagatacagaagactgaagagagacgccgagctgatccaggccggccacatggacagcagactggacgagctgtgcaacgacatcgccaccaagaagaagctggaggaggaggaggccgaggtgaagagaaaggccaccgacgccgcctaccaggccagacaggccgtgaagaccccccccagaagactgcccaccgtgatggtgagaagccccatcgacagcgccagccccggcggcgactaccccctgggcgacctgacccccaccaccatggaggaggccaccagcggcgtgacccccggcaccctgcccagcacccccgtgaccagcttccccggcatccccgacaccctgccccccggcagcgcccccctggaggcccccatgacccccgtgaccgacgacagcccccagaagaagatgctgggccagaaggccacccccccccccagccccctgctgagcgagctgctgaagaagggcagcctgctgcccaccagccccagactggtgaacgagagcgagatggccgtggccagcggccacctgaacagcaccggcgtgctgctggaggtgggcggcgtgctgcccatgatccacggcggcgagatccagcagacccccaacaccgtggccgccagccccgccgccagcgagagcgtgagccaggccaccatcgtgatgatgcccgccctgcccgcccccagcagcgcccccgccgtgagcaccaccgagagcgtggcccccgtgagccagcccgacaactgcgtgcccatggaggccgtgggcgacccccacaccgtgaccgtgagcatggacagcagcgagatcagcatgatcatcaacagcatcaaggaggagtgcttcagaagcggcgtggccgaggcccccgtgggcagcaaggcccccagcatcgacggcaaggaggagctggacctggccgagaagatggacatcgccgtgagctacaccggcgaggagctggacttcgagaccgtgggcgacatcatcgccatcatcgaggacaaggtggacgaccaccccgaggtgctggacgtggccgccgtggaggccgccctgagcttctgcgaggagaacgacgacccccagagcctgcccggcccctgggagcaccccatccagcaggagagagacaagcccgtgcccctgcccgcccccgagatgaccgtgaagcaggagagactggacttcgaggagaccgagaacaagggcatccacgagctggtggacatcagagagcccagcgccgagatcaaggtggagcccgccgagcccgagcccgtgatcagcggcgccgagatcgtggccggcgtggtgcccgccaccagcatggagccccccgagctgagaagccaggacctggacgaggagctgggcagcaccgccgccggcgagatcgtggaggccgacgtggccatcggcaagggcgacgagacccccctgaccaacgtgaagaccgaggccagccccgagagcatgctgagccccagccacggcagcaaccccatcgaggaccccctggaggccgagacccagcacaagttcgagatgagcgacagcctgaaggaggagagcggcaccatcttcggcagccagatcaaggacgcccccggcgaggacgaggaggaggacggcgtgagcgaggccgccagcctggaggagcccaaggaggaggaccagggcgagggctacctgagcgagatggacaacgagccccccgtgagcgagagcgacgacggcttcagcatccacaacgccaccctgcagagccacaccctggccgacagcatccccagcagccccgccagcagccagttcagcgtgtgcagcgaggaccaggaggccatccaggcccagaagatctggaagaaggccatcatgctggtgtggagagccgccgccaaccacagatacgccaacgtgttcctgcagcccgtgaccgacgacatcgcccccggctaccacagcatcgtgcagagacccatggacctgagcaccatcaagaagaacatcgagaacggcctgatcagaagcaccgccgagttccagagagacatcatgctgatgttccagaacgccgtgatgtacaacagcagcgaccacgacgtgtaccacatggccgtggagatgcagagagacgtgctggagcagatccagcagttcctggccacccagctgatcatgcagaccagcgagagcggcatcagcgccaagagcctgagaggcagagacagcaccagaaagcaggacgccagcgagaaggacggcggcaccagaggcagaagatgcgccatcgaggccgacatgaagatgaagaagtag

SEQ ID NO: 287917 - DNA, 2274 bp, Artificial Sequence
  derived and/or modified sequence
ctcgctaagaagatcaccttgaagaagaagcttgaggaagaggaggccgaagtaaagagaaaggccacggacgccgcataccaggccagacaagccgttaaaacaccccctaggcggttgcctacagttatggtgcggagcccaatcgattcggctagtcctggtggggattaccctcttggagacctcactccaaccacaatggaagaagcaaccagcggggtgactcccggaactttgcccagtaccccagttacctctttcccaggcattccagacaccctcccaccgggtagtgccccccttgaagcgcccatgacccctgtgactgacgactcaccacagaagaagatgctggggcagaaggccacccctccaccttccccactgctgagcgagctgttgaaaaaggggagcctgctgcccaccagcccacggttggtcaacgagtctgaaatggccgtagcctcgggtcacctcaacagtactggtgtcttgctggaggtaggcggcgtgctccctatgatccacggaggggaaatccagcagaccccaaatacagtggccgcctctcccgccgctagtgagtccgtgagccaggcgaccatcgtcatgatgccagcattgcccgctcccagtagtgctcccgccgtgagcacaacagagtctgtggcgcctgtgagccagccggacaactgtgtccctatggaggcggtgggcgatccgcacactgtcaccgtatctatggactcatctgaaatctccatgatcatcaacagtatcaaagaagagtgttttcgctctggcgtcgcagaggctcctgtgggctctaaggctcctagtattgacgggaaagaggagctggatctggcagagaagatggatatcgctgtttcatacactggggaggaactcgatttcgaaactgtgggagacattattgccatcatagaagacaaggtggatgatcacccagaagtgctggatgtggccgctgtcgaggccgccctgagcttctgtgaggagaatgatgatcctcagagcctgcctgggccatgggaacaccccatccagcaggaaagagataagcccgtccccctgcccgctccagagatgaccgtgaaacaggaacggctcgactttgaagaaaccgagaataagggtattcacgaactggtcgatatcagggaaccttccgcggagatcaaggtggaaccagcagaaccggaaccggtgatttccggcgctgagattgtggccggcgtggtgccggctacttctatggaaccccctgaacttcgctcacaggatctggatgaggagctggggtctaccgccgccggtgagatcgttgaggcagacgtggctatcggtaagggagacgagaccccactgacaaacgtgaagacggaggcaagtcctgagagtatgctgagcccctcccatggctctaacccgattgaagatccgctagaggccgaaacccagcacaaattcgagatgagcgacagcttgaaagaggaatctgggactattttcggatctcagattaaagacgcccccggtgaggacgaagaggaggacggagtttctgaggctgcctccctagaggaaccaaaggaggaagaccagggagaaggatatctgagcgagatggacaacgagcccccagtcagcgaaagtgatgatggcttctcgatacataatgctacgctgcagtctcatacactggctgacagcattccttccagtcccgcctctagtcagttcagtgtgtgcagcgaagaccaggaagcgatccaggctcagaagatctggaagaaagccattatgctggtgtggcgagcggcagccaatcatagatatgccaacgtgttcttgcaacctgtaacagacgacattgctccagggtatcacagcattgtgcagagacccatggacttgtccacaattaagaaaaacattgagaatggcctgatcaggagcaccgccgaatttcaaagagatattatgcttatgttccaaaacgcagtgatgtataatagcagcgatcatgacgtataccacatggccgtggagatgcagagagacgtcctggaacagatacagcaatttctcgcaactcaactcatcatgcagacaagtgaatccggaatcagcgctaaaagtctgcgaggtagggattccacaagaaaacaggacgcttctgaaaaggacggaggtacacgaggtaggcggtgtgccatagaagccgatatgaaaatgaagaagtag

SEQ ID NO: 287918 - DNA, 2679 bp, Artificial Sequence
  derived and/or modified sequence
ggcaagcacaaattgcttagtaccggaccaaccgagccctggtcaatccgtgagaagttatgtctcgcctcaagcgtgatgcggtctggagatcaaaactgggtgagcgtcagccgagctataaaaccttttgcagagccggggagacctccggattggttctcccagaagcactgcgcctcgcagtattctgaactattggagaccacagagacacccaaacgtaagcggggcgagaagggggaggtcgtggaaacagtggaagacgtgatagttcgcaaattgacagcagagcgagttgaggaattgaagaaggtgatcaaggagacacaggagcgatacaggcgcctgaaaagggacgctgagctgatccaagccggacatatggactcacggctggacgagttatgtaatgacattgcaactaagaagaagctggaggaggaagaagccgaagtcaaacgaaaggctactgacgccgcttaccaagccaggcaggccgtgaagactccaccaagacggttgccaaccgtcatggttagaagcccaatcgactcagcctctccaggtggagactatccactgggcgatctcacaccaactacgatggaggaggcaacatctggtgttaccccaggtactctcccatctactcccgttacgagtttccctggtattccggataccctgcctcccggctcggcgccgctcgaggcacctatgacccccgtgaccgatgacagcccccaaaaaaaaatgctgggccagaaggcaacacccccaccctctccactgctgtcagagttacttaaaaagggatcgcttttgcccacctcaccccggctggttaatgagagcgagatggccgttgcgagcgggcacttgaactcaactggagttttgctggaagtgggaggtgtgttgccaatgatccatggcggcgaaatacagcaaaccccaaacaccgtggcggcatccccagcagcgagtgagtctgtctcccaggctaccattgtgatgatgccagcacttcctgctccatcatcagcacctgccgtgagtaccacagagagcgtggcaccagtgtcccagccagataactgcgtgcctatggaagctgtcggggatcctcacacagtaactgtgtccatggatagcagtgaaatttccatgattattaattccatcaaagaagagtgttttaggtctggcgtggcagaggctcctgtgggctccaaagctcctagtattgacggaaaggaggaactggatcttgcggaaaagatggacatcgccgtgtcatataccggcgaagaactggacttcgagacagttggagatattatagcgatcatagaagacaaagtcgatgatcacccggaggtgctggacgtggctgccgtagaggctgcattgtccttctgcgaggagaacgatgacccacagtctctcccagggccctgggagcaccccatccagcaggaacgggacaaacccgtgcctctgccagcccccgagatgacagtgaaacaagagaggcttgatttcgaggaaacagaaaataagggcatccatgagttagtagatatcagagagccaagtgccgagatcaaggtcgaaccagcagagcctgaacccgtgatctcgggtgcagaaatcgtggccggggtggtcccggctacaagcatggaaccgcctgagctgagatcgcaagatttggacgaggagttaggtagtactgctgctggcgagattgtggaggccgacgtcgcaattggtaagggggacgagacgccgcttactaatgtaaagaccgaggcctcccccgaatcgatgcttagcccctcacacgggtccaatcctatcgaggacccactcgaggcagaaacgcagcacaagtttgagatgtccgatagtctgaaagaggagtccgggaccatctttggtagccagatcaaggatgcaccaggcgaggacgaggaggaggacggcgtgtctgaagccgcgtccctggaagaacctaaggaagaagatcaaggtgagggatatctgtcagagatggacaacgagccccccgtgagcgaatctgatgatggattctctatccataatgctactttgcagagccatacactggcagattcgattcccagcagccccgctagtagtcagttctccgtgtgctccgaagaccaagaagccatacaggcccagaaaatctggaagaaggctattatgctggtgtggcgggctgcagcaaaccaccgttacgccaacgtttttctacagccagtgactgacgatatcgctcccgggtaccacagcattgtgcagcgccctatggatctgagcaccatcaagaagaatatcgagaacggcctcatccggtctaccgcagagttccagagagacattatgctcatgttccagaatgcagttatgtataactcctccgaccacgatgtttaccacatggccgtggagatgcagcgggacgtactggagcaaattcaacagttccttgccacccagctgattatgcaaacatctgagagcggaatatccgcaaaaagtctgagaggcagagactccaccagaaaacaggacgcatcagaaaaggacggggggactcgcggacgcaggtgcgcaatcgaagctgatatgaagatgaaaaaatag

SEQ ID NO: 287919 - DNA, 2274 bp, Artificial Sequence
  derived and/or modified sequence
ctggccaagaagatcaccctgaagaagaagctggaggaggaggaggccgaggtgaagaggaaggccacagatgctgcctaccaggcccggcaggccgtgaagaccccaccccggcggctgcccaccgtgatggtgcgcagccccattgattctgccagccctggaggagactaccccctgggggacctgacccccaccaccatggaggaggccaccagcggcgtgaccccaggcaccctgcccagcacccctgtgaccagcttccctggcatcccagacaccctgcccccaggcagcgcccccctggaggcccccatgacccctgtgacagatgacagcccccagaagaagatgctgggccagaaggccaccccaccacccagccccctgctgtctgagctgctgaagaagggcagcctgctgcccaccagcccccggctggtgaatgaaagtgagatggctgtggccagcggccacctgaacagcactggagtgctgctggaggtgggcggcgtgctgcccatgattcatggaggagagatccagcagacccccaacacagtggccgccagccctgctgccagcgagagcgtgtcccaggccaccatcgtgatgatgcctgccctgcctgcccccagcagcgccccagctgtgtccaccacagaatctgtggcccctgtgtcccagcctgacaactgtgtgcccatggaggccgtgggggacccccacacagtgacagtgtccatggacagcagcgagatctccatgatcatcaacagcatcaaggaggagtgcttccgcagcggcgtggccgaggcccctgtgggcagcaaggcccccagcattgatggcaaggaggagctggacctggccgagaagatggacattgctgtgtcctacacaggagaggagctggactttgaaacagtgggggacatcatcgccatcatcgaggacaaggtggatgaccaccctgaggtgctggatgtggccgctgtggaggccgccctgtccttctgtgaggagaatgatgacccccagagcctgcccggcccctgggagcaccccatccagcaggagcgggacaagcctgtgcccctgcctgcccctgagatgacagtgaagcaggagcggctggactttgaggagacagaaaataaaggcatccacgagctggtggacatccgggagcccagcgctgagatcaaggtggagcctgctgagcctgagcctgtgatcagcggggctgagatcgtggccggcgtggtgcctgccacctccatggagcccccagagctgcggagccaggacctggatgaggagctgggcagcacagctgctggggagatcgtggaggctgatgtggccatcggcaaaggagatgagacccccctgaccaacgtgaagacagaggccagccctgagagcatgctgagccccagccacggcagcaaccccatcgaggaccccctggaggccgagacccagcacaagtttgagatgtctgacagcctgaaggaggagagcggcaccatcttcggcagccagatcaaggatgcccctggagaagatgaggaggaggatggagtgtctgaggccgccagcctggaggagcccaaggaggaggaccagggcgagggctacctgtctgagatggacaatgagccccctgtgtctgagagtgatgatggcttcagcatccacaatgccaccctgcagagccacaccctggccgacagcatccccagcagccctgccagcagccagttctctgtgtgcagcgaggaccaggaggccatccaggcccagaagatctggaagaaggccatcatgctggtgtggagggctgctgccaaccacagatatgccaacgtgttcctgcagcctgtgacagatgacatcgcccctggctaccacagcatcgtgcagaggcccatggacctgagcaccatcaagaagaacattgaaaatggcctcatccgcagcacagctgagttccagagggacatcatgctgatgttccagaatgctgtgatgtacaacagcagtgaccatgatgtgtaccacatggctgtggagatgcagagagatgtgctggagcagatccagcagttcctggccacccagctgatcatgcagaccagcgagagcggcatcagcgccaagagcctgcggggccgggacagcaccaggaagcaggatgccagcgagaaggatggcggcacccggggcagaagatgtgccattgaagctgacatgaagatgaagaagtag

SEQ ID NO: 287920 - DNA, 2679 bp, Artificial Sequence
  derived and/or modified sequence
gggaagcacaagctgctgagcacaggccccacagagccctggagcatccgggagaagctgtgcctggccagctctgtgatgaggtctggggaccagaactgggtgtctgtgtcccgggccatcaagccctttgctgagcccggccggcccccagactggttcagccagaagcactgtgccagccagtacagcgagctgctggagaccacagagacccccaagaggaagagaggagagaagggggaggtggtggagaccgtggaggatgtgattgtgaggaagctgacagctgagcgggtggaggagctgaagaaggtgatcaaggagacccaggagcgctacagaaggctgaagagagatgctgagctgatccaggccggccacatggacagccggctggatgagctgtgcaatgacatcgccaccaagaagaagctggaggaggaggaggccgaggtgaagaggaaggccacagatgctgcctaccaggcccggcaggccgtgaagaccccaccccggcggctgcccaccgtgatggtgcgcagccccatcgacagcgccagccctggaggagactaccccctgggggacctgacccccaccaccatggaggaggccaccagcggcgtgaccccaggcaccctgcccagcacccctgtgaccagcttccctggcatcccagacaccctgcccccaggcagcgcccccctggaggcccccatgacccctgtgacagatgacagcccccagaagaagatgctgggccagaaggccaccccaccacccagccccctgctgtctgagctgctgaagaagggcagcctgctgcccaccagcccccggctggtgaatgaaagtgagatggctgtggccagcggccacctgaacagcactggagtgctgctggaggtgggcggcgtgctgcccatgatccacggcggggagatccagcagacccccaacacagtggccgccagccctgctgccagcgagagcgtgtcccaggccaccatcgtgatgatgcctgccctgcctgcccccagcagcgccccagctgtgtccaccacagagagcgtggcccctgtgtcccagcctgacaactgtgtgcccatggaggccgtgggggacccccacacagtgacagtgtccatggacagcagcgagatctccatgatcatcaacagcatcaaggaggagtgcttccgctctggagtggccgaggcccctgtgggcagcaaggcccccagcattgatggcaaggaggagctggacctggccgagaagatggacattgctgtgtcctacaccggggaggagctggactttgagaccgtgggggacatcatcgccatcatcgaggacaaggtggatgaccaccctgaggtgctggatgtggccgctgtggaggccgccctgtccttctgtgaagaaaatgatgacccccagagcctgcccggcccctgggagcaccccatccagcaggagcgggacaagcctgtgcccctgcctgcccctgagatgacagtgaagcaggagcggctggactttgaggagacagagaacaagggcatccacgagctggtggacatccgggagcccagcgctgagatcaaggtggagcctgctgagcctgagcccgtcatctctggagctgagatcgtggccggcgtggtgcctgccacctccatggagcccccagagctgcggagccaggacctggatgaggagctgggcagcacagctgctggggagatcgtggaggctgatgtggccatcggcaaaggagatgagacccccctgaccaacgtgaagacagaggccagccctgagagcatgctgagccccagccacggcagcaaccccatcgaggaccccctggaggccgagacccagcacaagtttgagatgtctgacagcctgaaggaggagagcggcaccatcttcggcagccagatcaaggatgcccctggagaagatgaggaggaggatggagtgtctgaggccgccagcctggaggagcccaaggaggaggaccagggcgagggctacctgtctgagatggacaatgaacctcctgtgtctgagagtgatgatggcttcagcatccacaatgccaccctgcagagccacaccctggccgacagcatccccagcagccctgccagcagccagttctctgtgtgcagcgaggaccaggaggccatccaggcccagaagatctggaagaaggccatcatgctggtgtggagggctgctgccaaccacagatatgccaacgtgttcctgcagcctgtgacagatgacatcgcccctggctaccacagcatcgtgcagaggcccatggacctgagcaccatcaagaagaacattgaaaatggcctcatccgcagcacagctgagttccagagggacatcatgctgatgttccagaatgctgtgatgtacaacagcagtgaccatgatgtgtaccacatggctgtggagatgcagagagatgtgctggagcagatccagcagttcctggccacccagctgatcatgcagaccagcgagagcggcatcagcgccaagagcctgcggggccgggacagcaccaggaagcaggatgccagcgagaaggatggcggcacccggggccgccgctgtgccatcgaggccgacatgaagatgaagaagtag

SEQ ID NO: 287921 - DNA, 2274 bp, Artificial Sequence
  derived and/or modified sequence
ctggccaagaagatcaccctgaagaagaagctggaggaggaggaggcagaagtcaagcggaaggcaacagatgctgcttaccaggcgcgacaggccgtcaagacacctccacgaagacttccaactgtcatggttagaagcccgattgatagcgccagtccggggggtgattaccccttgggggatctgacccccaccactatggaagaggcgacctctggggttactcctggtaccctaccatccacaccagtcaccagtttccccgggatacctgatactctgccaccaggttcagccccactcgaggcgccgatgacccccgtgaccgatgatagcccccagaagaaaatgttgggacagaaggccactcccccccccagccctctgctctctgagctattaaagaaggggtcactgttgcctacaagcccaagattggtcaacgagtccgaaatggccgttgctagtgggcatctaaattcgaccggtgtccttctggaggtcgggggagtactgcccatgattcacggcggtgaaatccagcagacaccaaacaccgtcgcagccagcccagcggcgtcggaatctgtgtcgcaagccacaatcgtgatgatgcctgcactgcctgccccttcttcagcccccgcagtgtcaactaccgagtctgtggcacccgtgtctcagcctgacaattgcgtgcctatggaggccgtgggagacccccatacagtcaccgtgagcatggactcttccgagatcagtatgataatcaacagtatcaaggaagagtgctttaggtctggggttgccgaggcccccgtgggctccaaagcccccagtatcgacggtaaggaggagttggatttggctgagaaaatggatattgcagtgtcatatacaggggaggagcttgacttcgagacggtaggtgatataattgccatcatcgaggataaggtggatgaccaccccgaggtcctggatgtggcggccgtggaagcagccctgtctttttgcgaggagaatgatgaccctcagagcctgccggggccttgggaacatcccatccaacaagagcgtgataagcctgtccccctcccagcaccagagatgactgtaaaacaggagcggctcgattttgaggaaacggaaaataagggaatccacgaacttgtggatattcgcgagccctcagctgagatcaaggtcgagcccgccgagccagagcccgtaatatcgggggcagaaatcgtcgctggcgtcgtacctgcaaccagcatggagcctccagagctccggtcacaggacttagatgaggagcttgggagcacggccgcgggagaaatcgtggaggccgatgtggctatcggaaaaggcgatgagacccccctgactaatgtcaaaacggaagcctctccagagtcaatgctgtcgccatcgcatggatccaacccgattgaggatcctctggaggcagagactcaacataagttcgaaatgagcgactccttgaaagaagagtcagggaccatctttggttcacagatcaaagatgcacctggagaagacgaggaagaagacggcgtttcagaagccgctagcttggaagagcctaaagaggaagaccaaggcgagggttacctgtcggagatggataatgagccacctgtctcagagagcgacgatgggtttagtatccacaacgccaccctgcagagtcacaccctcgctgactctataccctcaagtcctgctagtagccagttctctgtgtgcagcgaagaccaggaagccattcaggcccagaaaatctggaagaaggccatcatgttggtatggagagctgcggccaatcacagatatgcgaatgtgttcctgcagccagtcactgacgatatcgctcctggatatcactcaattgtgcagagaccgatggacctgtctactatcaaaaagaatattgagaacggcctgatccgcagcaccgccgagttccagcgggatataatgctcatgttccagaacgccgtgatgtataactcatcagaccatgatgtctatcatatggcagtcgagatgcagagagacgtgctggaacaaattcagcagtttctggccacccagcttattatgcagacctcagaatcaggcatctccgcaaagagtctcaggggtagggactcaacaagaaaacaggatgcatccgaaaaagacggaggaacacgggggagacgctgcgccattgaggcggacatgaaaatgaaaaagtag

SEQ ID NO: 287922 - DNA, 2679 bp, Artificial Sequence
  derived and/or modified sequence
ggcaagcacaagctgctgagcaccggccccaccgagccctggagcatcagggagaagttgtgcctcgcttccagcgtcatgcggtcaggcgatcagaattgggtgagcgtttcgcgtgcgatcaagccatttgccgaacccgggagaccacccgactggttctcgcagaagcactgcgcctcacagtattccgagctgctggagaccactgagacaccgaagaggaagcggggtgaaaaaggcgaggtggtggaaacagtggaagacgttatcgttcggaagctcaccgctgaacgcgtggaagaattgaagaaggttatcaaagagacacaagaaaggtaccgtcgactaaagcgagatgccgaactcatccaggccggccacatggactccagactggacgagctgtgtaatgatattgccaccaagaaaaaacttgaagaggaagaggccgaggtgaagcggaaagccaccgacgcagcatatcaggccaggcaggctgtgaaaacccctcctaggcggcttcctactgtaatggtgcgtagcccaatagacagcgcctctccagggggcgattacccgcttggggacctgacaccaactaccatggaagaagcaacatccggcgttacccctggaaccctccctagcacaccagtaacgtccttccctgggattcctgataccttgcctccgggttccgccccccttgaggcaccgatgaccccagtgacagatgactctccccagaagaaaatgctggggcaaaaggcaactcctccaccgtccccacttctgagcgaattgctgaaaaaaggctcactgttacccacatcccccagattggttaatgaatcagaaatggccgtagcttctgggcacctcaattccaccggtgttttgctcgaagtggggggcgtactgcccatgatccatgggggggaaatccagcagacgccaaacacagtggccgccagccccgccgcaagcgagtctgtctctcaggctaccatagtgatgatgcctgctcttccagctccttcctctgctcccgccgtatcaacgacagaatctgtggctccagtgtcccagccagataactgcgttcccatggaggcagtcggcgatcctcataccgtaactgtaagtatggactcaagtgaaatcagcatgataatcaacagcattaaggaggaatgctttaggtctggcgtggctgaggctcccgtaggttccaaggctcccagtatcgatggtaaggaagagctggatctggccgagaaaatggacatcgcagtgtcttacacaggtgaggagttagacttcgagacggtaggagatataattgctataatcgaggacaaagtcgacgaccaccccgaggtgctggacgtggccgctgtggaggcagcgcttagcttttgcgaagagaatgacgacccccagagtctcccgggaccctgggaacatccaatccagcaggagcgggataagcccgtgcccttgccagctcctgagatgaccgtgaaacaagagcggctggactttgaggagacagaaaacaagggcattcacgaactggtggacattagagaaccatcagccgagataaaagttgaacccgcggagcccgagcctgtaatcagcggtgccgagatcgtggcaggagttgtccctgctaccagcatggagccgccggagctacggtctcaagatctggacgaagagctcggtagcacagcagccggggagatcgtggaggctgacgttgcaataggcaagggagacgagactcccctgactaatgtcaagaccgaagcgagtcctgagtccatgcttagcccgtcccatgggagcaacccaatcgaagatccgctggaagccgaaactcagcacaaattcgaaatgtcagattcactgaaggaagagtccgggacgattttcggctcccaaatcaaggatgcaccaggggaagacgaggaagaggatggggttagcgaggcagcttctttggaagagccaaaagaggaggaccaaggggagggctatttgagtgagatggataacgaaccccctgtaagcgagtccgacgacggcttctccattcataatgctaccctccagtctcacaccttggcagacagcatcccttcatccccagcctcctctcaattttccgtgtgctcagaggaccaggaggccatacaagcccagaagatctggaaaaaggcaatcatgcttgtatggcgagctgccgctaatcatcgctatgcaaacgtgttccttcagcctgtcacagatgatatcgcaccaggctatcacagcatagtccagcggcccatggacctttccacaattaagaagaatattgagaacggcttgattcgcagtaccgccgagtttcagcgggatataatgcttatgttccaaaacgctgtcatgtacaactcctctgatcatgatgtgtaccacatggcggtggagatgcagagagacgtactcgagcaaatccagcagttcctggccacacagctgattatgcagacaagcgagagcggtatatcagcaaagtctttgcgtggtcgagactccactcgtaaacaagacgcctcggaaaaggacgggggcacccgcggaaggcgctgcgctattgaggctgacatgaagatgaagaaatag

SEQ ID NO: 287923 - DNA, 2274 bp, Artificial Sequence
  derived and/or modified sequence
ctggcaaaaaagattaccctgaaaaagaagctggaagaagaggaagcagaggtgaagcgtaaggctaccgacgccgcataccaggctcgccaggctgtgaaaacccctccaagacgcctgcctactgtgatggtcagatcccccatagacagtgcctcccccggtggggattacccgctgggagaccttacccctaccacaatggaggaggctacttccggagttactccaggtactttacctagcacaccggtcacctcgtttccaggaataccagacacactgccaccaggaagtgccccattggaggcccctatgaccccagtgaccgacgatagcccacaaaaaaaaatgctcggccaaaaggccacacccccaccatctccactgctgtcagagttgctgaaaaaaggcagtctgctgcccacctccccccgtctagtcaatgagagcgagatggccgtggcgtctgggcacctcaacagcacaggagtgctgctagaggtgggaggagttctgcctatgatccatggtggagagattcaacagacgcccaataccgtcgccgcatctccagctgcttcggagagcgtgtctcaggcaactatcgtcatgatgcccgctctgcctgccccttcgtcagcacccgcagtgtctactaccgagtctgtggctcctgtgtcacaaccggacaattgcgtgccgatggaggcagttggagatcctcataccgtcaccgtcagcatggactcgagtgaaatttccatgatcattaacagcattaaagaggaatgcttccgaagcggagtggcagaagcgcctgtgggttcgaaagccccttctattgacggtaaagaagagctggatctcgctgaaaaaatggacattgcagtgtcctataccggcgaagagctcgacttcgagactgtgggagacattattgccattatcgaggacaaggttgatgatcacccagaagttctggatgttgcagcagtcgaagctgcactgtctttttgcgaggagaatgacgatccacagtctttaccaggtccatgggagcatcctatacagcaggaacgcgacaaacctgttcctctacctgcccctgagatgactgtcaagcaggaaagattggacttcgaagagacagagaacaagggcatccacgagctggtggatattcgggaaccaagcgcagagataaaggtggaacccgctgaaccagaaccggtgatttccggcgcagaaattgtagcaggcgtggttcccgctacttcgatggagccccctgagctgcgatctcaagatctcgacgaggaactgggatcgacagcagccggtgagattgtggaggccgacgtcgctatcggcaagggagatgagaccccccttactaacgtcaagacagaggccagcccggagtctatgctttcaccttcccacggcagcaaccccatcgaggacccgctcgaagcagagactcagcataagttcgagatgtctgactccctaaaggaggagagcgggactatttttggttctcagattaaggatgcaccaggggaggatgaggaggaagatggggtgtcagaagctgcctcattggaggagccaaaagaagaggaccagggcgaagggtacctgtccgaaatggataatgagccacctgtgagcgaaagtgacgatggattctctattcacaacgccactcttcagtcccacacccttgcggattccattcctagctcccccgcttcttcgcagttcagtgtgtgcagtgaagaccaggaggctatccaggcccagaagatttggaagaaggctattatgctggtgtggcgcgcagctgccaatcaccgctacgccaacgtttttctgcaacctgtcactgacgacatcgctcccggatatcatagtattgttcaacggccaatggacttgtcgaccatcaagaagaacatcgagaacggcctgatcagaagcaccgctgagttccagcgagatataatgctgatgtttcagaacgctgttatgtacaattcttccgatcacgatgtttaccacatggctgtggagatgcagagagacgtgctagagcagatccagcagttcttagctacacaactgatcatgcagacctcagaaagtggcatcagtgctaagagcctgcgaggaagggatagcaccagaaaacaagatgcctctgaaaaagacggaggcacgagggggaggagatgtgctatcgaggctgacatgaaaatgaaaaaatag
